United States Patent Application Publication US 2011/0183924 A1 - sequence listing, part 201

SEQ ID NO: 475136 - DNA, 1589 bp, Homo sapiens
agctgattcactatacgtctgtctgcttcttaagacttcgcctctggtcactacactacaatgggtggtttagcgaaagcctttgacagtgtggtggaaataggtttggtccttggtagcatgtgccagcagcagcacgagcagcagcatggcagggtgcaggctcatttgttgcagcagggtgctaatgggtgccagggccagggtgcctgattccatgcaggtattcaccacagtggccgagacagcacagctgtgggggtggctctttggtgactatgtgtgccaccgtgctggtggtggtgttagcaaaagggcaggatgcttgcaggcacagatttctttgccctttctgtgggccataggcaggggtggttactcagggtgggaacaagtccactgttctctatgcagagtttcattctggcagcagtgttggttcaagggcagggcactggtgaaagcaggtctagcttgccctatgcctgccaaggctccagctgcaatggcagtcatacaggaggtgcagggcagactatactcccacagcagcagtggcggggcagggtacatgtacacacattcgtgcactggtggggcaaggaaagcaaaatctgccttgcacaaacatgcaggcaaagcaatgtgggggtgaaggcatggtccaccagtgcaatagctatcatgcaggcctccagggaatccaaggctgccctgcaagcagatgttcgttttggctgttaaattgcattatattgctctgggacagataatttttctttgatgacactaaataagattctttattttttcagctgttcttttataataattttaataaagattgtgaaacaatttcagtccaaggaggcagctgacccaatgagagaacaatagtgtgccaaaaatgcttttctctgacctctcagatgggtgctatcactgagaagagctttcatttcagtcaacgtgaccgtgataaagtatgagcgctgtggctgtgaactccctttggataatgcttcatgacatatggaaaatgtttcctgacttatgaaaactaatatggggacagaatttactaaaaggttcaggtcacttgggtgaaggaagcattaacacaatccttaactacagtctttaagtcataaatatctgactcatgaaagaaatatatttatttcaccctttctgagttttaagaacctgtagggaaaataaagatatgatcatattcctaatagtgagtggggaaacactttagtgagtatctaaatgaaatgttttattttctttaaaataagtgcacatacttaatatgacaatacatttaatactctgttttgataattttggggttttgtacagtaaatgaaaaactttaattcggttatcttattaggtaaaagtgtagtatgttttcaaataaatgccagttgaaaaaatgaaatggctatttgatttgataaatgttgtacctctagtgttgtttaaaacaagctaattagcaactctaggtgcctacagtatgtcagaaattcaaggcatctgccactagagagttgtagtgccttatttaccaacaaagc

SEQ ID NO: 475137 - DNA, 740 bp, Homo sapiens
tgaaataaacagacttgttgctcacacaaagcctttttcttgtataatggcccctgcttttgctagaatgtgtctccctaacaagggagtggggctttcaggcataattagaaaagcatgtgaaaagagtaaagctccccactcacaacttagtggctgggagaagtatctagtgactggctgtcctaggacccctcggatagtgacagatctggaggacagttgtctgggacaggaaagtaagactgagaaggctacaccagtgtcccagagacagttaacctcctggccttcaatggtcaagcatacccggggctctgtgagggtgatggcatgggctggcgcttgccccgggcaccctcagtcctgctgctggatcatctggaaaacatacgaatggacaacttatgaaaaggtgctcaacgtcactaatcatcaggaaaatgcaaatcaaaaccacaatgagacatcacctcacacctgtttaggatagctattatcaaaaagaaccaagactatcttgaacttactctctttgagcaggatttttctcttcatcatttaacacggaaagaaaaaagggatggaacagggtgaattgaagctcacaaggacatgcttgaagaattatgggtgtacaagcaaacttcagggtaggagaaaaaagaatcatgggcgaatgcttcctttaacattttactaagtggggtttggaaggcaagagagaggtgaggaaaaga

SEQ ID NO: 475138 - DNA, 1958 bp, Homo sapiens
ggggtggagccaagatggctgaacaggaacagctccagtctacagctcccagtgtgagcgacacagaagacgggtgatttctgcatttccaactgaggtaccaggttcatctcactggggagtgtcggaaagtgggtgcaggacagtgggtgcagtgcaccagcatgagccaaagcagggcgaggcatcacctcacctgggaagcacaagggttcagggaattccctttccaagtccaagaaaggggtgacggatggcacctggaaaatcgggtcactcccaccctaatactgcacttttccaacggtcttagcaaatggcacaccaggtgattatatcctgcacatggctgagagggtcctatgcccacggagcctcgctcattactagcacagcagtctgagatcaaactgcaaggcggcagcaaggctggggaaggggcacctgccattgccgaggcttgagtaggtaaacaaagtggccaggaagctcgaacttggtggagcccaccacagctctgcctgcctgcctctgtagactccacctctgggggcagggcatagccaaacaaaaggcagcagaaacctctgcagacttaaatgtccctgtctgacagctttgaagagagtagtggttctcccagcatgcagctgcagatctgagaatggacagactgcctcttcaagtgggtccctgactcctaagtagcctaactgggaggcatcccccagtaggggcaaactgacacctcacatggccagatactcctctgagacaaaacttccagaggaacgatcaggcagcaatatttgctgttcaccaatatccgctgttctgcagcctccactgttaatacccaggcaaacagggtctggagtggacctccagcaaactccaacagacctgcagctgagggtcctctctgttagaaggaaaactaacaaacagaaaggacatccacaccaaaactccatctgtacttcaccatcatcaaagaccaaaggtagataaaaccatgaagatggggaaaaaacagagcagaaaaactggaaactctgaaaatcagagcacctctcctcctccaaaggaacacagctcctcaccagcaatggaacaaagctggatggagaatgactttgacgagttgagagaagaaggcttcagaagatcaaactactctgagctaaaggaagaagttcaaacccatggcaaagaagttaaaaaccttgaaaaaaaattagacaaatggctaactagaataaccaatgcagagaagtccttaaaggacctgatggatttgaaaaccacagaacgagaactatgtgatgaatgcacaagcctcagtagccgactcaaccaactggaagaaagggtatcagtgatggaagatcaaaagaatgaaatgaagcgagaagagaagtttagagaaaaaagaatacaaagaaatgaacacagcctccaagaaatatgggactatgtgaaaagaacaaatctacatctgattggtgtacctgaaagtgatggggagagtggaaccaagttggaaaacactctgcaggatattatccaggagaacttccccaatctagcaaggcaggccaacattcaaattcaggaaatacagagaacaccacaaaatactcctcgagaagagcaactccaagacacataattgtcagattcaccaaagttgaaatgaaggaaaaaatgttaagggcagccagagagaaaggttgggttacccacaaagggaagcccatcagactaacagctgatctctcggcagaaactctacaagccagaagagagtgggggccaatattcaatattcttagagaaaagaattttcaacccagaatttcatatccagccaaactaagcttcataagtgaaggagaaataaaatactttacagacaagcaaatgctgagagattttgtcaccaccaggcctgccct

SEQ ID NO: 475139 - DNA, 586 bp, Homo sapiens
tttcctgcttcactgttaccaaagtccagggaccaccactctctctcacatcacctgttaccagaaaagtcccctagagtaatggttttcaactggagggaattttgccatcaggggacatttggcaatgtctggagacatttttggttgccacaacttggaggatgctatgggaatcagagaccagagatgctgctaaacatccttcaatacacagggcagccccacaacaaaaatgatccttctcaaaatgtcgacagccaaacagaatgtgctggacccagatccagacccagacccactcccagacccaaccactggagtggagctggaggcaagggctgcaggcagcaggcccggctgcaggctacagaaagaactctagctaggagaaactcagtgattggatcaagaaagaagctccaaagtcccaaagccaaacttgtaccaaaaaaggtcatggtcactgggatctgctgccggttatgatcctctacagctttctgaatcccagtgaaaccattacatctgagaagcatgctcagcaaatcgatgagatgcactgaaaaccgcaatgcctgcagcc

SEQ ID NO: 475140 - DNA, 686 bp, Homo sapiens
caacccatctaaaggacagcaactttaaagattgaaggaatatcagcccacaaagatgagaaagaatgagcacaaaaactcggacaattcgggaaggcagaaaaccttctttcctccaaacaactgcactaatgaccacacaattggacataaaacaatcctcagcaaatgcaaaagaactgaaatcacaccagccactctcttggaccacagtgcaataaaaatagaaatgaagactaagaaaattgctcaaaaccatacgattacatggaaattaaacaaactgctcctgaatgacttttgggtaaataatgaaattaaggcacaaatcaagaagttctttgaaactagtgagaacaatgatacaacataccaggatatctggggcacagccaaggcaatattaagagggaaatttatagcactaaacactcatatgaaaaagttagaaagttctcaatttaaaaacctaacatcacaacagaaagaactagagaagtaagaagacaagtgaacatttatttttgtgcctttctccctacgtgtatttcaagtctttttcaaaacaaggccccaggaatctccagattcaattatgtccctgggcttggtaagctaggaggctttcacataaatattcacttaattccattgacaacctggaaagagggctttgtttctcattc

SEQ ID NO: 475141 - DNA, 1193 bp, Homo sapiens
acacttcctgcaagctgagggagccggctctggctctggcctcggccagcccagaaaggggctcccataatgcagcagtgggctgaagggctcctcaagtgtggctagagtgggcgccaaggctgaggaggcaccaagagcgagtgagggctgccagcacgctgtcacctctcactaccttctccctcacttgtggatgtccatggacaatgctacccaccacagagagtatattcaatatgctaccttctccctcacttgtggatgcccatggacaatactacccaccacagagagtatattcaatatgctaccttctccctcacttgaggatgcctgtggacaatactacccaccacagagagtacattcaatatgctgccttctccctcacttgtggatgcccatggacaatatactacccaccacagggaacatattcaatgtgctaccttctccctcacttgtggatgcccgtggacaatactacccaccacagagagtatattcaatatgctaccttctccctcacttgaggatgcctgtggacaatactacccaccacagagagtatattcaatatgctgccttctccctcacttgtggatgcccatggacaatatactacccaccacagggaacatattcaatgtgctaccttctccctcacttgtggatgcccatgcctgtggacaatatactacccatcacagagagtatattcaatatgctgccttctacctcacttgcagatgcctgtggacaatatactacccaccacagagagtatattcaatttctgaaagcccaatttgaagaggaggttcatcgagaaatcagtcagccagcatccaaatggatagtcagcaagttaaagaagggtagaaggtttagaaagcagacacagcaaaacagagccaaaggttttcaaccatccctgggaaaggagctgctgatatatctatgggaaacggtaaatacatgactttgcttctatccctgtaaagttgtacctggttgatctccccctctattctaacctaaaaatctcattctgaatatctacctcttcagctgtcattatccaataagcatactgctcatattttatataaattgttcattttctttttcaatatgtattgagtagtttctctttttttattatactttaagttctagggcacatgtgt

SEQ ID NO: 475142 - DNA, 756 bp, Homo sapiens
ctacaagcagcagggtactgtactgaatactgtaggcagttgtaacacaatgctagaacccaccgtgcccacggagacactggctgtttcctggcattctctttggtggtgggaagcatcttttcccagactcacctatggtgacacagactcaagtttgaaagcatcagcactgtttctgtcccaacacctgcctttttcgggaatcacacatattcatctagtaaattttgggcagtcctatttagcaaaagagaatgaatccaatcagcatgtctcagaaggcacttctctctcctacccctttgtgaagaaggacgtgcttgcttccccttcagccatgattgtaactaatattcacgaagcacatattgatcacactggcaagcattgtgtttgggatggagagtcacagatgagaagaaatggcctttggggaacatggagtctcatgggagcaggagaggtgaaagcagttgcagccgatgaaattcggggcttgacaccacaaaatccagaaacagcatagctctgctgtgaaggagttgattcagcagagcaacgaaactagcctgtttctgataatacggaacttagaaataacttttattttatttattccaaataatttataatttattatttccaagtgtatttatggtcctggttatcagatgcaaaaataaaaatggataaacaaaatttagctacctgaaaccaagtctatgtgttcatatattagaaaatcgtatgcat

SEQ ID NO: 475143 - DNA, 625 bp, Homo sapiens
tgctttcatcactcagtgcattgaaaaatgtatttgagttttgtgaaaattatggtataccagagagcagaagcccaggagcctgcctccttagaggatcttggaggtggacaggctattgtagtgctcttcctggccctcgagcaggctgaggtaggtggcgagctcctgctccagccacaacttgatgtccatgagcagctggtactcctgattctgcctctcactgtcagctcgcacatcgcccagctgagcttcaatactgctgatcagcgcctggatctgcgccagctgccagctcttccttcagcccttcggtctgcatctccaggtcggtcctggccagggtcagctcaaccagcaccccgtgcaggccattatgtcagcctccacactcacgagcagagtctgctccctctcatacttagttcagaagtcatctgcagccagacaggcattgttgatctgcaggacaatcctggaattctcaatgatgtcaccaagaatcttgtagcacaggtactcgatggtcccgtagtagtggctgtagtcatgggagggcctggggcacatgattttaaaatgggaaaacaacaagagacagacatccagcttccctagcatt

SEQ ID NO: 475144 - DNA, 723 bp, Homo sapiens
aagcttttgtcaaagaacacggtgtaacaaaaaggaggacagcatggctataaatggcaggttgaatggagagatgaaaatgctaccttatcctttagataggaggcatgattatctggcagaaatatctcaactccagtgcctctgccacattcagtcactgactgagggtatcccagggaaaatgtggtttcggtgtgaacactgcgatagatcccagggagaatgtctggtgattcttttggatatctgccttatttctgctttggcttcttcccaagactgtcactcaaatcatagtcccaacttggctcagccacttaagccaactgtcaccattcatgtgacccacattcccattcccaaatccagctcagttatttacaacaagtggatgcgcagagatacagaagagaaacacaaagaagaaggccatgtgaagatagagacagagattgatgatgctgctacaaaccaagggagccaaagattgcaggagtcaccaacagctaggaagaggctaaaatcctgtctaccatgatagcattgggagatatacctaatgctagatgacgagttggtgggtgcagcgcaccagcatggcacatgtatacatatgtaactaacctgcacaatgtgcacatgtaccctaaaactttaataaaaaaaaagaaaaaaaaagaaaataacattcttagatattaaaaaaaaaaaaaaagaaat

SEQ ID NO: 475145 - DNA, 978 bp, Homo sapiens
atgctgtcctcagggaccagctggacagggacgcggggacatgcttctctatgtgcggggagaggtgggcgtaggcggctggcgctggatccccgacggcaaaccaaggagcttaaaggccaggcagggacaaggggttgctgaggaaacttccggggcttctcaggtccaggctgaccaggtttacacaccagaaagcacacggcatcctgacggtgggacaagaagaagatgcctggagaagagcacagagcacgtgagagccccggaaacccgcgcagagcacgcgagagtcctggaaaccaacccacacagagcacgcgagagccccgcacacccgcgcagagcacgcgagagtcctggaaaccgactcacagagcacgtgagagccccggaaacccgcgcagagcacgcgagagtcccggaaaccaacccacacagagcatgcgagagccccgcacacccgcgcagagcacgcgagagtcctggaaaccgacccacgccgagcaagcgagagccccggaaacggaccaacgcggagcaagtgagagccccggaaatcgaccaacgcagagcacgcgggagtcccaggaaaccgacctgcgcagagcacgccagagtccccgaaacccgcgcagagcacgcggtagtcctggaaaccgacccgcgcagagcacgcgagagccccggaaaccgaccaacgcggagcacgcgagagccccggaaaccgacccgcacgaagcacgcgggagccaccgcttcattccacgcaccacccacttgctgggcgtcttcagagttctaaaaacccaagaaagaaaaagattggaagaggagcttactttattgtaagaacacagaatataatacatgtaacagacaaaatatgtgttcatcaactgtgcatgttaacgagctgaatctcccgggggtcctccacctggagccccgtgcccacaaacctcagctttcctgatc

SEQ ID NO: 475146 - DNA, 484 bp, Homo sapiens
ggacagcacctcttaagccatggtcagccttatcctgattgccctggggtcattagtggcctgccacccctcacctgcccttctcaccccgggtgcctccccctccagcctgtcctccaagtggctgggagcccaggaccctgcaaaggactttgctctaaaaccagcttctgctaaagtcattgatcacctcaatttcctgagtgagctgcaggccacgccctcgcctcatgtccctgggacctcacatcgcagccccgggacagctgcacctgccacaggccaggtcaggactggcctcattcccccgaccctcggtgtcaggcctccagggtgggagcatgaggctgtgctggacccagaactgcagctgttggtggggccaggtggagagagggagccccaggcagccaagcctcctctctgtaccccgaacatatgagatccccagggctgccataaagagtgccacagactggggcct

SEQ ID NO: 475147 - DNA, 789 bp, Homo sapiens
cccagactcgggtatgtatttattagcagttgatattgcgtcccatctgggtcaccaaaatgtgtccagaatttgttccttccagtgggttcttggtctcgctgacttcaagaatgaagccacagaccttagcgttcgtggtctcgctgacttcaagaatgaagccgcggaacttggcaagaaaattaatgaatatgtgaatcagtttgatgagagaaccttggagactggaatgttccatgaaactaatcaacaaaggggttatcattccttttggcaaccacaatccataccaggaacatggatgcgaataggagagattctatgtccagctacagtgaagaagcttcactccaatgtttgtgtatgcatgtatgtatgcatcattacaccaaccttatcaaactcttcatttcccaacatttgtttcaacttccatactcagctcatataacactcccccctcagaaagtagttttcattgactcattttcctccccaagattttatgcatggaacagtcaatgactccccactacttcataaccaaactctgtatttattattcagtgctcttcaagatcagttcccatgctacttggctacctttacctctcattacgttcttcatgcatgaaatccttcaataaaattaattcctcaatcttcattatttgtcctatctctgaatgtttatccagtttatttctcagaattaactgtcttctccattagccttctgctttcctcagcttgagtctcagttagaagtaattttcctttctccat

SEQ ID NO: 475148 - DNA, 566 bp, Homo sapiens
gaccaatttctctcacttttggaatgggaataccttcccagtccttgtacccccattgtatctttggagtctcctgggtgtcatgcactaaccttgaggggctggaccaagttccacagctttgtcttctggtcacacgaggtcaagcacctgctgcactggaggggttgaagtgttcccagtctgcaggtgttgtgatgggagctgttgataaaagtgctatggcatggcaagtcgtgggccacaagacagtgtgccacagcgagggggtcacaggcaaatgtgcatggtatatgccagcgaggtgccatctgaaaaagagttcaaatggaaaggcgagggcttctggtgaaaaatctgcagtggtgctcgctggaaagtatttcagcaggacaactaaggctctgctgcaagcagatgtggccaggcagggacagtaagagggactgtatacaggggagtattcagatcagactcatcccatctgacagaaaagacagccctgttctctccacttctggcagctaataaatgctaaagccacctagaggagtatggtgggtctt

SEQ ID NO: 475149 - DNA, 1833 bp, Homo sapiens
gacactgccttgagtttatcaggccatttgaacctaaggactaagaccctgagggctcagaatacatgaagacgtgggaaagtttggaacttcctagagatttgtctaatggctttgaccaaaaggcagatagtggtatggacaataacgtccaggttgaggtagtctccagtggagatgaggaacttgttgggaactggaataaaggtcactcttgctatgcaaagagactggctgcatttttcccctgccctagagatctatggaactttgaacttgacagagatgatttagggtatttgggggaagaaatttctaagcagcaaagcattcaaaaggaagcagagcatgaaagcttggaagatttgcaggctgacaatactatagaaaagaaaaatccattttctggagagaaattgaagcctgctgcagaaatttgcataagtaccaagaagccaaatgttaatcaccaagacaatggggaaaatgtctccagagatgtcagagatcttcagggcagctcctcccatcacaggccatgaggccaaggatgaaaccattgttttcttggccaggcccagctccccactgcctcatactgcctagggacttggtgccctacatctcagctgctccagccatggctaaaaggggccaagaaagccagtctccaaactcttagattcttctctcagcttgttctagtctgttattaatacttgtgatggcattaataaattcttttagtgtgtttttcagctctatcaggaggatataactatccaaaaatttggtgaataaaatgagtattagtcccatgaaaatgttagtgtttaaatatttgtttgcttcttctcgattttccttttttaaatttactattaatgttatttttgattgacaagtcataattgtatgctttcacaggacacaatgtaatgattaatgcatactgtcttaattgaattttatttctaggaaaatctaatacctactcagtattcgccattagtcaacttattatttttattattaacaagtgattgttttcattcacaacctgtttttaaatgttttattattcattttactttaaatactgttattttcttagaaaatgatttgttatcattattcagctttggtaatattaaacaatatggatattaacatatctcaaaaagcaaactgactgaaaatcagcaattactcatgtattcatcatatttagaattgtggaaatgtaaatgcaagactgataacataaaaagtctggttcagttcatggtaaatgaaattagtacaatttagacctgaattataaaaaattgtgaaacaaaatgaactcattaaatatgacttctaaaaaagtattacatgggagcctattttcagtacctttaaggaaacaaaattcttacgtagaattttatacctggccaaactaagttccataagtgaaggagaaataaaataatttccagataagcaatcattaaaggaatttgttagcaattgtacagcatctttacaaaatatccttaagtgagttccaaatatagaaacaaaagaacaatacctgttactacaaagacaatcttaagtacatagtccattgaccctataaagcaaccacacaatagaaactacaaagcaaccaggtaacaacttgataacaggatcaaaacaccacatatcaatattaatctgaaatgtcagtggtctaaatgcttcacttaaaaggcactgatgggcaagttggatttaaaaaaaaaaaagaccatttttttttgctgttaccaaaccacccatctgacgtgtaatgacacccat

SEQ ID NO: 475150 - DNA, 931 bp, Homo sapiens
gagctgagcagcagtaaagctgccgtatgcccatgtatttgaaaggaattgggcattgtgatctaagccataactgcattaggaggcacctcatgagcagtaatgctgtggttcttgcagactcagaggcagaggagcctcaccccatggccactaccaccacaggcccactgagagtaatgccaggtgaacgtgagagtatgtcagagtcaagaattaccaatggttctaaaatccaactacaagaatgctcctatctaattacacatgccactcatgtcactggttttgacctatcctctctgaagtccaatactcatcccaagggccccgatttttttgtttctaaaagcactaccaatcaggacttaacattcgtactgaatagctattctcaaattagaatcttctcttgtcacccacctagctcagttgtcctttggggtgtaagcttagctctgttcagatgaaatagaatatatgccagggagaacaaaagaacaaagactccctcattctctgggttcccacctatgtaaccattagcaaaaaaggactcagcacaacaccccaggtctaggactcaggtgtttcataccaagatgcatgtgtgcgtgtgtgtgtggggggggggcgcgggggggtggaatagataatttctgtaagaacaaagaaaaattgatgaatgtcatggacaaaagaaataacattgcaagttaaattcaattttagtaaaacacagcagaagttatatttgcaagatattttccaagttgcagttgatggctcatatttttaaaacaatatttaatataataaaattccaagtcaatagcggaattggaatagtgctttggaatttgtacagttaactaagtacaaatttggcttgtagtagttaatttagttggtgttttaaagtttttccctt

SEQ ID NO: 475151 - DNA, 1184 bp, Homo sapiens
tgcaagcaactgggctttacgacttgcactttttggaggatctgacccctaccctggagagaattgaagcgacaccaagaaagagagcctataaatggacctgcaagtagggaagatctcactgaattcttttcctggcaaggaatattaataattaagaccctgggaaaggaatgcattcctggggggaggtctataaacagccgagcagccagagcagacctgttaaaacacaagtcaggtcatgtcactcctctgctgaaaacactaatcgcttcctatctctttcaatagagaaaacagtcttcatcatgacctgtggggacttttgtgatctgcccttttatttcttatcttcacatgcccagcatcattggcccctttgctgttccttgaacttcctgactcagggtctttgcacatgcttccactattgtctaggatgcttttccctcagatatctgcatgacttacattatcactttccatctttactcaaaagttaccttcccaggagctctcccctggttaccctatctgtatttttaactccctttcaacatttaataccctcttcctgctttgaatttatcttaggcacttaccattaacatattatatcctttacttacctgttgtctatcttttgtccactccaactagaaactaagttccagaaaagtaggagtttttgtcttgtttgctctctactgtatccccagtgcctagaatacatagcaaatattccatgaatgaattgaatggggtagcactgcatgtgtgtgatcaaaggagcatattttgagaaacattggcaaaatattgtcactgtcacagtcataaaacattcattgattgccttctctatacaacgcactgtgctaaataaaaattggttatttttccagatttagcttagatactgctccaaaattttatttcatattgactttagaacatagcaacagaattagttggtttgttgattcaagttttgtgttcttgtcactattgagtgaaggaggtccattatagttagatgaggctgcttacttgcaaagaaatatcctcattctgcccctctcataaatatattttgtcaaattgacaaatcaattcagtacacctttcccaaatgcatgctattggtttgtcaaagatcagataattgtaggtatgcggcg

SEQ ID NO: 475152 - DNA, 737 bp, Homo sapiens
tggcttgtgccctgtggtgtagcagtgtgagctgatacaagatggcagtctgcaacccagaagaggcccctcaccaggaaccgaccatggtggcacctgtatctcagacttctggcctccagaacttgtttcatcgttcacagttcttcgcccaatgccttgtccctggcaaaggtggctcttggggtcctggtcttatgttcttgaggcaatggcgggaaggagaggggactgtgatctgtgagtggatctttgtgctccctggcttctgccaaaataatggcccccttccatcttgtcactgctcctcctgctggctcccattgctgaagtttactgacgaagcaggcaaccttgtggtctatcccctccctccacacagttggatacgtggggctcactgcctgtggagggagcagactttacagcaagacttgaggttacacagagggaagtgccccggtggggccacgtcaggagagaggaacacgaggaagccgcaaaaaatcatcagccattgactccagttgctgatgtggcagtgtgacatgaggcaaggaacgcgttgagagaaagtattcagtctttcaccatcaagtgttatattacctataggctttttgtagatgcaccttatacttttttggaagtttcctttaactcctagttgctgggaattcaaatttaattcctagcttgttcattaaaaaaaatcgtgaatggatattgaattttat

SEQ ID NO: 475153 - DNA, 572 bp, Homo sapiens
aaggagggtggctttacaaccttttctacaagacaagtaaatataatgggcagacaggaggtcactcaaattggactggccctgtctcataggcaagcctgccctgctctgtccaggtctgacagtcacccaaaggctaaagccacctacaagatcttggcaagccttggggaaagggtatccctggctgtgttccactgcagccattcccatgccaaaccctctgggctctacacaggctggagtcctgcccctgccaccactctaaacggctttgcttgccagctcaagtgggggttgtgttgtctcctgcagctaggattccggaggtccataacgacagtgggccactccttaacaattccacttaccccttccccaggagtttctgggggccaggagtggatcctggtgttcagcagccagggttcatgcagggttcccagattcctctcctttcagtttagcatctgtgtcctccctccatctactctcaatgcctttcctttgaagatctcagtcttcctaatgtcccgttctctcattgagagatgttcctcttagctgtgtct

SEQ ID NO: 475154 - DNA, 601 bp, Homo sapiens
gatgtggagataaacaaagaccacccaatgagaacaagcaaaggctattcagggcttgctgtagaaaaggaggcggctgccattcctagtgcttggcagagacttgaaggcaggcagaggagtggaaagcttcatagtggaggaggagaggctccaggggagcatgttgggctttctctggtcctaagttggaagcagcaggaaaaagtagggaagccagtggttattgatgatgtcctgactgttctgggcagattgctgtggacgttgtggtttggcttcctggactggctgctgcagattgtgggtcacacttctgctgtcatctatgggctggctgctgtctgtatattctgtctctctatgcagcagttgggcaggtcaagaaagaggtccctaccatctatcaatgaggagatggggccctttgcagtgtagggacacagctgtgagggctaccccaggagaagcaggacatgaagcctcacaggaaggaaggcataacaatgcccttttctgtttggggaatacagacaagaagaaaggtctatacatgtttagtacagatgaaccagtccttgatccacagttggttgaagtc

SEQ ID NO: 475155 - DNA, 2496 bp, Homo sapiens
agggcctcttgcgccagggcagaggtggagggggcgtggaggtggggagccaggagcaagctcagtgactttggaaagcagctgtgtggacccacacgtgcacacacaggcacatatgtgcacgcacgtgcccacacacagccataagggaaagtatgtggttgtctcagctcagtagtgagcagggtcccccacctctggcccagtccctgacagccacaggtctgttctctgtaacatccttcggcctggctcctttgacagacacaagaccatggaaattggcctctgtcatcgcgagctttgtaaagggcctactgtgtgcagggtaccatgtggggtcccctggaggatgcgtgaatgatggagacacgatgccaaccttccatcaggagaagcacagaaagaatttagccaagaagccagcagggtggagggatgccaggaggaccctgaaggccctgctaaggattaaggcaattatattttacattcctccaaccggagactctggaagtagacgaagtgagcccctgcagtgcatagtgactttcctccaaagagcacagcataggaacggggagggcaaagagcaacactgccatgggaagacctgaccatcgccgcctgtcacatggtcaagcgtgcgtgtcggcgtgttagcgtgcgtgtcggcatgtgttagcgtgcgtgtcggcatgttagcgtgtgtgtcggcatgtgttagtgcgtgtgtcggcatgttagcatgtgtgtcggcatgtgttagcgtgtgcgttggcatgtgttagtgcatgtcggcatgtgttagcatgtgtgtcggcatgtgttagcatgtgtgtcggcatgtgttagcatgtgtgtcggcatgtgttagtgcatgttggcatgtgttagcatgtgtgttggcatgtgttagcgtgcgtgtcggcatgtgttagcacatgtgtcggcatgttagcatgtgtgtcagcatgtgttagcacacgtgtcggcatgtgttagcacgcgtgtcagcatgtgttagcgtgcgtgtcggcatgtgttggtgtgcgtgtcggcatgtgttggtgtgcgtgtcggcatgtgttggtgtgcgtgtcagcatgttagcatgtgtgtctgcgttagcgtgcgtgtcggcatgtgttagcacatgtgtcggcatgtgttagtgtgcgtgtcggcatgtgttggtgtgcgtgtcggcatgtgttggtgtgcgtgtcggcatgtgttagtgtgcgtgttggcatgtgttagcgtgcgtgtcggcatgtgttggtgtgcgtgtcggcatgtgttagcacgtgtcggcatgttagtgtgcgtgtcggcatgtgttggtgtgcgtgtcggcatgttagcatgtgtgtcggcatgtgttagcgtgcgtgtcggcatgtgttggtgtgcgtgtcggcatgttagcctgtgtgtcggcatgtgttagtgcatgtcggcatgtgttagtgcatgtcggcatgtgttagcatgtgtgttggtttgctagggctgccataaccaagtcacagaaaccaggtgcctgtgtgacccccaggaggcactatccagggtgccgtctggctatgcctctttaagcttgatgggaaccctgggtgtgagggggccagccagggctgaagtgtcttttacaccaacattttaactttaccttcagtgccttttactgcttagtggcaaatgttcctagatgaccatgggaatcaatgagcagaaagcactgtattgatgactggaaatccttactgagagacacactcatcttcactggagagcttgtgtatgtatatgcatgtgtatgagtgtgtgtgtgtgtgtgtgtgtgcatgcaggtgtgctgggtggagggtggggggcacttgttgtgatttcatattgtgccaataaaagcagattttacgctggactccctcaactggccttgtaaatccaaccacatttattctgttgaataaaaggttccattggcaaaagacccaaggccttttgtccttagagtaggcatggattttctagtgataccccactattgctaatcccatgcagagcaggaaaaaggtggcagaactggcagttaagtgcacacatgcatttacttctagacatttaatcacaaagaaaacttccttaaaagaagctgaagttccgaaatggttacatgaattgagattgtaataggagggatctaggtgctgtcaattgaatggagtgaggcccaaacagcaactaatctctttaatagggagatccagaaatacacagagacctttctttatattcctaaactgatgagaaaggtaatctggcctagtgattccacagattgacttcaggacactctaggttgctcccacgagtgtgggaatcaactcagagaaatttgcaaaaactccaaaacaaatcattttggtttttaaaaacatgagtgttttaaaactgttttttaaaaaatgagtgactaagagatgtccc

SEQ ID NO: 475156 - DNA, 650 bp, Homo sapiens
gtgacaaactttcaccttatttttcaaagcaatgacgaaaatgtctaccagtaggatatgtgagcatctagcacatagtaagtgtccaataaatgtgaggaggaggatgataatgatgatcatgatggtggtgatagtggtggtggtggtgatggttatgatcatggtggtggtggtgatagtgatgacaaatgatggtggtggtaatgatggtgataatagcaatgatggtaatgatggtggtaatgatggtgataatgatgatgaaggtggtgatggtgagagtgatgataatggtaatgatgatggtgatggtaattatggtgatggtgatgatggtaatgatgatggtgatgatggcaatgatgatgatgagggtgatgatggtgatggtagttacggtgatggtgatgatggtgatgatggtgatgatggtggtgatggtggtgatggtggtgatggtggtgatgatggtgatgatggtgatgatggtgatgagggtgatgataatggtaattatggtaatggtaatgcaatgatggcaatgatggtgatgatggtgctggtgatgatggtggtgatgatggtgatggagatcacgacggtggtgatttaggaccagaatctccttcagtgggaaatctgtctac

SEQ ID NO: 475157 - DNA, 983 bp, Homo sapiens
tgctgttctgcagcctctgctggtgatactcaagcaaacaggatctggaatagacatccagcaaactccagcagacctgtagcagagaagcctgactgttagaaggaaaattaacaaacagaaaggaatagcatgaacatcaacaaaacggacaaccacacaaaaactccatctgaaggtcaccaaaatccaagaccaaaggtagataaatccatgaaaataaggaaaagacagtgcaaaaaggctgaaaattccaaaaaacagaaagccacttctcctccaaaggatcacaactcctcaccaggaagggaacaaaactggacagagaatgagtttgaaaaattgacagaagtagacttcagaaggtgggtaataacaaactcccccgagctgaaggagcatcttctaacccaatgcaaggaagctaagaaccttgaaaaaagcatcaaaagccaaatcaatcaagcagaagaaagaatatcagagattgaagatcaacttaatgaaagaaagcatgaagacatgattagagaaaaaagaatgaaaaggaatgaacaaagcctccaagaaataggggactatgtgaatagaccaaacctgcgtttgattggtgtatctgaaagtgatgagcagaatggaaccaagttagaaaacacgtttcaggatattatccaggagaacttgtccaacctagcaagacaggccaacattcaaattcaggaaatacagagaacctcacaaagatattcctcgagaagaacaaccccaagacacacaatcatcagattcaccaaggctgaaatgaaagaaacaatgttaagggcagccagacagtaaggtcgggtcacctataaagggaagcccatcagacaaacagcagatctctctgcagaaaccctacaagccagaagagagtggggtccaatatgcaatactcttaaagaaaagaattttcaacccagaatttcacatccagccaaact

SEQ ID NO: 475158 - DNA, 2428 bp, Homo sapiens
tgtggcgcgccgcgcggagaacagagctttagcccgcagaacgcccatatgtatgccacccgcctcatccaaatgagatcctacctggagaaccgggcccagcagcactggggcagtggagcggtagtgaagaagctgcgcgagctgcagcccggggagaagcgctgtgtggtgggcactttgttcaagtccatgccgctgcagccctccatcctgcaggagatcagtgaggagcacaacctgctcccgcagcctgctcggagcaaatacatccacccagatgacgtgctggtcttggaagatgaactgcagcgtatcaaactaaaaggcaccattgacgtgtcaaagttggttacagggatcatcctggccgtgtttggctccgtgagggacgacgggaagttcctgctgctggtgtctggcctgggcctggggggaggtggaggcgagagcctgctgggcacccagctgctggtgggcgtggtgacggggcagcttagggacgaaggggagcagttcagcgcggcccatgtctcccgagttgtccttgaaggcaacctcctcagccacagcacccagagcagagattctatcaataaggccaagtacctcaccaagaaaacccaggcagccagcgtggaggccgtgaagatgctggatgagatcctcctgcagctgagctcctcagtgcccgtggacctagtcatcaaaccttaccaggccaccattgatggagtcagattcctggggacatcaggacagaacatgagtgacattttccgatacagcagcatggaggatcacttggagatcctggagtggacactgcggcatccccagctttggctgttggtgaccatccctgacttaagtgccatgcagaccgcctgcctcgtgaacctgcccagcctggcctgccagcccatcagcttctcgggcttcggggcagaggacgatgatctgggaggcctgggcctgggcctctgactcaaaaaggtggttttgaccagagaggcccagatggaggctgttcattccctgcagtgtcggcattgtaaataaagcctgagcacttgctgatgcggaaaaaaaaaaaagaatatcccatagttttagcttttaccttacttgatctctctggagtctaatattgttgctaaatccttcactgaaacactgtcctctcatggtttctaacatgaaaccctcttttttctcttcctctctctctatggctattgctctctagcatccttttaagctcagcatctcctaccctccttttaagttctgaagcttctccaaattctatccttgtctctcttttcttctcatcctacatacacttatcaagcagtgttatcatctaccaccagctctcttctacctctccaacttaaattgatcatagcactattctgatcttcagactcttaactctaatttctcagattatattcatctgaaaatgccaaaggatactgaatcatcatcttcctttcaaaactgtatttggtctacatgttctgtctcccatccattgcaaaacctgaaacctggtgtttatttatatttattctataagtatttttctcctttaaccttatatcaaatcagtgaataaaatattttattctctccatcttcactgcttctgccagtcatgtgggtaagtaattgaatcaatgccattcactcagtttaagattccccactcccacttgcacatgtagaaaacaccttctcatcctcagcgctccactgaaagtttactctgtgaagaaatttctctggttcccacaggccaaattcaggattccttccctgtgatctttatatacatctcagttgtagaagttaccacattttattgaaatgattgtgtatttgactcttcgagtaacctaattaatacagctgggcaaaaaagaagataactttagagcatctaagaaaagaaaaaaaattctctaaactaccttctactagtttactagttcctagtggagaaaaattaaattaatctcaaatattcagaatacacgcacacacgcacacacacacacacacattcttgtgtcttgtgtagggtctattttattcaattaaggttttcaactctctttataattgtgcaattttatagccctttcaaatattgtttcagctagctatctgagctaggtggacacaaattatgatggaaatcaaggttctgatgcccaaggtggcaagaaaaagaaaagataaccctaaagaattgactgctcggttcttaatcctggctacatatgttacaagttacacaagcacagctgcttctctatatttgtttccaatgagcggctgtaaagggaaataaaactacaacaacctacctctccaactcctattcgacttcctcctcccatgggagggggtagaaaaa

SEQ ID NO: 475159 - DNA, 502 bp, Homo sapiens
tctggaggcatcacactacctgatttcaaactatactctaagtctataatgatcaatggtttgaatgatgcctactcacattatggttttggccccattgtaactgctgcagctctgatgagtggaggaacaccagggttcttggtcctcgcgctgggcaccaaaaactttattgccagtggtagttctggcaaggcctgtgtccaaatagcaggtaaaggcacctggctggccatcaatgctttccacattgtattcattgccagtcacctccacttggccttcatagatcttgtccacgccaaatctattgagaagcctgtgggccagcagcacgcctgtccaatacactgcagcataatttgtcaggccaacttcacaccatattttggcagtttgtgtgcatatgatgcgcagactatcatatcccccatgtccaagcacagaaatcagttttaccctctcatcatcttctaaatttcacttagtatctttcaaagta

SEQ ID NO: 475160 - DNA, 452 bp, Homo sapiens
accagccattacacttaagtgccatctactaataaaatggctgaaatgacaggcatagaattaagaatttggatgtcaacaaagatcattgagattcaagagaaagttaaaacccaatccaaggaacctaaggaattcagtaaaaagtatcaagagatgaaagacaaaatagccattttaagaaagaacaaaactgatttgatcgagctgaaaaactcactacaagaatttcataatacaattataagcattaacagcagaatagatcaagttgaggaaagaatttccgagcttgaagagcagttctttgaatcaactgaattcttcaaggttaaaacaaaagaaaaattattaaaggcagctagagagaagggacaggtcacctacaaagggaaccccatcaggctaacattggacctttcagcagaaagcctacaatccagatgagatta

SEQ ID NO: 475161 - DNA, 1451 bp, Homo sapiens
ccagtcaaataagatgagctggaggctactccagtgccacccttgctgtggtctgaacctcctgctgtctcttgtaaccactggctgggcccctctcagctccttcttggcttcctccaaggtggagcgcattgagagtggccctcaaggggtggcccacctcccctcagaggtcgagggaggcttccccggctggaaactgcagcccacaatggtgtcccggtgtctccacagggacttcccctcactcattgagtcactcatcccttcactctgtaggacctgttgtatgctgggtgtggtcaacgaggatgaagtgaaggcagcggtgggtccgtgggacctgcacagcccgagagggccatcggggacagaggccgagagtgggggcagcttggttgagaagcagcagcaggcggatgtgacgtggggactcagggccgggtggccgaggcccgaggctggccattcacatgtggccgtgggccgtgtggagcttctggtggtcaatgaggtggaccatccaggggaaggccttcccgcagacgctacactggaagggtcttttggggctgcgaggggccactgggccctgggctccatccctgggtgggacggactcccgggggcccttgctccggggggctttcttcctcggtggctccagcaggtggatcttgccatgctcagtgaggacggagttgtgcaggaagaccttgccacactcggggcacggaaagggcccttcctcgcgatgggtcttctggtgctcgatgaagtgggtgacccaggtgaagaccatcccacagtcggcacactggaagggccgcccacctcggggcccacgcggcactaccgagatgcctgcaacagcctcttgggtaccacctttggtgtgcttgagggatggctggtggcggccgctctggctgcactgtccttgcccacaagcccagaggaagtgggcgacttcacagacttcacatcccacctgcgacctatgacctctgatgcacctaaccgtgtcccgcccaaagcggggatcaccacttcctgggaggagactgagctgtggttgaagagcaagaattcgaaacagaggggcttggcttggtgtccaggctccagccctgcttgttgtgtggccctggatgaggagctttagctctctgggtttccagtgaggatgtgggtgctacgtgcccagagcctggtaccatcaagggctcggcaaactgcaacggagtcgtgtcaaaggaaaacacagtgacacttatcaatgcaaatcaggttgttggaggaggctcttccctacttcacccaccttggcgtctgtgactaatcaagggcagcagaggggctgcgtggagagaagagtgggtggcatgtatgtgtggagagaggggcatgcttagttcccctgactctcagggggcatcagaggagctatc

SEQ ID NO: 475162 - DNA, 528 bp, Homo sapiens
cgcttttgtggatgggttggtggagctcagcacacaacattgaaggaactcatctcacagacgatgatctgctgggcccaggaggaccagatccaggattcagagctggtccgaatgatgttcaacctcctccggaggcagtatgacagcattggggagctgctgcaggcgctgcggaagacctacaccatcagccacacctctgtaagcgacaccatcaacctgctggctgccctgggccaaatccgctccctcctcagtgtcaggatgggcaaggaagaggagttgctcatgatcaatgggctgggccttcgtagtagacatagcagaagtaaaaactggcaattggaggtggtgtttcctgcaaccctcaagagaaggggaatgggcagccagaaagtaaccacccagcaagggagtacacagcaaattaccaggctgtttctgtattttgatttgcatgcagctttactctgtgaatttatattggatgacttaaagatgtaattgttcttacatcttaatgtc

SEQ ID NO: 475163 - DNA, 669 bp, Homo sapiens
gtgtcgcatagtgaacgtggggtggctcaaagaagacaggaatagcatgatcgtggatacctacaaggaaaaggatatcctttccattgcttcttatctgaaaatagggggttggtggctggcaagagaaatcttagggagaatcacaggtgtttggtggctggcaagagaaatctcagaatcaggccagacaaggataaagaaattaacacggagttactgtaggagtaaagcaaatttgtgggtgtatgaaatggatattaagaatttatacagctcgccaaattatgtaaatagattgtttgcagacaaatctgatcaaggcagaaccaatttattcatcttggtcaccttcacagtcaagatcaagagctttttgagtcattttatgagaccatctacctggatcgtgaaggtaaaggaatcgactggctcttcttctacccggattgctaaattctaacacttgcttttgtgggttaggagatacaatcatgctagagtgataagaaggtagaatataaggtacatttgagatatggctagttgcagctggattcttaacatctatgttacacctttgtactaactgtaaggtatcttagtccatttatactgcagcaacaaaatacctgagactggataatttataaagacagaaatttattt

SEQ ID NO: 475164 - DNA, 568 bp, Homo sapiens
cttcttcgcacctttgcagaaaatgagttcactgtacatgtgtgggtttgtttttgggatctctattcgtatcttgccagatagaaggcagttacatgctatagagagggtacaggaggcttccatgctgaggaacaagcaagatgagttggtgaaatccagtcaatggagaaaaaaaggaggatgtccacagaagtcttcactgagtgagttaaactggaacgagaattacaacagtcatcatctaaagaaagcaagagaaaaaagcctaatcaagagcaaggccctatttctcttcaattctctgaaagctgagagggatgaggaagctgtagaagaaacgtttggagttagcagtgattggttcatgaagtttaaaaagagaagccatctccataacataaaagttcaaggtgaagcaaagtttctttgtcttgattatcaaccttgtcctggatctgattgagttcagtgcaacccatgctttgaattctttgtaacttctgagttcccatttttgttatagactgttctaagtgaactagtgtggccctttgatggtatcact

SEQ ID NO: 475165 - DNA, 492 bp, Homo sapiens
gcacaacagcagtagagctgcagcggataaactgtcctttgatgaaagcatcccagtgcctccttaattacatccctgagaattcgcatatcttacgaatggccacattgaatggccacattggtcatggccatgtggaaaaggagttagaagaatcagacaccagcagactaaatcactcagggactgtggttctcagggctctaacccaagttgcagaggaagaacagtttgagttcctgaaagatcaagaaacgttgaaactgaatttatgggatatggcactcaaccctcagtttggtccaggaagaagatggtgcccagacactgaccctggaattctagatgtctgccagggctgtggatgtgggagccctactgctgggtttatcctctccttagggaaaactcgtcacccctgggggtagcattcagagagaaacacgttaaaggtcatgcaggacttccggagtctttactgtgaccatttct

SEQ ID NO: 475166 - DNA, 725 bp, Homo sapiens
aacaggatctggagtggacccccagcgaactccagcagacctacagcagaggggcctgattgttagaaggaaaactaacaaacagaaaggaatagcatcaacatcaacaaaaacccacagaaaccccatctgaaggttaccaataccaaagaccaaaggtagataaatcctcaaagatgaggaaaaaccattgcaaaaagcctgaaaattcccaaaaccagaatgcctcttctcctttgaaggatcacaactcctcaccagcaagggaacaaaactggatagagaatgagtttgatgaattggcagaagtagccttcagacggtgggtaataacaaactcctccaagctaaaggagcatgttctagcccaattcaaggaagctaagaaccttgaaaaaaggttagaggaattgctaactagaataacccttttagacaagaacaaaaataacctgatggagctgaaaaacacagcacaagaacttcatgaagcatacgaaagtatcaataacggaattgatcaagcagaagaaaggatatcagagattgaaaatcaacttaatgaaataaagaaatacagagaacacaacaaagattcacctcgagaaggtcaaccacaagacacataatcgtcagattcaccaaggttgaaatgaaagaaaaaaatgttaagagcagccaagagagcaaggtcgggttacccacaaagggaagcccatcagact

SEQ ID NO: 475167 - DNA, 940 bp, Homo sapiens
cgggaacgcgggaggcaggcagacaggtaaagaagggaggtgaggctgctggggtggtggtgggatgacttgagatggaggagtctccgcaaaggccggggagagctcggcaagttcaggcaactgcaggtgattttgactggctgtcaacatcttggacaaatctgagtgtgaaatgccgggaaagcggtaagacggaagggtttctgaagccattccagaaacaggtttatatgaatggggacaatgtcgctacaattacgcctttcccttcacctggtgaggataaggaccaacctttcactggagaagagtcagcagggctgggtgtgctgaccaatcgcctaagggaaaagaaaggagggtggaagctgacttggcccaatctggagcttttctatgtgaaaggagcagaaatccatcaagctagttccgaatccaaattctacatcgtgttctgcattgagctggacctgcagggagagtttgctgctttacccaagcaggccaggcatggtctgctgctgccagaccacaaggtagaatgtccaggcaaaggcaagaccgttgctcgttctgacaatcctcagaatgtgtgtggagtgctccatggatttctgggtggatgttcccagaagtccatgcctctatgggctcaggcacttcccatggcagctcctccaccttcctttcctggtatccagcagcccggactggaggggctgtcactgacacatggggctgtctttgttcaacaacgcttggaagcacaagtgagctctgtattaccgccctttcggcaagggcggctggagtgcctggaagcgactagttccagccctgctgggccacagggaccgaccccaagcaccagccatcagctttgttcctcgagcttctggagaaaacctttgatttcacggggatgattatttttatt

SEQ ID NO: 475168 - DNA, 841 bp, Homo sapiens
tccgaggaaccttcctgccaactctgagctcctgcgacactcgaggatgtgggccaggctcttgtgggtggcaaagtcctaagacctgtcgcaatggctttaatctttagaacagcaatgcaatctgttggacttttactatctctcctgggatggattttatccattattacaacttatttgccacactggaagaacctcaacctggacttaaatgaaatggaaaactggaccatgggactctggcaaacctgtgtcatccaagaggaagtggggatgcaatgcaaggactttgactccttcctggctttgcctgctgaactcagggtctccaggatcttaatgtttctgtcaaatgggctgggatttctgggcctgctggtctctgggtttggcctggactgtttgagaattggagagagtcagagagatctcaagaggcgactgctcattctgggaggaattctgtcctgggcctcgggaatcacagccctggttcccgtctcttgggttgcccacaagacggttcaggagttctgggatgagaacgtcccagactttgtccccaggtgggagtttggggaggccctgtttctgggctggtttgctggactttctcttctgctaggagggtgtctgctcaactgcgcagcctgctccagccacgctcccctagctttgggccactatgcagtggcgcaaatgcaaactcagtgtccctacctggaagatgggacagcagatcctcaagtgtaagactccgacaaggccagagatgtatcctgtatcaactgtgatgacaaagacctctttgttttgtagctaaacctgtgatgctcac

SEQ ID NO: 475169 - DNA, 531 bp, Homo sapiens
ggaggcaacagcatggcagaggcaatggcaaaattgggatctgagagaaaaaaagagcagggattaattcaggaactgaaacaaaatcagtctctggaactctggtatgagaacaggaaaggcaaaatcaagactggagaatcaggtgatggagagcctgatctactgagaattttaatgtgggagtacatctccaatcttttgagtcatgctgccactgactacctatgtgaacttggacagtttgcaaacttacatatgcctctgatttctatttgtaaaatgaggataaaacaatactacttccctcataatgttcctgtggctattcctggccgaagcatagtaaaacattatatatatgttagttgtgatgatggcgatgatgatgaagatggattgagaagcatggagagctatgaaatgatgttctagaaggctgaagaaatatcgaagtggttaaagttcaccttgtaccagaccaggaatgattggcacatgaagggaaaatgtcaataatccagacttaac

SEQ ID NO: 475170 - DNA, 2830 bp, Homo sapiens
tcctccaccagcaaaaagattatgactccctgaaggctcagacaattgttagcattctttaggaaaaatatatttttaattaagggctcacatgcactacacgtatttccctggctaaaaagggtcttgggggacagaagagtgtggaggctgaaattcaggccatgctttttgacaagcccaatgccctattagaagaaaagtacattgatcaagaagaactcaacaaaacaaagcccatctggaccagaaatccagatgatattactaatgaggagtacagagaattctacaagagcttgactaatgactgggaagatcacttgtcagtgaagcatttttcagttgaaggacaaaagaaaaagaacaatatcaaattgtatgtatgcagagttttcatcacggataactgtgaggagctaatccctgaatacctgaacttcattagagtgctggtagactcggaggatctccctctaaatatttcccataagatgttacaacaaagcaaaattttgaaagttatcaggaagaatttggtcaaaaaatgcttagaactctttactgaactggcagaagataaagagaactacaagaagttctatgagcagttctctgaaaacataaagcttggaatacatgaagactctcaaaatcagaagaagctttcagagctgttaaggtactacacatctgcctctggtgatgagatggtttctctcaaggactactgcaccagaataaggaaaactagaaatgaatcttaaagttgtcttttcagaagtggagactgacatcttattgacaggactgctccttattttcttaataaagtgaattgcctctatcagaaactaatgtgaagtcatttttgcattccatttcaattttattttttcttatatacaaccagtcattccaacagagtacactgaataatctattattattagaaaattgtctttacctttaatgaattttacccacatatagtttgattgaatattaccagtaaggtattttattatctgttaatgcaaatctcatatcatgtttcttcttttaaaaatgtcttagctatttttacctattatttctagcagccgattttggagtagttcagctggaatttttattgcaattgtattgtatttatatttatacttagttttagaaggaataaaatttttattatattcagtttgccttttaggaaaaaatacttctccttactaaatttcttttatgtatcttagtgatagcatatagctttcctcatacaagtcctgtacatttcttgttaaggtatttataggttgtttaaactattttctatgtttattactaagaatcttttttaatacattttctaaggggttattgctggcagataggaaagctattgatttttaaataattttcaactgagttactcacatttttgtgactgttaatttttcacacacttgcttcagattttctaggcatacaagtatattcctcaaaaatagtgcccacagagtacaaatgcctaaatacattcagttaggcataataagcctgtagattcaaactctaatcttcccttacatacatttcagcttcaaatttttctttgaaaagttaaataacatagcagatttattccaacaacgaaacaaaactcatacataaatgtgcaactgaaatttagacatatagtaaaaacagggctgatttcatataattgcttataaaagtcattgacaaataactcaagtttgcacaaaatattattttccagccttctcaggaccatttttgctcttcaaggctctcatgtaaacaaaggcctcacatctatcattggggattatatttcaacataagatttgggggacaaatatctgaattatgtcatcatgacagtcagctgtacattaaaaatataacaactagaaatttctgaatcatttatgttttttacgtctctgtccccaaaattacatggattcaaattattgcacgtgtgcaagaaatttgcttcttaaaaagagatttataaggaggggaaaaaccacaatctcttttgccaaagaaatctattcaactattatttttgaacttaagaagctctacctaacatataaccaaatgccatgaaagaccattttaaatgtttcaaaaatagaaatcaataaagtgtgtttgtttctaaaaagaaataaaatgtacagagtagtgacaaaagggaatacattgttgaagaatgatatcaaagatggctcttttaatttcaatgtgttatagtgacaaatagcctgtaacaaagcaaagacatataatttatcttgtaactttttccttgcacatttgcttggctaaacaaaggttgggtcaggaataaaaaatacatattgatttaatgtatgtcctaaaatacagatagagtctagtgaatattgtaggccagtgacagtatttttaatggcagacaatttttacttaatttctacttttctctataaatttatgtatcaatttgtttttaattctataaccatgtatctaatcctaaattcaatcagcaatattgaaagcacactatttacataggcaacagattagttgttaaagtacatacacaggatatttctgtttcagtgcttcaaaaacttgcatatcaagtaaatgtctacaaataaagatattttccaagtattttaaaattcatctttctcacatttttttggaagctttaaatatttaagaataaaatatttcacaattcaaacaaatttaaggatacatattaactttaccttcagtatgtgcaagacaatgattctgc

SEQ ID NO: 475171 - DNA, 1827 bp, Homo sapiens
tgcaactggcctgaatgtccaagaaaaatgtgggaaagtttggaacttcttagaaacttggaggactcagaagacaggaagatgtgggaaagtttggaacttccaagagacttgtcaaatggctttgaccaaaatgctgatagtgatgtagaaaatgaagttaagactgacaaggtctcagatggagaggaggaatttgttggcaactacagtaaaggttgttcttcctatacaaagagactggaggcattttgcccctgccctagagatctgtggaatgcggaacttgagggagatgatttaggatgtctggcagaagaaatttctaaccagcaaagcattcaagaggaagcagagcataaaagtttggaaaatttgcagcctgagaatacaatagaagagaaaaacccattttctggggagaaattcaagccagctgcagaaatttgcataagtaacgaggagctgaatgttcctcaccaaggcaatggggaaaatgtcttcagggcatgtcagagaccttaatggcagcccctcctatcacaggcccagaggcctaggagagaaaaatgtggattcatttatcttaaaatggtgggcaactgcagctgcggacttcaatctttcttgtgacgtcatgacttttctctgcttcttggaagtgcttccagcatcactaatggcatttggtagaggtcccatggtgttatttaaggcttatggtattgcattaaacaccatgaaaagaaagagagagaaatatgagagatcaccttttaactgcaatatgcaatttgctgaatagacaattggtcatgtatagatgattaaggtcacatgacattttaatcacatacttgtaacatttgaattcactaccatagcaacaagaagtggctatgaaattatgacagtagtatactatgtactacagttgattatatgcagttatgatttaatgctgcatttttacatttgttaattctattttaacctttgtattacttttgaaatgcattgtacttcaagaaatatttaaaatctctatgacactatttttttcagttttattcaattattatgtgtttatatttacacatatatgagcactttctcttcactatttcttgcacttttctggaatcactttcattcttctagaggaactgttatgtattttttattgccaacatgtttgaagattaattcattctaaaaaatcttttctaaaaagtgtgtttaatttgtgttcatttaaaataaattttcactggctataaaaatctagattgaagtgggtttttttcagcaatttaaatatgtcattctgtattatggtcagctcaataattactgagaaatcctttgaagatattgaaaattttttccctcattgctatttttcactcaatatttgcttggttggttaatctctggttgcttttattttttattatttcttttgaattttcaacaaatataattaaattatgatttccttaggtgtaaataacattcagttggagaaaagttatggcaggtccaaaacaaagacttgggttggatctgattttacttaggatgacagaaaaaatggaagaatgtattttaaataagataataaataatgtaaatataaaaatcatggttatatatacatgaattttattttacaataaggtatactttacaagagatttttgttaaaaaatgggaagatatcaaagaatattaaaatttggaaagaaaatagtaggtatatagagaaaatgggtagaattatttttcactttcttctgcattacttctaagaaaaagtaatttgga

SEQ ID NO: 475172 - DNA, 1227 bp, Homo sapiens
gccgttctaactggcatgaggtagtttctcattgtggttttggtttgcatttttctaatgatcagtgatgttgagctttttttcatatgttttttggccgcataaatgtcttcttttgagaagtgtctgtttaaatcctttacccaattgcgatggggttgtttgtttttttcttgcaaatttgttcaagttctttgtaaattctggatataagacctgtgacagatgggtagattgcaaacattttctcctattctgcatagaaaaagcatacctcaaaataagaagagacataagtaagaaactcacagctaatgtcatactgaagagggaaaagctaaaagcatttcccctaagaactggaacaagacaaggatgccctctctcatcagtcctatgtaacatagtattggaaatcttagccagagcaattggcaagattaaaagaagaaaatacagccacattggaaatgaggaagtcaaattatttctatttgctgataatatgaacttatacctacaaaatctggaagacttctccaaaagactcctaaatttggttaatgaattcagcaatgtttcagaatacaaaatacatgtacaaaatcagtagcatttttatagaccaataataatcaagctgagaaccaaatcaagaagtaaccactatttatcattactacacaaaataaaatacccagaaatacatttaatcaaggaggtgaaagatttctacaaggaaaactataaaacactgatgaaacaaattatagatgacacaaacaaatgaaaaaacatcccatgctcatggattgaaagaaacaatatcattaaaatgaacatactgtccaaagcaatctagacaagtaatgcaaatcctatcaaaataccaatgtcaattttcacagaattagcaaaaacaatcccaacattaatatgaagccaaaaaagtccaaataaccaaagcaatactaagaaaaaggaacaaagctggaagcgctacattatcagacttcaaatgatattacaaggcaatgtcttgctagcggtctatcaattttgttgatcctttcaaaaaaccagctgctggattcattaatttttgaagggttttttgtgtctctatttccttcagttctgctctgattttagttatttcttgccttctgctagcttttgaatgtgtttgctcttgctcttctagttcttttaattgtgatgttaggg

SEQ ID NO: 475173 - DNA, 963 bp, Homo sapiens
cttctaaaaacaactatgatacggtgttgttatgatgatcaccattattgttttgctggtacatgcgaacacatgtgtagcaggagccattggctgtatcatataccctagatgtgtagtaggagccattggctatatcatataccctagatgtgtagcaggagccattggctgtatcatataccctagatgtgtagtaggagccattggctatatcatataccctagatgtgtagtaggagccattggctatatcatataccctagatgtgtagtaggagccattggctatatcatataccctaggtgtgtagcaggagccattggctatatcatataccctagatgtgtagcaggagccattggctatatcatataccctagatgtgtagcaggagccattggctatatcatataccctagatgtgtagcaggagccattggctgtatcatataccttagatgtgtagcaggagccattggctgtatcatataccctagatgtgtagtaggagccattggctataccatatactctagatgtgtagtaggagccattggctatatcatataccctaggtgtgtagtaggagccattggctatatcatataccctagatgtgtagtaggagccattggctatatcatataccctaggtgtgtagtaggagcaattggctacatcgtataccctagatgtgtagcaggagcaattggctatatcatataccttagatgtgtagcaggagccattggcagtatcatataccctagatgtgtagtaggagccattggctatatcatataccctaggtgtgtagtaggagcaattggctatatcatataccctaggtatgtagtaggagccattggctgtatcatataccctaggtgtgtagtaggagccattggctatatcatataccctaagtgtgtagtaggctataccatgtaggtttgtgt

SEQ ID NO: 475174 - DNA, 831 bp, Homo sapiens
ttgttttgccttttcctgtatgtcgcgtattgggaagcaaacaaggttaacactcatcaggacaccctggctatggagaggagctaccctctacgggtctcctccaagctgttctattgctccataaagctcctcttcatcttgctcaccgtcaacttgtctgtgtacctcattcttcctggtcacaggacaagaacttgggaaccactgaaagtcaacaagaaggagagaagaatgaaggagagaagagctgcagcccttcagggaccccaacctaggaggtccctgagccagggttgtgacaccctctttagggggctgcagttcctggtgtctccgagattctgggcaaaactgcattccccacattccctggtgtcagctgtggaagctgcttatggtatgcctggtccagccacagtatcacagggagctagtgcctgtgccagcatggagctgcccaccccaccacagctggcatgcctggttgtgcacagtggctgcaccccatgctctctcacacaccccttgctgccacatgcatggctggcccttggcaggcacgggatccaggacagtagcatgagccaaatgcagccggccaggcctggtgctgccaatgtgataatattaagaggtgaaggctttaagacatgattaggccatgtgaactgcccccttgcaaatgtgattgagacccttataaaagaagtttaactccatatttagctctcttgctcttccatgttcaatatgtgaggatacaacatttgttcctgctgttgaacaaaataagacggctctcacctgaccacaaaatgctggcagctc

SEQ ID NO: 475175 - DNA, 1828 bp, Homo sapiens
ccctgacactcccacttcccttagctgcgggcaactcatgcatgttttatcctccatctggaccggcacggtacacaatagtgataaaagatgattttcccccttggatgttcacaggccatcatcgacacagtcctgatgaaatggccatgtatcccctagcagacttcccagtgccacccctctccaggtctggggctaatggagaaaagggccccaatgaaacacacaagttgcccgtatcggtcactgagaagcaaacatggaggtgtggaatggaatttggaaacgggacatgcgccttccagacaggaattgcatgtaggactggcaaaatcaaaaacagcaaaactgagattatgcatgtggaagccagatccgccttctttttattaattcacttctttgggtggagaggcgagtgggggaggggagcatcatgctttgcaataataaaccgccaatgaaagtgcaaagcaagctgcataaaaacgaagtgtgcatcccagcctccaaggttatataggattcaatatggctgaagcccaccacagctgcagactgcattctgggagaaagttctcaacctctgattgcaagtttattttgaccatttaccataacttcaacttcaatgctcgtcttgaagggcatgacttgtcatcctaatataattagcccctcttccagcagatcagacccacaatacgccccagcctctggaggacacagagagaatggaagtcgtggagaagaaaagagaaaagtctcagaggaccaggatataccctcaggactagcactgtgcctgccgtagaacggggcctgctcagtgttttttgggttgagctgcatcttagaatgaaatcctacaactgagatggctaaaggaattaaaaatggtatctgtaatgttaaatttcagactgctgcacaatatgtcagttttaggtactttttaaaagatgaacaagtacaagacttcaaagaagtctctcccttgtgaagggtcccttccggcttcactttagagtctctgcacttttagttcatctcatttgggtgtttcaagggaacagagaagccctggtttagatgatgcagggttttctgatgccaaagtgagaatgataaaatgtctgaaggaagaacacgatgctatgcattccaggcagaatctggacttgaaaacaatgaagcacaaatacttttagatgaactgattcacttttattttgtaaacatcctagaagaattccatttgcactgaactgtttgaatcactgcagagctcttgctccttctaatccccaaggaaagtcgatccatcgcgtcctgctacactgtatttcttcactttgccccttttctcaattctttgtgatcagcataaagtttgaaccgtgcctcttctcgccttcctgcctggccacctgtccagccctgcggtcagctgtaccgaccagcagacggtgcctctcttgccaagtggagccgatgctctgtgaccattgttcgtggggccacactgccatccccatcgttgccccttcaggacactcgtcaacagctgtaagaggcttcccatcctcgcccatataaaaggaaggcctgaaaacacttctcggagcatcagttcataggtcaccgcaaccggccgaacaatacgcgattattcaacgggctccaattcattttcctctgctcctcccccaccgttacccttgagagaaaactaatttgcagaaaaatagcccctgccagccaacttcttctcctaaatgtatgctgaccccgaactcttgtctcagtgggtccttattctcat

SEQ ID NO: 475176 - DNA, 486 bp, Homo sapiens
gacaaaagccaaccagcttctccccttgctatttccattgtgccatgggagtggaatccagacacaggagtccagtgaactccctgagaaaagatggaaatgagattcctggagaccaagacagccagagtttttgggatagagtactgaagaggagagagctgtacagagaaagaacgccagtgatctaccaaggctccctcttgaatattctgcagagtactgatcaacaaatgcatgtgaggaaactttccagcgaggaaaaaatccaggctaagacagttggtatcagatggctagtgggcattagaagtggttctagaaatcagatgctcagggtcaaatgctcaagatggaccattcaccagtatgacaggaagaaggagcccatttctggtcataagtgggatggcacaaagaagcattgcaccggagagtactggaaggagaagcaggtggaaggtggcacctatgccaattaagcag

SEQ ID NO: 475177 - DNA, 480 bp, Homo sapiens
gctgctaaggctccaggatattatccagcctcagctgccaggaggtgggaaggcacagagctcccgtatggcactggcccatgagcacccagtgatctggagggcaggtgtggcaaggatggccccagggagccagctctgcatctggcagcagtgtctctgggccaggccaggacaacaacctcgattgtccctctcaacagtagccttgctgatcccggagaaaagaaagccatggggccatttggaccaagcctctgcaggaagaatgctgccctttctctgtagcgctggatccgatagtcatggaatcaacagctcagaagctggcagccccctcggaggcctgggcaccctcccccatggtcacatggcccaagacactctgttctttgtgacagccacttggcagggtgggccgaggacctctgtagacaaagatgcttcaggtgcccctgaaccccctggaaattgatgaac

SEQ ID NO: 475178 - DNA, 668 bp, Homo sapiens
tccttgcttccccttcgctttccaccatgactggacagtgggagtcagatagcaaggatgtaagtgagaagaggaccagaagaccccagtgtggaagacaccagaggagacctgttggacagatgatttatgtgtgctcctcatttgacctcacatctctgccacttgctgtatcaagcaggggccagagaagatcctaccacccactgatgtaccccattgccacagattcagacaaaggaggggtagttgtgtcctctggaatgtggaatatgatgacagaagatctgtggaactttgaactagagagagatgacttagggtatctggtagaaaaaatttctaagcaacaaaacattcaagatgtgacccagctttttctaaaagcatacagtcatacgcattcacaaagagataatccgaaattgcaacttatgtttaaaacggaagcagaacatgaaagtttggaaaatttgcagcctaaccatgtggtagaaaagaaaaactcattttctggggagaaattcaagccagctgcagaaatttgcataagtaacaaggagccgaatgttagtagctgaaacaatggagaaaatgtctccagggcattccaaagatcttcatggaagctcccctcatcacaggcctggagacctaggagggaaaaa

SEQ ID NO: 475179 - DNA, 625 bp, Homo sapiens
gatcaatggggtgacaaatgtcgcagccagattgccctcacatcctgcagggacatggatgaagctggaaaccatcgttctcagcaaattaacacaggaacagaaaaatcaaacaccacgtgtggtaatgctcgcttgcccacaactcgcttccagatgtgcagcccagttcctagacaggacactgatgaaaactggacattaattcccttaaagttcccagcagcatctgtcacttcagcatcccagtgcactgaggacacagatgaggcattgaataagaaggctgctaataatattgcttctgatgctaacattctgtgctcctaccagcaagaagtgagtggtcagagtatctcatctttgtgttttaatttggatctcatggatggccaatgcacccacactattactcattacttccagaccagtgtgaatcttttcctgagttttgctgcaatatctgcatttgcttccaagccactctgctgcaggtctactggagttgctggaggtccactccagaccctgtttgcctgggtatcaccaatggaggctgcagaacagcaaagattgctgcctgctctttcctctggaagcttcgtcccataggggaacctgccag

SEQ ID NO: 475180 - DNA, 598 bp, Homo sapiens
ttattgtgagagcaccagggcctgaaaatcctgcgtgggaatgaactatgtcaaaaatgttctgggtcaaagttcaagtcaagtgggaagggctgcttccagcggtattaggggcagcttgggaacgtagagtgggagagattaagctgaaggaagattttgtggcttccgaggcaatcgggcagtctcagtcttcagctgctaagccgagaagatctgggaagaagtcagagaaccttgggccagagttccaggggctctgggagtggctgccagatgggacacggcttaggaggaatcctgggctgtgggcattccttggtccagtggccagatttccggcacatgtagcaagctcttgggggaggaggttctggaggaaccccttgcagctgcggttcaggcatttggaagttcttgtgtgctggagacatggctggggtatgtctcacagtggagacaaggaattgcaactcagaaatatgttgctacttggctgcctttactctattattgtacaccttgaaggtgaggttaattaagtcctgttgtggggtttgagggctggaatttaatttttggagaattatttaatgtc

SEQ ID NO: 475181 - DNA, 1864 bp, Homo sapiens
gtatgaagaaagcagccaatgggctaccctgagagtcagggacctggtatcaagaaaggagggggatctgccggcagctgcagggccaccattgaggtgtatttgctcccttccttcccccgacaccagcctgtctccctctgctgcccaggggccccaggcgacctccctcgcctcacactccccttgcaccctctatcctcccttcctgcccctccctcttccttccctctgcccctgccaccctcccagggccctgagcagtgcggggaggcatggaggggctgaggcctccccactgactcggcagccacggcgatgcagcgcccagcgtcttcacggtggaactagccacttcttcccctccctgtttcctcttccaaaaactggaaccagggtcacctccagtccttgtcagcaccaggcagccatcatggggagcgaactgctcagcactcaggaagtgtgagctgctcacgagcccctcacaccccaaggccaggtgtcctgttggagtccccccaacccatctgcctcctcccacagcctctccccttccccacctgagagcaggccacctgcagctggctgtggcccgtgggcctcctggggggctgtgtcctgtctcccaatctggggctggacgctcccccaggtggggctgggcagtgtggcccctggcgggcagcaacatggggcctgccggaccagcccagccctgcgcctagtaagcgctcagcacctatcggagaatgaggttgagttgatgtccttcaggcactgctagatcatgaaccatcagagaaagacgaagggtgtggagtgcaccttaactgcagtgtcaggaaagtggacatttttagccacaaagccagggccagctgctaaaacaaagtccccacaggctgggggcttcaacgacagaaatgcattctctcgcagacttcctggagaggggaagtctgagatccaggtgtgggcagggctggatcccgaggctgctgcttggcttgtagacatcatcttctccctgggtcctcacaggatctgtctcctctacgtgtgtctgaatttcctcttcctagagggacaccagtcctattggattaggccccaacctgattacctcattttaagccactgctgtcttgaaaatgccttgtcctggttgagcgagccccctgccctgttccctcgctctggtttggagcatcgcctcaccactgctaactgctcagggaagccggtcatcctccctggagctggagcaggggcgcggggtgggtgaagggatgctcctgctgtgtgcactggcctgaggacagagaaagagggcaaccggcaaagtgagagtgtggaggggtggagtcaggcaggcagtgcagacactcaggcgggacaacagacacgggctgactggtggatccttatttcaaacagccgcctggagcatcagtgaaacttgaaggtggctctccagtgaggagctgaggctgaaatgatcatggggaatcttttcattccattggatttgatgctgatgtaccaagttgatgctttttcttaatcaccattttcatcattttaaatgttttaccaaatttagatggaagatgctttctgaaagccttcaattctacttcttagaagaattttactcagttaacttatagttacttccggaaatgattattagttgttaattttattgatcaaattgtttgaaacaagcacctaccagagtgcttgtttgggggatacaccagaccagtcacaaggcgcatcagagaacagttatgttccatcatgtgcactttacgtgcattcttgttttactcagaagtagacaaattcactaaaatat

SEQ ID NO: 475182 - DNA, 639 bp, Homo sapiens
gagggcctactgtggaaggcactaaatcagatgttaaagggagctaagaagtaagtcatcaaaactgcccttttcctagtaatggaaaagttaatcccagatgctagaattgcctacatagaaaatcctaaaggctcagctatttttgaggaactggatttgttagagagcggtcctgtcaaggggcaaaacagaggggaggacgatgccaggtgtttgcggggaagtgtgtcgatcggccgcttccagaatgtcaaaggcattctggaagtttctggcaatacctcgagacaatccacataccgaggctcgtgctcttgtgagctcacagctgggtatcaagcccagaagatccacttgcagaaacagaatgggctcccatgggccttgcatggatggactggtgggatatcattaacctctccctacacctgagacaaaaagtgaaagtcacaatacaaatgtggtttacatgaacgtgtatgccagaatttattatgcatgtgtaaaaatgtgatagtttatatatacatccataactgatttgaacatacaatgaaaacaagatcctacctacggaatcagctaatattatgctcctgtatcaggcagcccttaagctgtcccaaaaggatttcc

SEQ ID NO: 475183 - DNA, 546 bp, Homo sapiens
actgagacttgtggcagcacctggtgacagcgtgctcctcgggggtggtgagcggcatgaggagtccaggctgattgctggggcttcactctgagacatgtacatggcaacactcccaaatcatgttcagccacgtctcccatcacagcatctggtccttgtgtccgcccccagcacctcaggctcaacggtccccaagggactcgccatccacctgaacatgtgtgcgctcattttgccttcctctgtgaaggtcaccacaacccactctccacccatgctggagtcctcgtcgctcccatacacacagccgacacccactcagtctcggcctttgatcctggaccaggacccaaggctgggcaccgccttctccaccacctccctgctccatttgccagggtttgacacaagtgattccattttgagtcttacaacttttacatttccccgttttgatgaagatctttctctgaaagtattgcagatcaactattctgtggttaggttttgattgtcctgctgtgccaggacagacctgtcctt

SEQ ID NO: 475184 - DNA, 1083 bp, Homo sapiens
ctctgctcctacgtctggagacttcacctcacaactgagcctcagcactgggccatctgagactcagtgcaggggtgactgagccctggggctgggatgactgagtcccaaacctgccccttcccttccctttccactccagctccctgcagtgcagacttcactgtatgcagcagccacgagcccttctcttccccactccaggccacctggggcacatggtccttccagcccagctcagccatttggtccctgaggaagctgagcactttttggtttgggcccaggctgaggaccatctcttcactctacaaacctccaggtggctgctacgtgcaggccccggtgcctcagtccttggagtgtgagaacaaactaatatgccagcctggccagacctctgctccaaagtgcatgagaaggaaacgagagacgagtgagagcttctactttcctgcctctcacaatatttctgtctgtggaagggggcagcgccaatgaatattgattactactgagcctttccaccccagtagcatcaaaggggatgttagagaaataagaagattatatcgaaaggaagttctgttttcccaggaagaaaagattttcacttcacttactgggctttgttcgtagctgcagtagggaaggaaaacttgcagtttggaaaatgttgggggaaaattccctgcatgttcctttaagagcctcgtttttaataaaagtattctctcttttcttctgcagctattctgtaaaatgtatcatcagagaggaacctatataaccttcacatcaccattttatcagcactcagcatttttcaaagacctgatggatataaatacttcacaacaacttttttattgcattctaagcacgaacaagtttccaaagaaatctatgatgtctgtgacctccaatgtagctagaagcgatgggtggaagatgaaatggcttgttccaagtcgtaaagcaagcagcaacaaagctggactggggctccgtcccttccaggccatttaatctactgccactttcaaggtgtattcctgcccaaatctagaaaacatctcacac

SEQ ID NO: 475185 - DNA, 593 bp, Homo sapiens
tgccaccagatgcctgcccaagctattgtaggttgggagcttcagcccaaggaccgtgatgcagctgatgccccctgagaacatccctgtctatttgtgcagcaccagtcatggaggaagtttggcagccaggagatctggcgttcctgggttcctctcccaccccctggatctgaaaaggagccaagctctccccaagtgtcttaggacgagccaggatgacagcatcactcagcccaaaggtgctggagggtttgagtctcgggaagatgagtgccttctctgcatttttggcaagtcctctgggatgacacttttcttaatgtttatttacgaactgtcatttactggcgggggagcagtggagagctgtgcggttccccgggtggtgacactgatcagaggtcatgaaaaccgctgatgcccaaagaccaatgatgatacccagagaaacctgctccacattggcatcccagagggtcaactctgccctgtgcagccctggacacaggtctggagtctcatgtgcactactctccccggacatcaaggtatatgcccaagagaaatgaaaatatatgtttgcacaaaaa

SEQ ID NO: 475186 - DNA, 2882 bp, Homo sapiens
tgtggttttaagtcactaagtttgaggtcttcttttgagagcttctttggaggttctagcaggggagcgcagctactcgtatacccttgactgaagaccagtcctcctctatcgggtatggtcgtcctcttcgaccgagcacacagcttcaggagggacgcacatggagcagtgagggaggaaggggacacccgcctagccagccagatcagccgaaccaaccctggcaatcaatggggtgacagatgtcgcagccagatcgccctcacatccaggtctccttttgagaaaggtggtgtggagctggcagctgctgtgggagcttctggagtcaatgggtggctgctgcaccctgcagctccctcaccattgcaggatggagctctcttggtgacctggtttccctatggctttgagcgtttttcttgtgtggtgggcgtgtgcatcaccttcctgtcctggggcagtgctggctccaactgccacttcctgaccctgaggaagtcctggacacaggacctgatacttgcagcagctgccaggaggggaccagtagcacagcttagcatgtggaagctatgatccagtagccctttagtttggcctcaggttctgttttctgggaaacctggcctgagacctgtcttgaactgcaatattctcctttccgtttttgacggatgcgttcgatccgtccaaacccttcagtcccctgtggacaggtcctccctcttcatcgtccagcctggtccagacggtcagctttatttttaggggctccggtatccacgcctgctgccactgcctgactcaagtttcctcccatctgtcataggcgtctgcccggacctcctgcctttaccagcttactcattgttgtaatgtcttcccactagcctgatgcatttttcatccccttacaattccttaatccaagccttgcagaatgagctcagggaatgtcattgggatctggcatgacctggccttgacctgtctcttcccagttgccacccatttgcttctacacgttgcagtcatttattcaacatctcctgagcatcttctaggtgcaggccctgtgggagacacttacaacatcaaggtcagcataaaaggcagtctctcagtttcctgtgctgccataactaattagcatgatcttggtggcttaaaacaatagaaacttgttctttcacagctctggagtctagaagttggttccttccagaagttctgagtgagaatctgtcccaggcccctctctcaactcctggtggctgccggccgtcctccacagtccctggtttttggctgcgtccctccaatttctgcctctgtgttcatgtgggctttcccctgtgtctctgtgttgaatctcctcttctttttcttataaggacacaggtcatttagggtgaaccctaaatccaggatgatctcatcccaatatccttaatttaattacatctgcaaagaccctatatctaaataaggtcatatcgttagatatggggtttaggacttggaactatcttttctgggggtgccattcaactcgttacaggcagaagatgatttttcattctcatgcaacttcctggggttggcatttaggagcgttagaggttagctgtgctgccttcgttcatcctgcatgctcctccctcccagaagagtatttccttctccgtctcctcctccttccaggcacaagttaaaggctgagtttccacggaggctgactgggcggcctccttccaagctgcttctacccctcaccttgtgtaccctgagtgtgcgctggagtcatctgtctagagtttccctccctttctgggttgtgacctgctggaggaccagggatgtctgtggtacagcgtcatttgggtgatgtttactctgaagaaaatggagactccttcctggaagatgactctttttggagttctttcattacagattttttttttagcctaataacgtagtttagacattggttgaaaacagttgcatgaatgacacttattatgtgtcttaacccttgaagatttccatgaaagataaagacataatagtcactgttactaagtaatgtatcatgcttcctttttagagttaatatctttgctcttaaatactgtttactcaattttgtagaccaaaaagccttgaatgtaatgcattttaaatgtttctttatcttatttggcttaacaatgttgatgaagaaagcccccaaagggaatatagatgaaagtaaattctggttcgtgcttctcactgccccatttctatttatttaaagtaaccatcagcaggtgaaatgacccacaagttatcatgctgtgaaaacataagcagcagattaccccattttttatactgaaagcagtcttgtgagctacacctattgctacaacttttactaaagcatttattgcttatttcatggattgctaactccttggcattggttgggatggctgtgaggatttatggataagtcttcatgggtctctctctggagaaaaaaccaaatgtctctctccctcagttgaacacaggacgttgggcactgtgctcagtctgtcaccaaggcaggcaggagggaagcatggacccatgaccactctttctagaagaaattaaagaggaaatatatctggcatattatcttttcttaaatggatattttccttcagtggtaactaaatgcacataatacaacattctaaaaatataaattggtcaatatactgaaaaatgtcttcttcccttcctgtctgccagctgctgagttcatatccccagaggcaatctgttattcgcttttgtctgttacatccttctggagacattccacctcttatagctaaatc

SEQ ID NO: 475187 - DNA, 709 bp, Homo sapiens
aagaaagaagttgataaagggacagcaccagacaaagagtggcagcaccaacaaccagtgcgagggctccgttcagaaggatctggatggtcgcctggacgtgctgccgtgtcatgtcttaggtggttagtcaatccacatgatggttttaagtcaaattcccagctttgggaccaaccctatcccccacggcaatccaagaaacccgatccaggactctttccactgggagttgtcagaactgtgtcttcatccaagacaattggaaacagcagatgaaatgcacagtgtgaaggacaaggattctgctgagagaattgctccgagggttgctcaagtgatcatgggaaataatgcatcaaaccattctttagagaaaatatccaaaatatttgacaaccatgagggcactggatcttcaaatgtccaaacacctgcccccataggatggacaccagctgtttacaccaacacaggagtcctggagcatcacccggaaggaccatccgttcggagacatcctgggagaacaagaggtttcttgtctgactctaaaatttattttatcagtgtatctaggattgggctgagtttaaacagaaaacctttaaataagcactatatgcctgctagacatattaatgcaataaaagaaccctgtgtcttgctaaactaaattctcaaaagttaacattaaaaaatgattcac

SEQ ID NO: 475188 - DNA, 534 bp, Homo sapiens
tgacacttggaggtgatgtcacggggaagagccatctctgaagccaagagaggcctggccacagcatcaggagccagtatggggcagtcagctggggacatggggtctggatggagtgccatggcttgtggccttttgaagacaagactggaagctggaggtacaagagaactgaacttgggcagtgttgggcaggatgagaacagctgccaaccagacaggagatcacctgggctttctagagcacaggagagactgggaactggggctccaacagttccattcactcttacacactgcagaggctctcagagtgtggttgggaaaagcctgggtttggagaagctccaggggcccgatgagctgaatattggatgtgaggaagtgattttggaggcttgtgaaaaatgattttcaatcaaatttgccccaaaacagaaaaatgtttgaaatgcatggtgttatagaaagtttatataaaaataaagaaaacacactactcatggaaccaggcactgtcactgattaaaactc

SEQ ID NO: 475189 - DNA, 716 bp, Homo sapiens
agtgtgtgtattcgtgtatgtgcatatgtgtttgagtgtgtatgagtacgtgaatgtggctaagtgtgtatgtgagagttgttctgctatacttacctcccttcttactcacgttctccaaagcttgaaatcatgctctgcctccaggtcctcacttcttatactaaaatctggctttgtttcctccacactattggaattcttcaacttaattgaaacacataatgagtctaactctgcttgggctgcccgtgacatctgccatcctacttcaccaaactactgtctgcatcctggacacctgtgctcttctctctgcactttacacatatgctttcctgtgcctagaaagactttccctccaccctggacttggaaagctctactggcctttctagatccagcattgatatctctgcttccaagacatcctcactttccagggtggattaggctcattactcctgttcctactacaccactctcactgctctctgctccatttttggaataaattatttattattcctattcagacttttccagaagattacaagctacttgacttcagggtcttcattgttgcttcttgcatagaatcaagtcaattctgtatgctcaataaatatttgttgaatatataagtggatgtgtgtatgggtgactgtttctgagcagtcatttcattatctagttcatgtactaaaatgtttgaa

SEQ ID NO: 475190 - DNA, 620 bp, Homo sapiens
gtactcagaaagagccagtgttgaaggcataagccgcagtcatctgtctccttatgccaggaggtcatggtagtgctattggtgggctctccagcctttgtccccagtgttccagaagagggaatgtggatgctgggaggacctgcctctggagaaacccaggccaccagcaggtggaccctgaagtgggaggacaaggacggatgggaaaccaaatttcctataggtgtgctctatgtgactaagttccagcccatgggatgtcagagaagtgtgcagagacggcttctcagggcattctgtaggaaagttggcatgcacatttgtgccttcctcaacctcttgctccatccgtccgctagcagcatggacaggatggccgaggcctctctccacactgactgttctcaagcccccttgcagcccttgagctgcccacagctagccctgctagccctggtccaggttcacaatagctctagaccttcctatacacagagaccgccccatccccacaaggtacatgtgaaggccaggtcttgagaagagcagctttcagtctcctgctgctgctgcttgaaaggacctaaaagtgagtcagtctggaaacatactctcat

SEQ ID NO: 475191 - DNA, 721 bp, Homo sapiens
agcaggcctgaagagtgtgtgcatgtgtgtgtgaatatgtgcatgaacactaacttttactgtgaggaaaacagaagccactggaagtttttcagcagaggagtggtagaattatctccatattttaacaggatctctgcagctgctgtggtgggagacttggctgtcatgggtcagggctgggagcaggggctcctggaaggaggaaattcaagaactctgaattgtcagaaaatagctctgcccttccaccagacccacgaggaacatgctgaagaccacatgagtgatgtcgacagaagcatttgtccttttcctgactctttcaaatcatttggtgagaggtgtttcgtttctgttcagacgcaagcttcttcccggagtggaggcttagaggcaggctctgtggcatgcactccccgactctacatggtgcattttgactgaagtgaataccctgagaaggttttgcagaaaaatcaaggagataaatgaaaggtttccctcagtggtgaatgtgcagaggctccctaaaatgcagaattaggacttgctcttaaccacatgtaaatgtaaattactttccagaccaaatacaaaccaccctttatcatcttcagttttgaattctttgtgcctctctacacaagcattagcagagataattgaaaatttgcagcatttaaatctatgttttaaaaaatgattcaggaagcttttc

SEQ ID NO: 475192 - DNA, 488 bp, Homo sapiens
atccttgcctttgaaactctgctccccttcatctggagcatttctgtaggtatttctcctaatgctatctctcccccagtcccccaacccccaagaggccctgaagtgtgatgttccctgccctgtgtccaagtgttctcattgttcaattcccacatatgactcagagaagtttgttattaccgaccttctgaagccatcttctgtcaacttgtcaaagtcgttctccatccagctttgttccgttgctggttcctcagctgcaggtctgttggagtttgctggaggtccactccagaccctgtttgcctgggtatcaccagtggaggctgcagaacagcaaatattgctgcctgatccttcctctggaagcttcatcccagaggggcacctgcctagctcaaacaccgtgctgggggaaccactgctctcttcagagctgtcagacaggaacgttcaagtctgaagaagtttctgctgccttttgt

SEQ ID NO: 475193 - DNA, 660 bp, Homo sapiens
ccatctgttcatccccatggaatctatcaccaggagagaaatatctgatcagcttctctcagcatctgaattcaaagctgccgtgaaccaactccggctgcacctgaggcccaggcccagtgcccagcaaaagcctgcaattctgtggaccaggttcatggagactgccatgcaggatggagcccaggggactaagcccccattgtgtgccactggcaactgctggctcgtaggcatggaggaggttgcagcctgtggcaacccagggtgggctggctgctggctggagaggagatgtgtcagggtgatgacaggagaacaaataagcccagtgctccttctccacgacaaatcacgaagatgcaatcttctattgagagaaaaatgcccaacaatcattctgactccctgcagaggcatgtctctcggatcttcagcatctaaccatagctcccaggctccaagggaacagaatcaggacaggcccctttccttcttcaccctgcatgaaagatcatgagaaccttgatatggtttggttgtgtccccacccaaatctcatcttgacttatagttcccataattcttatgtgttgtgtaagaggggcttttccccctttattcggcactcattgtgtcttctgccgccgtgtaaagaag

SEQ ID NO: 475194 - DNA, 825 bp, Homo sapiens
gtgaagagcattgaccacccattgactggggctcagctgcagggagctgcccacagctatgggctgagcatgaggaacccagagggtgtcctggctttggcttggtggggtgtggctgtctctggactgttaggaaggcactggggcagaagcaaaggcacgtgctctgcactggcagggcttcttactgattctaaggaagccactgaaaacctaggggaaaaacaaccaagggccgagggacgagaaatatccatttggctgcaatggaattcagagctggagtcagagttggtctttgcccaaggaggtcctcagcttgtagtgacagggccttctgggagggcttcatcttctcccttgagtcccacaaaacccttgaaggtgttcctggggcagtccgtgttcatccgaggacacaaaagcttcctggagcacttccccgccccagcgctgctgatggaggccacggggttccatgagcatgcaagcctctcctggtcatcaaccctaatgtcccacctggaggaagagctgagccacatggagagaatgtccacagtgcacgctcctctttttcctcgctcttgtttccagtagctgaaggacaaaattttgtcccttcctgcaaggacaaaatcaaaacaacaacaaaacactattgtttctcagaaatgactttctacttagcataagcccctccaggttcattcacattattgcaaatgacagaatgttctttgttttcaaggcagaatagcataacattgtgtatatgtaccatattttctttactcattttctcatgatgcacacttaggttga

SEQ ID NO: 475195 - DNA, 1906 bp, Homo sapiens
gtttgagggtcagggacctggtgttttgaacagtggcaatgtgtgcagggactggcatatgccctgtccctagaggtggaatctagagagacagtagccattgctgagctgcagtgggctctgcccagtttgagcttccctgctgctttgtttacactgtgagcatagaaccgcctactcaagcctcagcaatggtggacgcccctccccctaccaagctcccgcatcccaggtcgatgtcagaatgctgtgctagcagagagcatggctccttgggtgctctggtccatggggatccttcaggcagaagccatggttggcagacaggccatgccctttccaggctggttctgcagagggagggaaacacagggctgcacttaccacaaaattcaggcagaagcaggaccagtttcctggaagctgtcattgagccttgtctagtgagggtttgtggagcaatcttactgcttccaggcactgtcactgtggcctctatgggagctatggcactggcaccaggcttctccagatcccaaggcccatctgtacatatcaaagttttccacttgaatctgtcccagggcatgaagaacatcataaactgtggtatttgcaacatcatggatgatattcattatctctgaaaataatccagacttttcccatatgcttttgcaaagattaagactgggttgtcttctcctataatttttgtgaatctgatgggaagttttcccattcgttcaaggtacttacaaatgagatacgatatgggaaaaatgaatcagatttgtcacaacagatttgctgtgcagtttgtggtctttgggatgcaggaatgctaaattctgttcaagagctgcaatctttatcctggaaggatcactggaactatttcccatgtaaatcaaccagatttggaagcaacatttagagcaaagaaaatgttcatgttgatttttaatttggtctttactgatcggatactgccagctattttttcccatttgttttattttttaataatttgtattatttttcatttaaatgtattaaatttcatttatattaaagttttactaaacttacattgcagttcctatgttccaggtattgttctaagttctttacaaatattaatctattctattctcataacagccttctgagttggattgtatttttatcatgcccactacacagatggaaacatgaagacttttgaagctcaagaaatgcatccatgctcatatcctgttctccctgctatgtacttacctgaaaaaatattttaaattaatttaatattagtggaacaattaatttaattttatatttcagttttcatttgcagtatgtgtgtattttaagagtatattgttaatttcaattctttacaaaatctaagacattgttttgtaataaacaaatttaagctattgcgtataacagattaagtttttttggatattctattcatcttatgccttctaattttaatttttctattgctacagttggctttttttctaagtagccaatgtctatttacttctataatatattctgctcttttttatcaacaatatatttcttttgacttttcaaaaggattttagtttatttctgattttcagttatgaataaaacagtattccctcatctggaagacagaatttcatagaatttcacttcacttttccgccacttcttccctttctgatccttgaaattattgtgaacaatatgaagcataccatttttattaacctcatttagctaaagatacatatgcatatatagtttttagagtaattgtctttgtcattttatggtttcaacagttgtataaactctcagcttatctcttttaatgctagacactactcatttaatattatac

SEQ ID NO: 475196 - DNA, 1022 bp, Homo sapiens
tggcacagcagtcattgaaatcagccatgaggggaagatttacaccagggaaattggcaaatgccaaaatccagcctctcctcactcttttgatttcagaatatgacctggtctctgcctacgaggttgaccacaggggcgattacgtgtcccatgaaatcatgcaccatcagcggcggagaagagcagtggccgtgtccgaggttgagtctcttcaccttcggctgaaaggccccaggcacgacttccacatggatctgaggacttccagcagcctagtggctcctggctttattgtgcagacgttgggaaagacaggcactaagtctgtgcagactttaccgccagaggacttctgtttctatcaaggctctttgcgatcacacagaaactcctcagtggccctttcaacctgccaaggcttggaagcccactggggacaaacaggaagtccacccctgggaaaaacaggaagtgagggaacagacagaaagtccacaggagctgacaagaagtccacaggggacagacaggaagtgagggagccaacagaaagtccacaggggttagacaggaagcccactgggatggacaggaggtccacagggaacagacagaaagtgaggaggcagataggaagtccactggggctaaacaggaagcccaatgggacagacaagaagtccacaaggaacagacaggaagtgaggcgtagacagtccgcaggggctagacaggaaagagcaggttcttccaccttccttagactgtccgcattgtgtgggctgttggtggatgtgaatagagagcaggtggcaaagcagaaatgggatttgtatagttccaggttcacatcaggaaacagagtttaaagggagaactttgagttgagaggcgatttctttgtataatcaagctgcctactaccctaagtattgagagaataactaccagggatgtttgactttttcttgctttatccccaacactttcaatagtgcctggcatatagtaaagccctc

SEQ ID NO: 475197 - DNA, 585 bp, Homo sapiens
ctcgcttcatcaaagccggcagtaggctcctctctgacccagggctgaccctgaaatgccatccaagagccaaagcctggaattggtacctaagttgcaaggtctaggaaatgctcctccaggcctgcagttcacactgtacaaatgtctggactcatccaggacagcccagccccatgcagggcttcactacgtggacattaattcaggcatgatacgaacagaagaggcagattacttcctaaggccacttccttcacacctctcatggaaactcggcagagctgcccaaggcagctcgccatcccacgtactgtacaagagatccacagagccccatgctcctggggccagtgaggtcctggtgacctcaaggacatgggagctggcacatcaacccctgcacagcagcgaccttcgcctgggactgccacaaaagcagcatttctgtggaagacgcaagaaatgtatgtaagggcgaatctttgtgtgtatttagtgatgctgacatttatgtaagctgatggaagcttgtacattttcttcaaagcatgtctgcccacggggtgaaatctatggactgtc

SEQ ID NO: 475198 - DNA, 1477 bp, Homo sapiens
agctatttccgacactttcgaaggaaggggtaccaaatttctctatgacgagttacggccctgattttgtgtgtgacttgtgcttccatttgccctccatgtgtccctccatagacatgccccagcctcccaaggaagacctcttcatcttgccagatgagtataagtcttgcttacggcataagcgctctcttctgaggtcccatagaaatgaagaactgaacgtggagaccttggtggtggtcgacaaaaagatgatgcaaaaccatggccatgaaaatatcaccacctacgtgctcacgatactcaacatggtatctgctttattcaaagatggaacaataggaggaaacatcaacattgcaattgtaggtctgattcttctagaagatgaacagccaggactggtgataagtcaccacgcagaccacaccttaagtagcttctgccagtggcagtctggattgatggggaaagatgggactcgtcatgaccacgccatcttactgactggtctggatatatgttcctggaagaatgagccctgtgacactttgggatttgcacccataagtggaatgtgtagtaaatatcgcagctgcacgattaatgaagatacaggtcttggactggccttcaccattgcccatgagtctggacacaagggagactatgtggaatattcagcaaatgtgtatgaatggagtcggggaatgagtgacgcagggcgtgagcaagcaacagttccccgcaactgctgtcttcagctcagccttctatctttcatggagggtgagctgtgcttctccagatgcctgcatgaagcctgcgtcagggctctgggcagctcagtcttacctgtggtcgccatcattatgccaaaggttaagaagaagagacttgctgatgacggaggtagcagccctggaaaatgtgattctcacagctttggcatgattcatgatggagaagggaacatgtgcaaaaagtccgagggcaacatcatgtcccctacattggcaggacgcaatggagtcttctcctggtcaccctgcagccgccagtatctacacaaatttctaagcaccgctcaagctatctgccttgctgatcagccaaagcctgtgaaggaatacaagtatcctgagaaattgccaggagaattatatgatgcaaacacacagtgcaagtggcagttcggagagaaagccaagctctgcatgctggactttaaaaaggcaagtgattattggcacatgctcaatgcaacatgattcataagactgttttatttagtgtgatcatttgcaaaattatgcctgtttcttaaaagaccaacagcctttctgatgttgcctttgagctattgcctgcatgaaacacaaggtggtcctccaggcatcctgctttctgtgtggtcaggtgctacttttccctgggtaatgtagttgtgatgctttttcacaataacctgtac

SEQ ID NO: 475199 - DNA, 675 bp, Homo sapiens
cggagtgccaggctgtgcttctggatttcagctgcagcagggcgcatgaaagttatgacaacgggaaagcttatgtggtatgattatgtatctaggaagctcaagagaataggtgttaagatggatctgataactgattattggaagtggggaaaagaaaggactagaaacagggagagcaagatgaatgatcagagattcttgggtaacttgaaaaaaatcaagcctgaatgtaaaaagcccagagaagtctttgagggcaatcattttctcattgtgacttctgaatgccagagattccagaaatctctctgggggctccctggagtacaagccaaggactggagttcccaagtgatgctgaatctgctggcctggggtcctacgatgcagagagcatctcagttactcttccacaagatttctgaaacagtgatcttaccactgaagtgggctgttcatgctcatacctaaggagaaactctctgcaaatgaaggatacagatgacatagtgacatagaaaaagctgatcactaggaaggtatgcatttgcagagctgtgcatggagggagagaccgaatgggtgcaccaagatgcttacagtgatgtctttcaaggaggggtgtctcaggaatgatttgtgttctttactttccatttatttatgacattc

SEQ ID NO: 475200 - DNA, 556 bp, Homo sapiens
aggcattagcacattcagggcatgatgaggtcctgtttctgggatttgcgtcttcacatggtgaaaaaggctgtggccagattggatgcagtggtagtgtatgcaagtctgcaggtgcaacggcctgtgatggtagatgggcaaggatggcacccctgggctggagcagacaccaaaatacagctgccccctagacaattcgacaaccagggacaagtggacacaaggaaagccacagcaagtgttaggggttgccaggagaaccctgagattcaagagagactgtctattgcgggaaccatcaagaatcagcatcagaaccagggagcccatatgaccagactatttcttttctacttgaatattcagagtagattgcttgagtactgtcttccctacacaaagctcacccagtacattttacttttaaatcacttaattgattttggtcataattttggttaaagtgtagagaatctggatgtacatcagcttgcaggaagtggtttatcattgtgttacctcaaatctgaccagtagagcccgcgtcagccat

SEQ ID NO: 475201 - DNA, 991 bp, Homo sapiens
tgccacctccccagggctccacattcaggacccacctcaatggtgtcaggcgcactggtgtctgtcctcctctaggaggactcctgcccactggggcccacttctgttaattagacaagcaggtactttccttggagcagaaccaaccgggaaccctgcactgtttcaccccgagctgcctcacacgcctgggacagggtggacgccaacataggactgcagccctcatcagttttaatgggaaaaacagacacaggatattttaatgatgaaatcaatcaccggctttatgggttttctttggaagaggtcacacccactcaggactgtgccacaaccagcaggctcacctcacagcaccctgggggtggtcctgcctgtgtgtatccctgtgtgcgcccgtgcgtgtctgtgcccgtgtgtgcgcctgtgtgtgtctgtgcctgtgttcatgtgtgtgcgcctgtgcgtgtctgtgcctgtgtgtgcacctgtgtgtgtctgtgcctgtgtgtgcacctgtgcgtgtctgtgcccgtgtgtgcgcctgtgtgtgtctgtgcctgtgtgtccacctgtgcgtgtctgtgcccgtgtgtgcgcctgtgcatgtctgtgcctgtgtgtgcacctgtgggtgtctgtgcctgtgttcatgtgtgtgcgcctgtgtgtgtctgtgcctgtgtgtccgcctgtgcgtgtctgtgcctgtgtgtccgcctgtgcgtgtctgtgcctgtgttcatgtgtgtgcgcctgtgcgtgtctgtgcccgtgtgtgcacctgtgcgtgtctgtgcccgtgtgtgcgcctgtgcatgtctgtgcctgtgttcatgtgtgtgctcatgggcctatctgtaggtgagtaaaggcaggaggaggaggagaaatgagacttccaggtgaggacacaaagactctttccctctgcttagaccaggaacccaaggcccagctgtctgcaggcccctctgacacctctgcc

SEQ ID NO: 475202 - DNA, 741 bp, Homo sapiens
gggagtgctcccgtgacctgagacatggccgttccccgcccctttcctgcagttagcacaggacactgctggcagctcacccatctcacaggaatgaactgcgaggaagaaccagtgaaggctggaaagccttttgatcgtcatgaaagattgttgccagatggagaaacagaactgttagaatataacgaagctgcactcaagataatcgccatcttgttcaacttttccctgcaactccatattagaggagagatttgtcattcaagaggacgcgtgtgtaccagggagcaatggaacataaggaacacatttatggaaaatacccaccaatcgatctgtttattgccagatttggagaaaggagaaaggatttgagagtctttgtcccactttcctcacccttgatgccccaccccacacaaaactttctcctcttaatcctctggctgagtctacatggagtctctgagatttacatcataataaaaaatacacttaaattgatatgtttttaaatattcccaccccacactggtatttttctgactacagagaaaggtaaagcttatatagttgcatttgtatgacatggatacaattggaacagtatatatttatatttgacttaactgatcaaaaataaactttctcaaaaaagaagcttcatgaacttttaatcaaatatattacattttcaatgaaaacttttagatgaactttctaagtatgtattgaaac

SEQ ID NO: 475203 - DNA, 1088 bp, Homo sapiens
agacagagagagagttttgctaggcaagctaaactctttgaagacgttaatgtaccgaatgcgatgctccacctcctctcaccacatcactcacatcaccaagcttcagagaccttcacggtcacctttcttcagacttaaagagcagggcctttctcttcctttcactggagcgggacttcgctgttgtgaacaggatcaggggtccagtggggccgacctccgccctcggggcagtgagaagggggtcaccctggagactccctatcccatgcatttgaggggtccagtctacaagacagtgctctgttgctctgatgacgctgaagtcggcacccaagctgcatgcaacgggatggagaaggacctcctgagaacgctggcatttgctgccctgcggccactgcccttggcacccaaagacactgagagccaggctggtgggagacacatagacagaacctctcccagagctaccagtgagaggtctcaagagccttatgacgcgaatacacctaagcttaacaccccgagtacaagactaaaatcccagactgtagcactaagtcgaggaaaattttatacacaaagatggcccctgaaatgttccacgggattatcaggattttaaatgtcaaatcactaaaggatgctcttctatgttctggccaagttacctgaatgaacatttggcaagcaacaaaaacgtttcaatatgttggaaaatgcttgtgtgatataaccttaaaagcaaggcatgaagatacaaatgcaatagtataccacccatgtaaaacattatgtaagcatggaactattatgtaaaaaagaaaagtgattaaactattagtgcttatttctaagtgcggcgttatgaagtatgttttttaccttataattcttttttttttccaaatgacaatgagaatgataggaagacatacagcaagttttcccccaatggtagaaacacctatttttcctttttttcccggttcttttgaacttacacgataaaatcaccccttctgacgttttatgttttaattagtgtcatttcatttatacttatacccttaagctgtttt

SEQ ID NO: 475204 - DNA, 788 bp, Homo sapiens
tttttctagattgtgtttttgtagtatttctgccttctcttttgttaagtcacaacaagcttttcttgggttaaaaagagaggaaaaaagccagttgaatagtaatatggcaaacgccgggctacaacctctctggctgtttctgtacctcacttccgtgttctgtctatacatcttccaccacgtggccgcgctggactctgagtctactcaggctcggaggctgccggatcaggttgacattaccaccaagcagttccagagctggatctgtgccctggtccagaaggggagccaggccaccatgcccacagaaagcctgccctggagactaggctggcaggatactgagggcactgagagcccttctagaccgaagccagggttccgccaggatcacggctgttccccaggtgaggagacccatgaggaggacatccgagtcctgccctctgacctcaatcctgccactgaagaccctgaaggaggattttcccttggaccagtgtggaaggcagtgctgcgtgctggccccaagctgggttccactttcgcctatgcccgctgatcttgaaaaacattctgggctttgctggcccgaggtgttcactctctaaactaacatggttgggtgagagctgctcccacgttgcttgtagcgtctgtgctgtgacttgcatgctcttccaattatggagaaagaaaactctaccagaaaccaaaccattttattctggtgtttgggtgacaatgcctgagtcagcggttggaagcgtcccctctgtgta

SEQ ID NO: 475205 - DNA, 1608 bp, Homo sapiens
tctcttccagctgattgaaaatatacaaacacaggcctttgcagaagtccatcctgtctccataggcacaagcctaatttctttattggctaaagtgggtccactgcatgaggtggttttgtgcagtgtctccccagacccccagtaaggacggcgctggaaggttggatggcgagcaggatgacagctgtggtgccttcacctcacaccctccggtccggaagcctctgcccctgtgtggagctagagcaatgaggtcctctcagagagccctgcacctgcagcctgtcacctcttcctccaccttctccagcaatgaggtcctctcggagagccctgcacctgcagcctgtcacctcttcctccaccttctccagcaatgaggtcctctcggagagccctgcacctgcagcctgtcacctcttcctccaccttctccagcaatgaggtcctctcggagagccctgcacctgcagcctgtcacctcttcctccaccttctgcagcaatgaggtcctctcggagagccctgcacctgcagcctgtcacctcttcctccaccttctccagcaatgaggtcctctcggagagccctgcacctgcagcctgtcaccacttcctccaccttctccagcaatgaggtcctctcggagagccctgcaccctgcagcctgtcacctcttcctccaccttctccaccagtgcctccacctaacctctggagcaattcttgtgggcaagtggaagacaagtggaccacgcggtggagacatctgactggcacaaatcggcgtggggacccgcggcccacggccttgtctcgggacacgtggcccacagccccatgtcaggagctggcctggtcgtcttgcttgtttggcctctgggctcgggctgggtctggctctgctcattttgctctaatcccaggctcaacacgcttccctcaaactctaatttttgtgttcctcattcctggaaattcctcaccaaagcaaatcccatttcctccttttcccgtgaacgttaggtggttgatgcaggccacatcagcgttggtacacgtcacctaactttcaaaagtgacatcaacgtaatagaacgagtgtggcagttccatgctagcctctgactctgtaggcagataaatagatccaaaaaattcttggatgtcatcaaagcaaaattcagattcttgtttagtacatgacggcacttggaataaccttcacaagccattaaccacctaaataagaaggcactatgttcctcactcatcaacatacagaatgtaactactgacttctcagtgaagttctgttttaaagtcatgagataatgcctgggtaacagagcagatgagttggaaatgctcactgcccctcagtcaaattctctttctttctcatccacaggactctgactgtgtgctgggagcccggtgcagacctcgttccagcctcctttgcagctcgatgtggctgtctggctgatcctggccagtgaaatgcaagagcaggtgtgcgtaggctcctccaaagctgcctaatgccagtgcctccaccaggcatctcctgcaagcccactgccctctccctcctgcagcctg

SEQ ID NO: 475206 - DNA, 905 bp, Homo sapiens
gagaactccactttgggagccacttggttttctgggtgccagggctgtggtgagaaggtcagccaggtgctcctctcaaccacattcaccaccaagcttgtggaccgtgtgattctccctgggggcagctgatgatggcttcctctctggagaagactggctccagacctcccagtgactggctttggtgacctcagccatccactggtgcggtcctactgggtatcctgctgagaactcagaggttggcagacttttcatatctcctcgccagctcttggggacagcacccactgaggcactggccaggccaagaacacaccacggtgtgtgcctaggagcaagcccctcttttcctagccttctgagaagtcttcttccccaaccctcagctatgcgccaaggcagcagcagcttctcgtcattcaaattaacgcaacggttgcggctcaggccccaagacagcgagatcccgggaaagctggttcggcggaagggtgaacaatcaatttccgcggtttccaaattacccagtctgagacattttgttatggcagctgagcagactaagatggaagccagccaggtccagttgagaaagggcagcctgcaccagagggtgcgagttatggggcaggtgacgagagcactgcagacaggggaagctggacagctctgggatgaccgactgtgggccaccaccagccgcggagacaaagaagtatcagcagagcccaggagctgtgccctgcagccaacagaagggccacggagaggattcctcttagtgaggagcctgatgtgagctgcaaccacagagcagatggagccactcctgggaacgccacccatgaggggcagagacacagcctggactctcccatgccccccttctgtgccaccca

SEQ ID NO: 475207 - DNA, 1636 bp, Homo sapiens
ctccctggtgctgcttgctgttctgggaaagcccctccccgccgcacacctggatgaggctgcaggaggtttccccagtggatccccagtgcctgcacacagtaaggcccaagacctgcttgttgacctgaattgaatggccagccaccaatgccaacgtcagccaatgtggcacaggcgccctagcgtgcaggagagggctctgtgagcttagaggggacaaaggtcctatccggctgccctcaaggtctcgtgagagtttgctttggatgacagcctatggatgggaagagtttttgaccgaggagctggggcaggggagtttctgatgcggaaacgccacaagcagagcaaggggaagaaccagccctttgccaggcaggcgtctgggcagatgcaggccggcgcactgtgctcctggtcctggcgcgagcatctcctttccagcctgcccggcgctagggctccatggaaccccaagctctctggcttcagaactgctccaggcaaatgcgtggcatcattcataaggaggcagcgtcttgcggtgctgagaccgagcccctggctgcttccagatgagcgctcgggcgccttcactctgcttgcgcctctaaagcacacctgccccgcccacctggatctgctgtcaatagctgtcgggcgtgcggtgtgcaatttgggacttaggaagcgttgatacatggtcgttactctttacgatcattagaaatattgacttcaagggcaacttgtgataaactcaggagcatctcatttgaaagataaataagctgccagccacctccgatgtttcagcagaggcaggaggcccacttcgtgaggtgccgaaggtgaaacagccagagaacttcacttgcccgcaacaaccttagagtcagatgcaggtgggggaaaagccatatatcatcagtctgccctcatcccccgtttctgtcttctctctcttcatgcaaatatttcttggaaatttcaacaagggttacatgccttctagcatctgcctagacactcccaaaatatagtagaaagctgtttgaatgcatggctagatgtgcaatttcagaagtgcaccattcactaagtcttctgagggactgtgaagtgtgtgagccagccttgattcttcatttacatcttttctacctgcaaaaggacaccctaaaccattactgcaagcttgcagacagcattggggaaagtgtctacagcaacctttcaccagaatgcaatttacatattttaaggcatacatttcataattatggtatatatgtgtgtatagctatatattattgttatatatatggtatatgtacatattactctctctctccatatatatatatatatatatatatatatatatatatatatatatatataccaacttaccaacaataaaaatcccgttagtttctcatcattacctatgagaactataaacccaagtttgttgttgagggacctgtgaggtaggtgcacagctctgtatgcattcctctgtatagaaaagtttaaggaacagctgactgtatatggctcaattagttaatcatgatgaaaatgtttgcaaatgattagcatgtatggtgttctttctgttagctttgaa

SEQ ID NO: 475208 - DNA, 752 bp, Homo sapiens
ctaggagcatgagaatgcctctcgctggagcggttcttcagccaccttgaatctgtggatggtacctgtgactgattggaacacgatccacctaatcaagggacactttggagcagcagatgtggagcaccctttcccgccaccgtgcatgagtgacattcccactcgtgaaggctccctctccgtcttgcagccaagggagcatgcgtggtactggccatatgagctctcccttgaaaatggtcacatagggaaaaagaagcaagtaatgttctcccctgacttgtgctacagtttatacgatgtggaggtgaagagtagtgtggattattccattacttatacaaaaggcttatgcaccctcattggagtccgagagcccccgagcagcttcactggaatggattacattattgggaagattctggagatgcaaatatactccatagagttcaaatgagtctacagtgaacagtgggagtgaccactgtgtttaaaattgtgactcataccgtatttcattaacattatttttcagctttaacttagtcaatcttgattatcctagatcagaggtccctcaagttacacaatctataactaataaaggtaattcttaaaagaaatattatttctagaatcagaagtagaatgtcagcggtcaatacagaatgccctcttttcatccagagttggctctaaattgtagctacaaaaaaaaaaagaataatacaagacctgaagtaaaactc

SEQ ID NO: 475209 - DNA, 1111 bp, Homo sapiens
cgttcgactttattgctgtttcacagctcactgggcgtaccagagagcatgcagaggggtgggtgggtgggagcgcaggcccccgtgcccagaagcactgcctggcggctggcatctgggcttcctgggaagcatgcggagagggatggacccacagcctcaactgctccagggcaaggtgcaatgcggaaagacatggcagggtacatcgccataactcacaaaggaggggagtgcactcccaaatctgcaattctttggctgctattggttgttgttgctgctgcttgcattctctggattaaaatgaaacacacgttccaaaccgtgaaaggaatcctggaactcactgctagcttccagggaaaggacatttttcagccctcggagaatctgagtgcggacaactcactggcagaagatccgcattttgaagcatcatcgtgcatgcagccaagagcaaagcaaacagcgttttgccgcctaccagccttttgattctgcaatagagcccgatggattatggccctctcagcctgcaatgccataatactttatttcaacatgatatgacatcattaaagacactttatgttgtttttgtctgtggtttggaattatgtctgcttaatcaattccattatgcattcaacttccatgacacgtcaaaggctgataaggtttttattttttttaaactttgcttgcttaaaatgatttccctccagatcaagatgcagagcacaaaatattaatcagtttaaataaatatcaagactacccaaataatatgaataattggcacgggatcgtgcctactgcccagttcccagcagctggtcacgctggcacgaggctcctctcaacagtctctgagataatgactttggcatctgctgacgagtgcttgtgactgcccacagaatttacaactcacaagtggaaaacagaggctccgacagaactgttttatgcaaggtctttgaaatttattaatgtaatgcaaacacgagccttccaacccattaaattgttgatgttatgcgagcccactctggaattgcagatcctcattagcattatttgcatgttaatctgcatctttttaatt

SEQ ID NO: 475210 - DNA, 541 bp, Homo sapiens
gaagctcggccagctcatgaagaagcaagcagagtgggctccacttcacagaggctggtgcatccagatgagcactcaccagagctgctgcgggtctacaaaaaccacagaagcctctgcacgaggcagtttagaaagaatcacaagaaatacctcaagaaatagacaggctgttcctcgactccacagctgggatgatgggcagagacagaggcaagggctggccatggtggcggtgatcgtgccagccttggaggaagcagccttgcatagagatctggagatgaagggtgtgtacgctttcccagtgaacccaccctacggcagagagacatccaaacgccattcctatatcaaactatgttctatgcttgctggcttcattgatcagaaattccttggtcaattctgcatgatggtttaaagatcaattcaagaaaatgctatagttgtagcatttaaggcacaaggcatttaagattaaaactccatgagttgagaggaaataatgttcaaaattgaatacgtatggcagcatgga

SEQ ID NO: 475211 - DNA, 551 bp, Homo sapiens
tgtgcactgtcctcattgaaaagttgatgaaatggctgtgcactggaccgttaaatgtatatcagccgcatgtgtgtccccccgtgggtgctgccacgtggccaggacagaagggctccggggctctgcgggaagggggccagtggccctgccctccctcccatcacaccctcccacagaagaaatgcacacacctgcaatttgcttttgcattttctcactgtcgtgtacaagagaagatggtccctgaagctcatgagaggggacagaagagcctctgcccatggatgctgcctgtgccctgggagtccccagcccttccagggccctgggacagagtcaggaggcaccagggatggaggacttgaggcctgcagccgcctgtccttacttgttgaagaccccattcttcaggggccagtcccgtatgcacttccttctccagagtctcccagacagccaaggaagcatacagcatgggagcaggacccaccacggcctggctgagtgtgtgcaccctgccagctccttcactcctccaggggcatctg

SEQ ID NO: 475212 - DNA, 568 bp, Homo sapiens
tccatcctctgccctcttcttggtgcctgaccgccaccgaccccagggtacccaaagcttacgttacagatgatgaaaccactgctgcggaagatgccttggctaatcaagggcacagggaccttcagtagcagcgtggcccctgacatccccacaccaattcccagaagctggctcgacaccctgggcaaccccagagatgctgccaaagtcatggattcctgcagggctgaaggagctgcaggcaggcctggtgcttcatgcaggggcagcctgagcaccaggaaggcgtggagtgccagagttggcctgtgtctgtcccaagcatggggcctggaccggagttggcctgtgtctgtcctgagcgtggacactgggccgggagccgagtctgtcccgagtgtggacgccgggccgggagccgagtctgtcctgagcgtggacgctgggctgggagctgtctcactccatctcatgtggtctcaggggtctctcaccacatgtgccctgacatattagggtgtttagggagcagcaatgcttacctcagggccactggcccctggtc

SEQ ID NO: 475213 - DNA, 852 bp, Homo sapiens
gggcctggtgcatggtctggctgtggctgccctgcatggaaggtgctccccaagtgtctgcaggacacagcactgatgtaggaacttgctgcagagagcagagggccaggctgctgtgaatccctggggactgagagatgggaatgacacgtacccaggcaggccgtgggggcatggtgtgtctgcaggtttctccccgaatctctgggacctgcaagaggacaggcacagccgtcagcggctcagcccgacccgcaagaggacaggcatggctgtcagcggctcagcccaccgtggctctctgggcagctcatcaaggcaatcctgcttggggccgacatgattttatagaggagaaactaaaatgggtggcctgcatggagatggagtccccaggcacctttacagagagcgcctggtgtcggaagccaaacaggagagtcgggacctgcccactgcttcgttcggccttgaagccctgcagatgccagaagaaaacacacactggtgtgtttcactcactcatcttggaggcctccagaaccgacctgaatcacgcacaacacggtgaatccaagctgaagcgggcagctccccgctacccccagagcacacgagactggctccgctgccgggtctggcctgacacacctgccgagccggcctcttgctgccttttttaattttggaagcccaggtggattcccacatccccacatttacattttcttctaaaaatggaccgccgtaattatatgttaaatatgattcaaatctgcagggaactgtgactcaataagcatggaaaaattaatgaaaagcttaattattataataataccattaaaatct

SEQ ID NO: 475214 - DNA, 1572 bp, Homo sapiens
ctccctgtctcccctgctccaccatgaaaggacatgctgacatatacataaagagaatgttctggaatgaataccaggccgtgcaaggcaaaagagcatgtgcaggggaactgccctttataaaactatccgacttactcaccatcacgagaacagcatgggaaaacacgctcccacgattcaattttttccatctagtctctcccatgacatgtggggattattacaattcaagtcacctgcagcctcaaatcctggataatacccagaaggtgccccagcccttccagctgatatccttacattgctcaagagcagaagctgcagggaatgcaagccctgggtgcaaacaccgccacgtcgtgtgtggctcccagtgcctcttccagtggggaaactgatccagaccaggctgggcaacgccagggcctgtttggtctctgaccaccccatctcccgctcccgtgggcgctcggggttagcaccacattccttaggcttcctgtctcctcttcaaagggtgaaatgtggccacacactgatccatgtgacttcttaattctcctctggggcatccttttcttcaacagatgttttcaaaataattaagtgatggggatcatgcattattgaaaatgctggatgcctccctaatgttcttcacatttgtatatttgtcagcacaaaattgagtgcttggaaatgttgtgcttatttatttttcaaattactgaacactcaccctagccagctgaggagaggagaggggagcggtggctccacaagctctctggttcctgcagatgttccacaatcaatagtttagggaatcgtgaagtcctgtaggatttgggagctaagaatcctttaaaagactccagctgatcacccatccataaaataatccctagaattagggctatttatttcttttaaaagtttcaggaatttcacattctctattttccgatattaaaaaactcttggtctaggaaaatgtcctttttcctagatatatctgtccggtatctagaatctttaagtccggttcacctacggcccttactgtagccttggaacttgcttggggcaaatattacatttctggaggcgccccagttattttcatgggattctagattgccatctccctttgagagcatatttttggcattggcgtttattgttagaaaatatttgaactggatgcagcaagtctgggctgatgacctgcagtttttcacttcgtgtctcagatctgcttggtagacactctctgaggtcacaagtgactgaatgtgtcttatgataagatgctttcaacaaggtaggcagattctcatgcccataagagctgttcggataaaagcatatctttctaaaagggaattttctggaaaaatacattgttccagaatcccttggctttgaaggtgaaaagcttgcctatttattttttccacaaatatttacagaatagtcacctggtagcagggtctgtaaattcagccataaatatgacaaaagacaccccagctttcatggagcctgaacagatgggaaaaggcaatc

SEQ ID NO: 475215 - DNA, 1150 bp, Homo sapiens
ctccatcttctgtctctccagtgccaggacaccaggctccatgctgagagctgcaaatacagttgccaacagggtgcaaggagcctggcccccagggcccacattcctggataaggtgggagcaatccactggccccctatgcacagatacctattgaagcctgctggcactgtggctgtggctgtggctggcactgtggctggtgctgtgactatggctgtggctggttttgtggctggcactgtggctgtggctggtgctgtggctggcattgtggctgtggctggcactgtggctatggctggcactgtgactgtggctgtggctggctctgtggctctgactggttctgtggctgtggctgtagctggcactgtggctgtggctatgactgctggcactgtggctgtggctggcactgtgactgtggctgtggctggctctgtggctctgactggctctgtggctgtggctggcactgtggctgtgactgtggctgtggctggtgctgtggctctgactggccctgtggctgtggctgtggctggctctgtggctctgactggctctgtggctgtggctgtagctggcactgtggctgtgactgtgactgtggctgtggctgctgctgtggatgtagctggcactgtggctgtagctggtgctgtgactgtggctgtggctgctgctgtggatgtagctggctctgtggctatggctggcactgtgactgtggctgtggctggcactgtggctctgactggccctgtggctgtggcttggcactgtggctgtggctatgactggtactgtgtcttggctggtgctatggctgtagctggcactgtggctgtggctgtggctctgactggccctgtggctgtggctgctgctgtggatgtagctggcactgtggctgtagctggtgctgtgactgtggctgtggctggtgctgtggctctgactggccctgtggctgtggctatgactggcaccgtggccgtggctgtggctggtgctggtgtgatcgctgtcaggggaaggcaaggactggagtaggaagaaatggagttggaaatggtattttaggaacagtggctctggagtaacttccttaaggagccatgtgaaggaagggagggaggggca

SEQ ID NO: 475216 - DNA, 587 bp, Homo sapiens
ctatacctctgcatgtactgagaaccagagccaccacagccttcacaactggcacaccaaaaccagcatgcagatgaaagtctttttgtatgaaagccactctgtaaagtttacaagaccctcagctgcaggtctgttggagtttgctggaggtccactccagacgctgtttgcctgggtatcagcagcggaggctgcagaacagcagatattggtgaacagcaaatgttgctgcctgattgttcctctggaagttttgtctcagaggagtacctggccgtgtgaggtatctccagctgcgtgctgggagaaccactgctctcttcaaagctgtcagacagggacatttaagtctgcagaggtttctgctgccttttgtttggctgtgccctgcccgcagaggtggagtctacagaggcaggcaggccaccttgagctgtggtgggcttcatccagttcaagcttcctggccgctttgtttacctactcaagcctcggcaatggcgggtgcccctcccccagccttgctgctgccttgcagtttgatctcagactgctgtgctagccatgagtgaggctctgtggcc

SEQ ID NO: 475217 - DNA, 567 bp, Homo sapiens
cagaggattgggagttagagctgcccccaaaggatatcatgggtattcggcatctggtaaagctagcatttcaaactagtggcaaagacagaacagggacagctgggaagcattggggaaaaaatgaagttggattcaaaccacagcccttacaccaggatgaatgccagaatggcaaagatcctgagtttgatccacgctgtggtggtgacagcatggtggggaaagcactcttccccgctggtggggtgttgacggacctcacctccagggaaggcagcgtgcggtgtggatggacgtgcacgtactctttgccgcagcaattctcctctacgactcggctcttaagacgtgagtctgccgatgctcccggccgaataaaaacctcttccttctttaatccggtgtctgaggagttttgtctgcgacttgagaccagttatatcggattagggccctaaactactcactccagcatgacctcggcttaactaaatacatctgcaatgactctgtttccaaataaggtcacattaggaagtatctggggttaggacttcaacatac

SEQ ID NO: 475218 - DNA, 514 bp, Homo sapiens
gtgtaggctgcagcctgccacttctttcaaagagtttgtggtttctttcagttttccttccctcctggctctgagctaatctgactggatgcctcacttccccctctgtgctgccatctcaagctttcatgcctcagagtgtttcagttgcttcccttctggattccagcatttcttccctacacgctatattcaatgtgtgattacctacgtgctgttttggttcttccttgtggaggagtctttgcagactggatttgtctgggaaacattttcaccagtcatctcatctagagattttagcaagggtctctgtgatggtctgaggtcagcgttgctacaagagtcctttggcaggccagcctggtgcctgagtcagcagatccacagggatgacccggtgctggtgtgggccttgagcctgagtctgcaggggctggataggcacaacgatggctctggcatctggatccactggaatgggcctggaacctgagcccaaaaggactggcct

SEQ ID NO: 475219 - DNA, 552 bp, Homo sapiens
ctggacacaagatgaaaatgacttgtcagggattttcgtgctcctgcttaaaatggggaagaggaggagggggagagacagaagaggagggggagagacagaggaggagggagagagatagaggaggagggagagagacagaggaggagggggactttctccaccaggggtgggagcttgccattaagatcattcggcagttaatggaaaaatttaacttggatctaccaacagttacacaggccttcttaaaaaataatggtgagttggaggctacttcctccttcttagcggctggtcagagagctgatagataccccatttggtcccaacaaggtgacatagatctgcaaaaagatgatgaggataccagagatgcattggtcaaaaaacttagtgctcagaatgtagcttggaggattgagttttaaaagaaataattggcaagcacttttacagtttcaggccttatatttaagtctttattttgagtttatttttatacatggtgtgagggattctattgaatttgtacattgtttaaggatagta

SEQ ID NO: 475220 - DNA, 1405 bp, Homo sapiens
ccccatggctgatgcaacaagttaccacaaacctggtggctaacacaagtttattctctacagttctggaggccacaagtctaaagtcagttgtacggggtaaagtcaaggtgtcagcggggctggttccctctggaggctccagaggagaagctgctcctggcctctgccagctcctaagggctgccagcattccttggcttgtggccacaacctccagtctctgcctccctggtcactggatcttgcacaggggccgcaggtggagctgccggccagtcccgcgctgtgtgcccacactcctcagctcttgggcggtcgatgggaccgcgccccatggagcacggggtggcgctcgtcagggaggctcgggccgagcaggagcccacgggagtgggggtggggtgtgctcaggcacggcgggctgcaggtcccgagccctgccccgcggggaggcagctgaggcccgacgagaattcgagcacagcaccagcaggccggcactgctgggggacccggtgcaccctccgcagctgctggcccgggtgctaagcccctcactgcccggggccggtggcgccggccggctccaagtgtggggcccacccagcccgcgcccacccagaacttctgctggcccgcaagcgccgcacgcagccccggttcctgcccgcgcctctccctccacacctccccgcaagctgagggagccgtccggcctcggccggcccagagaggggctcccacagtgcagcggcgggctgaagggctcctcaagcacagccagagtgggcaccgagaccgaggaggcgccgagagcgagcgagggctgcgagggctgccagcacgctgtcacctctcaatagcttcctgcaggctcaaactgctgggctcaagcaatcctcccacatcagcctcccaaagtgctgagattacaggtgtgagccactgttagcagaacaccagcggttcactctgggacccactgctcaccgcacagagagccaacgactgggacgagtattgccaaggaagaaagctttaatcgggcgctgcagccagagagatgggagctcactctcaactccatctctgacctactaaaactaggggtctgtatattaggaagaaatgtaacaatgttcaagaaaataggaactgggatgaaatgtaacaatgtgtaagaaaacaggaacttgagagggtaagggagcaatcctgatggatgaggggcctggagtctcattgtctggatgtcatgatctgttctagccatgacagagaaacaagagttggattcagctttgtgttttaggcagcagtaatactgtagaaaatatatggagtaaaactacagaaatgtgactttgaaagaagagaaacacatgtgataagctccatatta

SEQ ID NO: 475221 - DNA, 611 bp, Homo sapiens
ttatcaaaggaaaaaaaggcagctagaaatgttgtacaatcttcttcttactttatttttcagcctgtcttttcagtccctttacactttcagaacgtacaatgttgatcacttcagaaatcccccacagttgggcactgagagtttgttggaagctctaaccaggaggctcggctgccgtttgccaccctcgcgggaagagcattcctcctccttccctggggaaagcctctcccagaaggttttgctgaggagcagggggaggacagggctacacagccaccccttctgccaaatctctctgaggaaacaagtggtgacagctcaggtcccccaaaacagcttctttcaatccaggactttctgtagaagaggtaaatgtgttcacttaggggacaagcaaccatacagaaaacaggaagatggatgcaactgctggaacattccacagatgagaacctcaggcagggagtcaggactcaaagctccatcttcaggcttttgtcttgaagtgtgattcaagtttttaaaatattttcatcccttatggaaatactcattaattttttgggaaaacttgttttaaccgtgagcactgaggagataagttc

SEQ ID NO: 475222 - DNA, 634 bp, Homo sapiens
ctggagggtgatcatctgaatagctccaagtttctctctctctccctttatctggctctctcctcttcaacattctgtcctatgaactctaataagagggactactgtaataatggtggtagtggtagtcgtagggatagtagtaacagttacatctgcagtagtagcagtagtagtgatactgacaataacaatagcagcagtaataatagtggtagtcattatagcgaagacagtagtggcagtaggagcaatggtagtaggaatagtggggatagcagtagcaggtgtagcagtagcagtaatagtagtagtaacagcagtagtagtaatagaaatagtggcaaggatagtagtaacagtgataatagtaatagcagcagcagcaacactagtagtatttgtagcagtagcagtagtggtaccagtcccttcattgcttggaagaattcacaaaaattggacatatacatcaaactaaatttttaccatgtgaatttcatgttccattttaaattttatcccaatcatctataaataattctcttagagattcagtagcgacatatctattttaatctatatttgaaaaccctgttgaaatggttcattctactataatagcactttatat

SEQ ID NO: 475223 - DNA, 612 bp, Homo sapiens
gtgttgtgttgtgggagggacccattgggaggtaattgaatcatgggggcaggtctttcccatcctgttctcgtgatatctcaggtatgttgttatcagcagtatgaatacagactaatacagcaggtctttacagattgcgggctagagttctgttttcacatctgtgtccttaaaggagacagaagaggagaccaagagaggaggagaaggctacatgaagacgaaggcagagattggaataaggcagctatgagccaaggaacacctggagccaccagaagctggaggaggcaaggaaggattcttcctagacccttcagcaggcctggccctgctgatgccttgatttttgacttccaggctccagaactatatttgcccttttggagatctagacttcctttggtatgtggtcaacagtcccttgaaggtgtatctgtggctatttacctaaatacacacatcagatagtgtcattcatatgttggtaattaataataaatatagtagaacttgtttatagaaccagggtaataggcatgatgggcaatacatattacctgaggaactgtaacctatttagcatacttaggatttgtccagttatcc

SEQ ID NO: 475224 - DNA, 667 bp, Homo sapiens
actgttagaaggaaaactaacaaacagaaaggaatagcatcagcgtcaacaaaaagcacatctacaccaaaaccccatctgtaggtcaccatcatcaaagaccaaaggtagatgaaaccacaaagatggggagaaaccagagaagaaaagctgaaaattccaaaagccagagtgcctcttttcctccaaaggatcacagctactggccagcaaaggaacaaaactggatagagaatgagattgatgagttgacagaagtaggcttcagaaggttggtaataacaaacttctccaagctaaaggatcatgttccaacctatagcaaggaagttaaaaaccttgaaaaaaggttaaacaaatggctaactagaataaacaatgtggagaagaccttaaatgacctgctggagctgaaaaccacagcacaagaacttcggaagcccatcagactaacagcagatctctctgaagaaactctacaagccagaagagagtgggggccaatattcaacattcttaaagaaagaattttcaacccagaatttcatatccagccaaactaagcttcataagtgaagaagtaaaatactttacagacaagcaaatactgagagattttgtcagcaccagacctgccttacaagagctcctgaaggaagcactaaac

SEQ ID NO: 475225 - DNA, 607 bp, Homo sapiens
aacaattgcccagggttctgtttgcacctggagatgaaacggttcaagaaaattggtactgaggagtggggcattgctactcttgaaatggtacagcagtttcagatacttgaaaatatggaagtgtctttggaactgggaatgggtagagagacctttgcagcatccccctttcatcacaaccccaaagtcctaggaggacagaatggtttcatgagccaggcccaggcccccactgacctgtgcagccttgggacactactccctgcttcccaactactcctgctccagtcctggctaaaagaggcccaggtacagctcaggctgctacttcagagggtgaaagccataagccttggtggcttgtggcttccatatgatgcttctcaggggaaagtggaagaaggcagcatgcgttttgctttctttgtggtcctagggtccatcatccccagggtggagagtttctttccagttgaccttctgattgaccaggggaggaataaagtgtagggtgtattgattggttttgactttggagatatgaaacaaaggtgctttctgctgatggctaaaactaattacaacacaggaccacagggctttc

SEQ ID NO: 475226 - DNA, 580 bp, Homo sapiens
tgtcacctttctgattctcagaaaattggtactgaggagtggggcattgctactcttgaaatggtacagcagtttcagatacttgaaaatatggaagtgtctttggaactgggaatgggtagagagacctttgcagcatccccctttcatcacaaccccaaagtcctaggaggacagaatggtttcatgagccaggcccaggcccccactgacctgtgcagccttgggacactactccctgcttcccaactactcctgctccagtcctggctaaaagaggcccaggtacagctcaggctgctacttcagagggtgaaagccataagccttggtggcttgtggcttccatatgatgcttctcaggggaaagtggaagaaggcagcatgcgtttagctttctttgtggtcctagggtccatcatccccagggtggagagtttctttccagttgaccttctgattgaccaggggaggaataaagtgtagggtgtattgattggttttgactttggagatatgaaacaaaggtgctttctgctgatggctaaaactaattacaacacaggaccacagggctttc

SEQ ID NO: 475227 - DNA, 480 bp, Homo sapiens
tttctcaggccaatgttcttggatgaatgcacgctgctgactctctggaaccctcatttggtgacacatgctattttcatgaaatggtacgtttatacgcacacttcccagtataaggagagcagttggccgcttaatgttcacggcaaccagggagaaacaactacttacttgaatcttttctcgtcctgtccacctcctcatggtgctcagagttccactgaggagagggagccagaaggcagtgccaaggctgtggaaacagattctgtcacccctagagctggcatcaggcatacgagatcctccgaatttaaggacctaaagtccttatgtaatagcctattaggctattttataaggctatataacacatctccaccaaggaaaagggtctgggcattattagatacttcttgcaaagggtagagaagatttcttgaatattttaaccaatccttatgctatggtttgaatgtt

SEQ ID NO: 475228 - DNA, 675 bp, Homo sapiens
caatttacattcttggcttgtcagcaagactgagaaccataaagtttctgccttccttatgaactctattgaattggcctttgagacccaggcctgtacagaagaggtgtttgtccctcctgatgacggaggaggcctgtgcccctgccttggcccccagatctttcctccaccagcaagcaaaatacaaggagccagtatcagcaccattgggtccatcctgcggtctccccacatgcagaggactcttatccacacagtgaggacctcactttcctctgttgctcctctggtcttaccatcagcactcagagctgctctgtacagttgtgcaggttgtgcattgcacaatggtgcccattgccggcagttaccactcacatcacagacattgcggatttgtgaagctgatctacttggtaaatactatcttcttgtcgttattgaagaaattctctcatggttactggaggaggagtttgctgaccctcagtccggggcagcacaattccaggtagttcacgggctatgccagtccaagaactctttgttactttctgtggtgagataagtgctgaaatggagagtgtttagaaacttttgtagcaacttgatagagtaattttatatccgttgaagctaagggcaaaatatttacctgcatatgtacatttt

SEQ ID NO: 475229 - DNA, 550 bp, Homo sapiens
gcaggtagtagccgaataaacaggaggctttagagccggtcctaaatttgatgttcgtttgtaccagtggaaatcaacgagaacttgcccgccagaaaaacatgaagaaaacccaggaaattagcaagggaaagaggaaagaggatagcttgactgcctctcagagaaagcagagggagagcagagcgaggcagctgatcttccggattgggggccttgcccggaagctggacctcacggagatgaaacggaagatgcacgaggatatgatctccatacagaactttctcatctacgtggccctgctgcgagatgttgcaacttttgccactacaaacaattctgcgatgtggattatcgtacttattcccatttattggtgctttcatttctataagaatggatttttaaagatagaattccttgggaatagttatgtcaaagccaaatataatatagagacaaatctctaaaaacattttatttgatatttcttgtatactatatagaagccaagggtattttgggggaagagctcaaagttcctttc

SEQ ID NO: 475230 - DNA, 1904 bp, Homo sapiens
gctcccctgtgggagattccccagcactggctgtgcacacccagggagcctcacggcccagacctgggcagcacgggtaggagctgagagcatcctcacggcagcaggcagaacaaacaagtgggcctggggctcacaaccctgaggcattgttgaattctgccaccaactcgaatcggatcgaagccagacccttctcaggtggaggcaacgaccgcacagccagacccatcctggaggtccctcgtgggactctgagcaggaggcagtcacttggcctagcagaacttctgacctgtgagctggtgtttgttttaaataccccaaattgtttcttcacactgtggaagcgagaaaattcagtgtgtgtgtttgtgtgtgggaaggggcggccgggagccgtgtccggttacggcgaaactggctcagcagaaacacagcagctaaaatctttgaaaggttctcatcgcagatccacaatcaaaccaccccagccggaacttctgcctgtacagctgctgtcacggagcagacttgaatctcacccatggagaccggcaggcaaacaggtgtgtctgctgagatgctcgccatgccccgaggtctgaagggcagcaagaaggatggaatccctgaggacctagacgggaacttggaagcacccagggatcaggaaggtgagctcaggagtgaggatgtcatggacctcacagaaggtgacagtgaggcctcagcctcagctcctcctgcagccaaaagacggaaaacacatacgaaaggcaagaaggagagcaagcccaccgtggatgcggaggaggctcagaggatgacaaccctgctgtctgccatgtctgaggagcagctgtcccgctacgaagtgtgtcgccggtcagcgttcccgagagcacgcgttgcgggtctgatgcgggctatcactggcagttcggtgtcggagaacgcggccattgccatggctggaatagccaagctctttgttggagaggtggtggaagaggccctggacgtgtgtgagatgtggggagagacgcccccgctgcagcccaagcatttaagggaggccgttcgcaggttaaagccaagggcctcttccccaacagcaactgcaaaagaatcatgttctaggcccacggccagagggcagggtctgtttgtgcaggaataagtaccgcgttcatcttccaatgacaggagtgtgtgcgccggagctcccgcatctcagtcccacctggatttacccacgatcttcgtgtcttaaaatgcgaagttgcccttacctggatgaagacagcagatcgcttcataggagccttggctaaatctttgggcattttaatgggatgtggaggcgtttctctatgtctttccagctggaggaatcaaggtgcctgggcctagagcatcctgtggacaggcagctgcattcagagagggaagcccttcccaggagatctgtatggtttcctgctgaagcctggtgtagctctgtcttagcttgtaggcttatgtctgggttccagtaattggagcttgcagaaatgtttccccgattgttgttcttctgtagaatttcaacgctcatatgtatttttgtgagtcaccacgaaaacagttaaactgatcaaccgttttccaaactgcagacaccaaaatgaaatcacaaagcactttctttttttcccctaagttgactcttctattcctgcctgctgtgctttatgtcagcaagtgaccctttcctgtattataatgcagtatagtatagatgcatcatgtaagaccagagagaaaccgattccaaaaccacctttcctcaagccgccgtttgtaacgaccatatgggcggtttgaaggacacagagagagcctattgacacttcactttc

SEQ ID NO: 475231 - DNA, 1404 bp, Homo sapiens
acagtggttcagaggaggcagcttgcttcgatagggaaagatccataatcaaaccaccccagccagaacaatttctgcctctacagcgctgtcatggagcagacctgaatctcacccatggagacaggcaggcaagcaggtgtgtctgctgagatgttcgccatgccccgaggtctgaaaggcagcaacaaggatgggatccctgaggacctagatgggaacttggaagaacccagggatcaggaaggtgagctcaggagtcaggatgtcatggacctcacagaaggtgacaaagaaacctcagcctcagctcctcctgcagccaaaaggctgaaaacagataccaaaggaaagaaggagaggaagcccactgtggatgcagaggaggctcagaggatgacaaccctgctgtctgccatgtctgaggagcagctggcccgctacgaagtgtgtcgccagtcagctttcccaaaagcacgcattgcagctctgatgcagtctatcactggcagttcggtgtctgagaacgtggccattgccatggctggaatagccaaggtcttggttggagaggtggtggaagaggccctggacgtgtgtgagatgtggggagaaatgcccccgctgcagcccaagcatttaagggaggctgttcgcaggttaaagcccaagggcctcttccccaacagccaactacaaaaaattcatgttctaggcccaaggccagagggaaagaactcaatgctttgagtggggtctgagtaaagctgaactgctgaaaacagaaacaagttcccatcaagatctcagaggtcagctcaggagcagcaacacagcgctgtttctcaaagagaaaaaatggattagctgggaaggttcagtgtccctacacattcaaaatcttctcactatgtaatatcatatagccacagctctcgagaaaggaatctgtagaaggtggtatctttctaggcaaaatctttgttagctttcatggctggttgtattacatgttaatgacaataaagtttttcctggagcttcatcactattcttaaagtctatctgataatgtgcctttggagactgcctagaaagatgtggtgtctggtaaggtggtgatgaaatttctaacaagtaaagtgactgtacttgactattttcaaaaattcaatattttgggataagcttaacatcctcactgcctgcctttgcccccacaaaagtacttagcatatgcccaaataaagtttaagcaatctatctccactattctcaagcacatgatatctagggtctagtctttaaaagtacaaagcaaaaagtttaaaagtataactcacaaaaagttgtacccagactgaaaaagctgaaatgataaattgatgggtttgtgttttttac

SEQ ID NO: 475232 - DNA, 634 bp, Homo sapiens
atctggctaagtactttcttctgaattcctatatcatttccagaggcatactttcctgtctgtgtgttaaacaacatggggaacaaccccaaaaacccaaacaaaagtgtcagctactcgctttggggccgacagcttgctcttcagggctctcttcaaacgtctcaccccactccccttcaatccactcctgttatgtcagaaactctgcccaggcccaaccatttccccaccttacaatcacccagacccccaaactctcccccttcctatcccccgaggtggggggatgatggtgaaaatttctaccctctaatcatatgcttggttcctctggcaaccaaaccagcccccatcctgaggcaatccaggggtcctgccaagagccacttcactcacataatcccagatttactgactcaccggtgtatccgcagtagagatagcagacgccaaagacatccactggggaaaacctgtgaaaattcataaggtcacaagtctttgtgcagattctcttgggttgcagagaggagagatttggaattctctttgaaagtacagcttagtcatagatcacaagcaccagcaagactaatattttaaattatatgtttattcttgatactgaatg

SEQ ID NO: 475233 - DNA, 692 bp, Homo sapiens
ggataattttgaaggtagctccacatctgttcgtcacagcaccatttaaaatagcaagaaatgataatcagtctaaatatcaaaccatacgagttagttcgaacaataagccagaaaaaaaaaaagaagaaacaaatgagagaactgcaattattaaaaagcgctgagaagaaatgttcggggaatgtggtggagggtgatgggagaggaatttgccgcactggatgggaaggattttcggaagagaagtgtgcacactgctggtctgaaagcgaaagatcatccatctctcataggattcacaagtcaatcattaagcaagcatttactgaggaccgatatgatgtgccaggcacagttccaggcaccgtgaacccaaagagttctccaagatacattcctcaggtaaacagaagaccttccagtcaggcaagatgtggaggtgaagacagtgatattgatgatcctgaccctgtgtaggcctaggctaatgtgtgtgtttgtgtcttcatttttaataaaaaaagcttttaaagttttaaaaaactgttcttaatagaaaaaagctgatagaataaggatataaagaaagaagacacctgtacctctgcacaatgggtttgtatttttcttgttttgtttttacactcctgcccctcccccaggttctgtgtttgtgttttaagctaagc

SEQ ID NO: 475234 - DNA, 664 bp, Homo sapiens
ctctcctcctcaaccatcacctccaccatcaacaaagaccaaagccacttttccactgtcatgacttttttaagggtatctcatcagatatgcttgagaaggcaaatgtatattttgcaatttttggaccgtactgtctcatgcgtccacgtgaagagaccaccaaacaggctttgttcatgatatctccagtgatgcagtcatctgaaggctcaccagaccagaggatgtgcttccagggtggctcgttcacacgagctggcctgtccactgggcagcttgagtgtccacccaacatgggcctggctctccccaaagtgagggatccaagagaaacagcagacagaagccactcttttgacacagaaggcacgggtcatctcttctgccataccttatttgttagaagtgagtcacttaatcaggctgcacgttcaagggaggaaaatcagactccaccttttgaagcttccttccaaaaagtttttaaatattttttgacatatttaaaaatcattacaccatcttatatgttccttccaaattcagcttcctaaacaaggcttaagttgattcagctccctgatcagaacatgtaagtgaattaaagtggaaaaaaacaagtagaaaaaactcttcttgttctagtgaatacatctgctgc

SEQ ID NO: 475235 - DNA, 608 bp, Homo sapiens
agctgaattagttccccattggctctgaggaagagttcaagccatgggtgaggccttccttgggccattttttttgggagttgagctgtatgcagaacaagattatcctgtctgccctaagcagctgtggctcaggaccaaacctggtgaagaggctgataagagggactgcctgggcaatgagctcttaacatcgctgtgtgggacaatggatttttcaagaagcccatttcaaggaagttataaatacaaccttccagaggctagaacaaaagaaaagccagagtctgtcatgaggcagcaaacagggaatgtaaagcggcctaaccaggccgtgcatcaacagggtgtgcatgggcttcagagagcaggcacccctctacttagaggcagctggaagactttgggcaaggcagttgatgcctgtgagcccccatttccttattgataaaacaaaataagaaaatacctttgtttctggtgtatttagaggaattaagaagcaaaacagcatggcatagttgttttttaatggttgcttttttccctggctaagatctccaatacaatgttgaatttttaaaacatcattttattttacctcacct

SEQ ID NO: 475236 - DNA, 1313 bp, Homo sapiens
tccagtacgaggcagtacatgcagcgaccgcaaccctttgagacgccatccgcactgcaggcgcctcgtgcacttagcagtaggatcaacagaatagtgggcgtgggtgaaaaacaagggatgggagcgcgcccaagggccaggcccaaccacgcgccggctgcaggcgcagggccccacctaccacctgcggagacccacgggcacggactaccactccagccctcctgcaggagcagggatgggggtgcccacagtcaggcgcaggagaacagggtagaccagggaggcaggatgtgcagccgggactcacaccccaattctcctcgccagagacagccagcagtggacaccgaccaagacgataaagaaaatcaaggggctaagacccaaggtgagcagccgcctcaacatcaactaccgacacagacacccagaaaactctaaaccacaagatggcaaagagacaaaagcaatccatcagctgagaatccggctcccaaggctgattgagatttttaagaacttcatttttaatttgtaataaaagtttacgacttggttttttcaaaaaagtcaacaaactgtaaggacctgttaattaaagtcttaaataattttttttaaaaaggcttctgagaacctgtgatctaggttaattgtcctaggccagagaagtcttaatgaacagtgacttcaaacctgtgactatccagaagaccctcctctgacctttctctaggccatggaggctcagaactggacatagtgcaccacatggaatctgacaattcactgggttcatcattttccttcttccggaatttgatattctattaatactgcctgtgattgcattagtttatcctttggtgtgtattcactttttgtccaagacttccaaatatttttcaaataaactgttttcagacccttcttgcctgcatcttatgcttacgtaagtacttttttttcctaccttgacacaggactttatagttatccatgctaactttcatctggtttgtttttatattgcatcagccaaagtaatttttttctttttgaaataaatcttttttattgttttttaatgaaaggaatatttgctcattacaaaaatactatgaagtgcagataaacaaaaaataacattaaaattttattatgccactcacccacagttaatcattgtgaatacttcggtgtatatctttctagaatcttaataaatatctttctaaattatccataaacaaatttccacacataaatgacccatagcagtaatttttagattcagtcttacatct

SEQ ID NO: 475237 - DNA, 773 bp, Homo sapiens
tagatattaccctgttttatactgagaggacccaaggttcagagagtgcccgaccatttgaggaaccactcctcagggtcgcaggagatcagaccctgcaggaacttcacaatgctccttgtgcaacctatggtcccatccctgcccacacacccatcctggctccacctccaaggcttcatcctcaatgtgaatcatataagggatggggatgatcagggagctgatctcgatgagctccttcaggttacaagccagccctccctacagagctgcagcctctgcccctccctttttgtccttaacactggctctgtctgttctgccagccttgtcaaggacagcccctgcaatctgaccacacagcagctggtagggcctggggctgcacttgacatcctgatccaaccatattctcagagagaaaacaggttgggagttccgcatgcttgcacacacctgcacatatcatgcacacgctcacactctcaatgtcagcctagactagagaagtggttcttagatttcttgggtcatggattatctggctgtaatctcctcagaaaaaaagatgcatatacccaaccctttgcacatcccatcaagagggcctgggataggggtgtccttcctgattcctgccctccactgtaaaacttgcccagggagtgggactctaccaagaagatgttctctgggaagatgcactgagtttgggcactccccaggagtagtgccagtggggctgggctgaggtgcaagaggaatcagaa

SEQ ID NO: 475238 - DNA, 1012 bp, Homo sapiens
ccccactacccccatgggtacagcagttgattggatgggggttcccagcggaactgcttttgcatattcaaccccctgggggggaaggggtagctgcgttggtcagtgtggcattgctgcctgggatgtagacattctggcggtagtcgggcacgtgctgcagggtgaactggggtccgtagcgggcgctcaatcccatggtgccggcaccccctcccagggtggagctcccatcagcagcttctgcagagacagaggaagatcagacctgccgaaagatctggagaaactacacaggtttgacatccagtccgtgggcatggtggctgtgagatgcaccccagaaccccaggtctcccactcttccatacacacactgacaccacttaccactggcggacgccaagatcatggcttgcagcatctctgtgtcaaactggttgttgggccaggtgccggtgtcatcgccattttgggagctggggagagagtaggatgaggactgtgaaggtgggaaatggaagagaatgttccagagctagagaaaaagtggggacctaggaggtacctagggggagatgtaggaggccccaagagaccctggagcagggagaagaaatttctaaaattcaatggcttcctaagccctcagagtaaaatccacggccatagaagaacctgcccctcctattttacaagaatccccaccccccgccctcaaacactctatcatcaaaccttttccaaggtaactgtttggcaccatctggctcagagaagtttttcaataaatatttgttgcctaaatgagtgggaagagaccagcagagacagttaagtgactgtaaggtaagaagaagggtttggcaccatgggaaaggctgtagggtaggccttgaaggcatgaaaatgtctgtgtgtgtgttgcgttgtgtgtgtgcatattttgtcatggtgggtgagcacaaccaagaactgctttacaatttttccaaggtctgtccctgctttt

SEQ ID NO: 475239 - DNA, 896 bp, Homo sapiens
cgaagctgtatcccagcacagctttgctctttgctgtgacagggtgatatcccagagagtttttacatggcctcttggcagagaattcagacttcctactcaaatcttggagatccaagtgatggaggcagaagctttgactggactctggggctaggatcatggtggtggtctagcccgggtagaggcaatgccaagaacaaagagtggctcctggtcaccatcgtgggctgcctggtcaaggacatgaagagcaagtctttggaggttatctatctcttctctctgctcatcaagaagtctgaggtcattgactcttttccggtggcatccgttaaggatgaggttttaaagattatgtcctgcaaaagtagatcctcattggccagtagaccaggttcaaagcatttgttgccattggagactataatggccacattgacctttgtgttcagtgatccatggagatttttaaatatgtcataccactctcttctagcctttaaggtttccactgaaaagtctgctgtcagatgtactggagctctcttggcggcattgggttccaatgcaaagtcccagattctctctccatgccatgtgactgttgctggcagggatgggccaggggtggcataagtggttcaagactttctttcctaccctcttcagtgtctctttcctttatattatgttaaaaccagctactccggctcccttttggtgtctatttgcatggaatatctttttccacctcttcaccttgaatttatgtgagtccttatgtattagtgaaaatcagcaatctttgtaagatcacacagtttgtgacggtgtctatatatcttatctttggagttatctgctttctaggccaaaggcctggaaaaagggaa

SEQ ID NO: 475240 - DNA, 2647 bp, Homo sapiens
aataagggagtcacaatttacccaggctgggaaaattgcctgaaaaaaacaaacaaacaaacaagtaggacacagtagcctggaggcataggaataaaaagcggtttcacgggccaggcccagggtccctgtgctgtgtgcagcctggggacttggtaccctgcatgtcggctgctccagctgtggctgaaaggggccaatgtagagcctgggccatggcatcagagggtgcaagccccaagccttggcagcttccacgtggtgttgagcctgagagtgcacagaagtcaagaaatggggatttggaatctccacctagatttcagaagatatatggaaatgcctggattcccaggcagaaagctccacacagagtccctactggggctagtggagcactgcctggtgcagctgtgagaagagggccaccatcctctagaccccagaatggtagatcttcccacagcttgcacggtgcacctggaaaatctgcagacactcaatgccagcctgagaaagcagccaggatgggggctataccttgcaaagccacagggatggagctgtccaaggctgtgggggcccacctcttacatcagtgtgacttggatgtgtgacatggaatcaaaggagatcattttggagctttaagatttgactgccccgttggattgtggacttgcatggagcctgcagcccctttattttggccaatttctcccatttgaaatggctgtatttacccaatgcctgtacccccattgtatctaggaagtaacttacgtgcttttgattttggaggctcataggtggaaggatgaatcacaccattacatattaaaacctgcatgttgtattagcctcttggacaacttttcattttgttagtactgccccaacaatgtgtgattttaaagttaggaaacccaactttgaattcatatccagaatctactacctgcatttcctgtgggaatcccagtttccttacttttaacttgtgcaaattaaaaaagataatgctagggaaacatctagtgaagtataggttttaaatggacattagttgcttttcccttcatctacctgtgcagatttgcaagcccttagacaacaattactctttgcacattgattatctccaactttataatgtctttgacacaggattcgaaaatgcaggactgctaaagactgctcaagctatacacttccctgtctagttaaaaattgtgtagtatgaggattagggacttgttattttcagttcacaaaggcatactatgtaagtacttacagaaaatgaaaaatgtttattttaatgatcatactaatggtaatcattcactgacagatgggcactgcatattttgtagtttcaaaacactgcctctttattcatttctacagccccaatcttagtaaattcacttcataaacataatcaagattattaagtaaccccactaggaaaaatatataaatttatatatccatactctctcttgtctctaaagaagacacatattccagccaaataaaacttctatacctgtgatcttgattttaactctctacattttctggaattttgttccagaagtaatccttattctgtatccagtctctcaactctgctatcacagaaactggatcatcaataagtgactaatataaataatagattaaggtagcaaggtggcaaagggcatacatgcatcttatgccagatttcttgcttttattaccaagttttaatcaatatgtacaaattatatgaagtaagaattacaaaatatgtacattcagcaaatttgaattgaatatatctattcaatttctcttgtgttcctagtaaacaaaacatgttaacaatatatcaatccaatataatgctatttataaaatatgctgtcagttatgtggtaacattcttaacaattatatttatgttatatagaagaagttgtattttagggttatctaaatacaggggcaagaaaaattaccaaactatgaaatcgacacccaagggaattaactataggactttttggacatcccgttaagtggactatccctgaaaaattacaaataacatgtgttagccacatcaacattgagtgcctttaaaatgtaaacgagtgcttggttacacaattacagattcacaaaaattatacagaataggcaatacatttatacaaatgtcaaaagcgtcatgatgaagtggaaatgctgaaaattgattgtctaaaagattagattctgtatttcaaactacttcctactgtgaccttgaaaatgtttacctttaggactctaaaactgactactatataatgtccaaagtatatattttatacatcaaatatattaatatattgtagaatatattatacataataatatatgatatacatgagttgtagagataattatatgttatatcatacagttctcatcattttgtatttctatactcttcgccttgacattacatactcagagagatgattgtctttaagattagtgacagaagattgctcccttcaaaaccaaatagccaagtaaagtggtctacttagcagtgattctaaaatttgtcatcagttagttgatgaagtacaataatttcacatttatc

SEQ ID NO: 475241 - DNA, 427 bp, Homo sapiens
gatggccacttccaagaagaataccatgtgggttttgatagggattgaactaaatttgttgattactttgggcagtatggacattttaacaatcttatttcttgcagtgcctgaacatgggatgtcttttgatttatttgtgttttctttaatttcctttatatcaatgttttatatttttcagtgtacaagtctttcacctttttggttaagcttattcctaggcatatcacatggagagagagagagagaaaagaagaagaagaagaggaagaagaagaagaggaagaagaagaagaagaagaaggcggaggaggaggagaagggtgaggaggaggaggaagaaggagaggaaggagaggaaggaggaggagccagacattttaaacgaacagatattgtgtgaactcagattttctgttcatca

SEQ ID NO: 475242 - DNA, 595 bp, Homo sapiens
atcaatccagctgcttccagatgatggggaacatggtaagaccagtgaattccatgagcatgagcccactgctgcactgctttagccataaagtgagtgccttggttagaggcaatgctgtgtggaataccgtgacagtggataatgcattccgtgagtccatggatggcagtcttggcagaaactttgcatgcaggataggcaaacccatatctaaattatctgcagaagatagtagggccttgctccaaaatcctagaggcctttgctgtgattcacctgtgctggcctgccaaaggctccaaacagcatccctatctgccattgacaccttagtcaccattggatttattgggtcatatggcccaagtggcagagcagcttgcacagcagcatgggcccattgcacagccttctcctcttttggaccatatccaaaactggcagcctttcagcaaaaagaatatgacttgctgaaggctcagatgatcattagcagtttgtagcaataaaatattttaaaattaaggttggacaatcctcagtatatacaccttactacacaaaggcttagctgaaatataaacttatttgt

SEQ ID NO: 475243 - DNA, 1427 bp, Homo sapiens
accctgaggatgtgtccgaccgaggaattgattcaggacaccactcagcgtctgttctttctgcaagtgaaagagggcattctcagtgatgatatttactgccggcctgagactgctgtgctgctggcctcccatgctgtccagtctaagtatgggaacttcagtaaggaggtgcataagtctggctacctggccggagacgagttgctcccacagagagtcctggaacagcacaaactcagcaaggaccagtgggaggagcggatccaggtgtggcatgaggaacaccgtggcatgctcagggaggatgctgtcctggagtatctgaagattgctcaagatctggagatgtatggtgtaaactacttcagcatcaagaaaaagaaaggctcagagctgtggctgggggtggatgcactgggtctcaacatctatgagcagcatgacagactaactcccaagataggctttccttggagtgaaatcaggagcatttctttcaatgataagaactttgtcatcaagcccattgacaaaagagccccggactttgtcttctatgctccctggctgcagattaacaagcggatcttggccttgtgcatggggaaccgtgaactatacatgcgccgtcgcaagcctgacaccattgaggtgcagcagatgaaggcacgggcccgggaggagaagcaccagaagcagatggagcgtgctatgctggaaaatgagaagaagaagcgtgaaatggcagaaaaggagaaagagaagattgaacgggagaaggagctgatggggaggctgaagcagatcgaggaacagactaagaaggctcagcaagaactggaagaacagacccgtagggctctggaacttgggaaggaacggaagcatgcccagagcgaggctgaaaagctggccaaggagcttcaagaagctgaagaggccaaggaactggaactggcccgacagaagaaagagagtgaggctatggagtggcagcagaaggcccagatggtacaggaagacttggagaagacccgtgctgagctgaagactgccatgagtacatctcatgtggcagagcctgctgagaatgagcaggatgagcaggatgagaatggggcagaggctagtgctgacctacgggctgatgctatggccaaggaccgcagtgaggaggaatgtaacactgaggcagagaagaatgagcgtgtgcagaagcacctgaaggcccccacttcggagctggccaataactgatttttacatcttgttttgcatttttatattcacttatccatgcttctatatttactttatatttatagtgaataagatgttggcacatttctagaattattggcttatatttttatgttttttaaatcgttatgattaagtgtgagttatttgatagttttaagttt

SEQ ID NO: 475244 - DNA, 778 bp, Homo sapiens
tgtctcacacctgggtcatgctgatgcaagatgtgggttcccatggtcttgggcagctctgcccctgtggctttacagggtacagcctctttcctggctgctttcatgggctggtgttgagtatctacagcttttccaagtgcacagggcaagctgttggtggatctaccattctggggtctgaaggacagtggtcctcttcttactgttccactaggcagtgccccagtgaggactgtgtgtgggggctccaaccctacattctcttctgcactgccctagcagaggttctccttgagggcacagccactgtagcagacttctgcctggacatgcaagcatttccatacatcttctcaaatctaggcggaggttcccaaacctcaattctgacttctttgcagccacaggcccaacacaatgtggaagccaccaaggcttgggcttgcacattctgaagcagcagcctgagctgtatgttggcctctcttagccatggctgggatgcaggggaccaagtcccgaaactgcacaaagcagcaaggccctgagcccagcccatgagaccattttttcctccttggactcctagcttgtgataggagaggcttccatgaagacctctgacatgccctggagacatttttcccattgtcttggagattaacatttggatccttgttatttatgcaaatttctgcagccagcttgagtttctcctaataggtttttcctttctatctcatgatcttgattaggaagtgttactatggaccag

SEQ ID NO: 475245 - DNA, 705 bp, Homo sapiens
aaactttcctcagcatctggatgtccctcctctctctttctctgctgtgtcattccactgtctttggtggctggatgtggagagtagcacatcagctgacacctgcacaccagcaggccaccaaccagcagaacaacgtgaagtttggccagggcagttggaggagagcttgggctgctgaaatgttgccttctccaaaaccaccctggcctgtacctcccctcatcctgtactcagaaaaactccaggccccaccagcagagtggcagagcagcgaaggagagaagacgcagctgcacgtgggggaggagcaacttgacttcagagggatgctgcccatactgctgagagcgactttcatctgcaataaattctctgcatatatcatcttcaattcattcccatccgtggatggcaaagctgaaagggcacactgtaacacatgcactctggggctctggggatcatggttatccccctactgccacggggctgcatagagtcctattctgcataagtttgtgttaattaagtctgggataattttaaagtttactgttgctattattacccttggtaaagaggttcttattaacatgtcctggtttggctatggatattcttatttgtgctgctcttaagagacaatttatcttttgcatcctccaactgtattcttctgatgtttttatttagtacttggtt

SEQ ID NO: 475246 - DNA, 793 bp, Homo sapiens
gagggtccgtggcttcattcctgaatttcctcttacgccaggatgtctgctcagaagggactgccccaacttaggtgcaggctcaagcctacaatacctaaagctctggacctggaacttgaggctctcatcagccactgcaacagtaaacctgtggaagacctgaaattcctgtttaaaagacagccacaagataacccttccatttatactatctataaggagccctccactgggaatgcggacctccctcaaacaatatatatacactccctccagaacaacgcaaattatacatgtagtaaagaactaaactttactattacaacatttacctttgagagtacactttgtacttctggcacatttacaagaaatagtttcataagccagatgcaattaacagaaacccctcattttcctaaatgtttccaactctttcatgaaaatgcaacaatagtcccagaaatccaaacatttagatgatggaaagtcagcctttttccttcattattaaaaaataggtatggtaattttttcccacgaagtattataccatatacagcagtttatttaatgacaaaaccttaagcaagatgaagagatagacacaataaaagttaccaataagagaagattttaacattattttttcttttggtacagtctttatctttatggcttcctttataatttttgttttgacaatttcttgttatgttaatttcttgctaataattgtttatattaacatttctcattgaattatgttactttatatttattgcacttc

SEQ ID NO: 475247 - DNA, 696 bp, Homo sapiens
ctgagtctacacggacacaaagaatggaaggacagacactggggcctcctggaggaaacctttcctgtaacacggttactgaggacctgtggatgatgtggacaaatcctgttacattccctgctgccgctttctcaccttctttctgctacatctttgccacagactgctgggctttggaagcaaataagagaacctctgcaaaattgctggctcagaagaaaacaggaacaatttggaggactcagaagaaaagtgtgacacttcctagagatttgttgaatgtctttgaccaaaatactgatagtgatatcagcagtgaagccctggctgaggtgggctcagatggagatgaagaacttgttgggaactggaataaaggtgactcttgctatgttttagcaaagagactggtggcattttgcccctgccctagagatctgcgaaactttgaacttgagagagatgatctagggtatctggcagaagaaatttctaagcagcaaagcatttaagaggaagcagagcttagaagttttgaaaatttgcagccagatgatgtgatagaaaagaaaaatcaattttctggagagaaattcaagccaactgtagaaatttgcatgagtaatgaggaaccgaatgttaatcactaagacattggagaaaatgtcttcagggcatgtcagagacctttgc

SEQ ID NO: 475248 - DNA, 931 bp, Homo sapiens
ctctccagctgcagaggagcctccactcccgagcaggcgagggagatgatgggttttgctgttctattcatcttgctgtgttttcacgttttaataattgttttgtttatatttctcctacagacatgttctcgtgtttataatgcaggaccaaatctttccttggcagccttagagcttggtggtcttgcattcaacatcccccagcatcgctttccaggggctaatgatgttaatggtggtggtgatgataatgttggtgttgatggtgatgacaatattggtagtggtggtggagaggatgatgatgatgatggtggtggtgatgatgattatggtagtgaagacagtgatagtgatgatagtggtgatgatgatgttgatggtaacgatgatggtgatgatgatgatgatgaagagaatcatggtgacagtaatacagacagtgatggtaatgatgatgatggtgatagtgatgatgatgatgatgatgatggtaatggtaatggtgacggttataactattatttatagagtttactctgtttgagacgcctccctcttatttaatgtaatgtaagcctcaagtcctgggatgcacttactattattagtatgatttgaagacctgggaactctccttggtggagtctcgctcttcttgtttgggacagttcttttcgtaaagccatcatatggcctcttggaagggcctgccatgttcctctccttgcatgtgtagtggtgaactcaggactccatccgagtcatatgatcccatgaggtacagaagtagagagtgaagacaaacatgtttaggagtgggtgagagtagatatttttttaaaagggcttaatgtcccagcctttgccagaggcatgacagtgccttatgcaaccaaagtaaatgggcattctcagagttactggt

SEQ ID NO: 475249 - DNA, 1723 bp, Homo sapiens
gatggcagggggttcctggcgctgttctctttgcaaacactcattgctggatctaccgcagcaggactatggctgccgccactcaccgcccacaccgtgtaagaagccatccctgcgatgatatctaccctgcgtgttgcacccgcatcacagctttctgagtccaaacatcttcaggggttcaaagccaccctggctggtccccatgatcatgtcctgtctcatctgctatctcccgaacatcccaggccctgctccttcctatctgccttaatcccagtgctctctgggccgcctcctcacagcccaacttcacattccttggaagccacaacaactcctccctctgccagtggagcctcggctgccctccagggcctgctgtggccctgctctccccggtctctgtggctcctggggaccctggcactctctgcacccccagcctggagggcagatggccagcatgcaggaggagtgtgcaaaccaacatcatcccaagaggtggacagtgagccaggctctgctttctgtgtggacccatgactgtggaaaaatcacactgtccttaaaaagccaaatggtgccttttctcttgactaaccctccaaatgggattttgagagaaagaaaaaaaaatcacccctttgaaccatattaaacaagccaggtctttctgagtttgaaagaaaaccagaacactgaaaggaggtcaccatggggcactggggttcctgcaaggacccctcggggctgggaatgtgtattcccgagcaatgagctgcctccggtgtagtcaattgcagaatgtccattctgagtggatactggagttttcgctgctttacaaacttcacggaatgctgtgagagtctggctggggttgacagggcaggcctgtgcttgtgggccctggggccccaagcacagctgaggttctgggaccatgtgccagggtcctaagtcagtgaagttgacaactagagtgagcaactgctgaatatgatgtggtctctccttcctgagaaccagaggccaatgtgaagatttccttgagaaatggactatacttttatttttttagcctggaatcagccctgctccccaccccatgtgacaggagccctggttagatatgggaagggggtttggtgaaaacaggaaggaacagctgtggggggcttggaattggtctaacaatggcaagtacttagaactaattgggggaagagaggcttttaattaccttgggttgttttcaataactttgtaattatttcctcttagaaaatgaaaaatgtccaagtccctgatttgtggactctgcctgcaatgagatttgattatatttttcagtgaggcatacagaggacaaaatagaaagtcagaaagaggtggggctttgtggggagctgggcaaagggttattcagtgtagaatttacccttgttgaactaagaatactcacggctgtcctgagaagtgccctaagcctgtgatgtggaacggctgttggttccccatatccttgctccatgccctgtgctccatggagacttgggtttagatggccttagtatagatatagttaatattaacattttcattaatattaccttcacatcaagaaactgtagcatagcccattttttcctccaatctttccaaatattttatatattctgcttctaaattagattttataagcatttcttaagcacct

SEQ ID NO: 475250 - DNA, 571 bp, Homo sapiens
gagggaggagtgctgctctgcccagcgtctaacccagagatgcctgtgcttagggaaagaagaagatcctcagcatttgttgagcagctcctggggcccgtccatggcagaaacacttgcagcatactgggcaagggtcccaacatcaagcatgacacaagcacccatgaggcccgcagatcgctgcctggctccttccgctgcctggaaaacatggaagaacaggagtggagaagaataaggaaaaggaaagagctcacccagcgtgtggtcacagaggggctggattctgttcctcatatcaatcgctcattgactgtgggtcacactcaggatgatgttacccaggatcccatgacagtcaatcagactcatagtgaggccttgggtattgtgctgggtgaagccctgcaggtaggaaaggcaaatccaatcccagtaggtgtcaaactcagtcagcatgaattgctgcccttctaggaagactgggtatgatatactagactatcccccaaaatggtggggtggtcttcttgagggaggtgcatatcaggggattagaatcagcttc

SEQ ID NO: 475251 - DNA, 571 bp, Homo sapiens
gggcacaaaagcagtaggggtttgctctcactttaaaccaggaacctcagccctgacagtccaggaacaaggcttacaagaatgacaacatcttatatctgcatcgttctcatttgctgcagcttaagggtcatgtgcctgctctcgaatgttttaggctggttaaatggtgatcatcaaaatgctgatagaaatatggatggtgaagtccaggctgacaaggtcttatatagaaatgaggaagttattgggaactggagcagtgcagaagagaaatgtgaggttggagccctatgcagagtccccaccagggcactgtctaatggagctgtgggaagggagccaccactgtccagactccagaatggtagattcaccatcatatcgcaccctctgcctggaaaagttgcaaacactgaactcaaaaccatgaaaagagccacaaggctgcatcctacaaagccacaggggcaaagctgcacaaggccttgggggaccaccccttggactagcatgtcctggatgcaagacatggaatcaaaggagcttgctttgcagctttaagatttaa

SEQ ID NO: 475252 - DNA, 525 bp, Homo sapiens
gccaccgacctagaatgtcatccagaatattccatctttgcagaatgtgaagtcatctaaatcgatgttggcaagaacccaaggggatacttaccttgaaggtgctgaaattgggaccaagttcggccatggagcagtgaaaaatattcagagctgttatgtcctccaagaatcaatgatgacattcagcagttgcaagcttcctgacaaagttgaaatcatctttcacttggtacccatgtcctcctcttctcaagctgcccatcacaaagaacgaccaagctggctgtcagctcagttgcctgaacagtatccaaaccatcagaaccacctccaccctcccttcgtcttcccaccatctcacgagaaaccaaatctccgtctgtcaattgcactgttttctcagggttttacagggaatcagaccaataggatctattataaggaattggctcacatgattatggaggttgacaagtccaaagtttgcagaattgatgtctcagtttgaatcctaaatctggt

SEQ ID NO: 475253 - DNA, 1074 bp, Homo sapiens
cagctctgctgtggccagtggggtccacaacccctgggccgccaatggtaccggtctgaggccgtttagaaacccggccgcacagcaggatgtgggcagtgctgccagaaactggtgtcttagacaacagaaatctattgactcatggttctggaggccagaagccccatatcaaggtgccagcagggtgggtttcttctgaggattccatcccaagcctccctccagcttcggggtctgctggaagcggcctgtggcagcacaaggtgggtctccacacgacgctctccctgtgtgtgcgtctgtctccaggtttctcttgttctaaaaccaattcgcttcgtttgaaccctgtggaggacatggctgatgatgaaagtaaaaataaaatcatccgactgcattatcagaagacaccctgtagctttgacccagaagcttcaagaacgtcagaggagaagataggagcagaagagctctgtgcaggtgaccagaagaaaaagactgaagctcaacatgaagctaaggaagaaaacaaaagcaaaagcaaaaccctgagcaggcatggagtggcttagtcttgctgtcctgtctgagttctgaacacatgtaatatcccgtcaccaattccagaaatacttgagagatctgagatcctgccagtgcctctgaatcacagtgttgttgggaaggcagcctctcccgaacccagggaagcctggcacgctatcagctagattatgtcatagacatgctatggttttagtagttgtgaatgtaatttctctatttcattttgtaattggttattactggcaaaagcaaaaatgcaactgatttttatatgtttatattttatatagcaatcttgctgaactatcatttcccagccttcttggcaagaaaaaccattgtgcttgatgggttttcaacttctgccggtaataaagcatgttaattcttcctaatgtggaccatcccgacattggtaagctaacttggccatcctcatggactgtgtcactttttagccttcttttcttatttgtaccttttaaatactttttgatggtc

SEQ ID NO: 475254 - DNA, 2359 bp, Homo sapiens
gcatccaccagtcagggcacactttcacaaagtcgcatggacagcgctgagccttttgaggtgacccttcatttcccggccgctccgctcagactcctcaagcttcctgctgcctccaatgcaatggtggaggatgagctccactaaggaacacatccggctcacagatctggctggcattgctctgtcttctgctttcccggctctaagctccaagtgctatcaccttcagttgaccagctgcgtctttgtccctccccacatcactttctgcagccagggcagcactcctggacaggaagccatgaacttgcaattccaccatttcttccagttgcttttggtgtttgtgagcccaatatttcacggccatgtgacaaggacccagctcttagatgaactaaggagaaggtactacaacatttttggtgctcataatgtgaggcttgagaagggtgagcagcagctccctaccaccatcccctccctgccagggctgggacacatggcccaagaagccccaggctgctgggctccacccagcaactgggttttcttctgcctgtctgtgtagttatacatgtgttgtgcataatgatacctgtaaaaagagctctaattaacttggcctaaaggaagacatgtgcttggataaaatattttttaaagggaagagctgtggttcctttcagttcacatgactttaatctctgagaaataaaaacagccttaaagattattggtaaaatgcagatgccatcaaaatgtaaacaggtgggcttaaattgtgcaggtcagatgcaagatttgctaagtgttttaaggttgtaaactgccttttgggttttgagaactatttaacttgttagctccacaattggtaaggcctagggacatacggaactaaccacaaccttaattatgctggaaggagtcaaagcttggctgcacttagcatgcaattaaaacaacttaccaggttttacattaaagttaacattggtaaaagttaccattatgacatgtaattgaaactactgaaaatagatttatatgcaaaatgcgtaaaaacagtaaaatgtgtttttagtaagagattataaaaaagcatgaaaatgtaaactcttacccagggttaagaattgttttgaattaggataaagccgaagattcaaacacattctgaaaggtttctaaaaattaatcttgcagaagaaattctgtgtgtaaacattaactaaattcaaaagggttttatatagtttttctgtaaattgagcattgaaataaaagcacaataaggttttcttaaggcactggtctgctctttagcaaaatttgtacaggattataaaaggtttttgcttctttaaaatttctgagtcatcattttggcaaaataaataacttatggcaatctggaattctatttcattacatcaagtgttttaaacctctaacacatttcagagccttcccaaaatcaaactacagtttcaaaattgtctttcctgaaaccttctttttggaagctccagaagggcccccagagtgcccagaaaagagatgtaaacaggattatttgatatgttaggcacatgagattgccaaaatgatgttcaatcttctttaggttatatttttgtgaataaggctaatatatgttccaaaattgtatgggatttctaaaattctaaactctgagtatatgctatcaaacacagttaaggtttttaagttgttgtaagccacagagataagcaaacttgtcaattgtgtttctaactgtgactaccgtgaacattttgttattcacagacaattggtgttttgttttaatccttttcaaaagatagtttataataagtgatagcactctgaaacgtactcttaaatacaggtttctgataactttggaggttgtgacattggaataaaggaaaatgtacaggactcatgaaagctaaaatgttcatgaatatcaagcaaaacaagtattaactaaatggactgaactcagaaagctgaagcaaactgtttgactttttcttggagtattgctgatccttgttttgattttcagagtcaaggaaacttattttgaactatttatggccattaataattgagtaaggtatactcctgtgaacaaaatttgtagcatattttctgtctctggctggcttctccagaatttggaaactatctgtgagtattcataacttatggaaatatacttgtttgcatcaatgcagtaagaattcacttttcttttgcaacaggatgcaattggagaaactggttgttttatcaaggcttggactgaaagtgtatgcttccccttaaaggagtcaagctc

SEQ ID NO: 475255 - DNA, 574 bp, Homo sapiens
gaccctcaaccaaagagagcttcttccttcttatagaatgtctgcatatcggagcattatcagcaattctgggtcctggaagagattggtgtctgctttggaaactcaagtagctagaggcattgacaagctctacaacacattacacagcagcgagatgaagcaggcttctctccatcattcactctctagttccatctcggggactgctgcagcattcttgtgcaagtgcaagaggctttcacaggacagaccagccaggaggacatccatgcagatgaggacggatgaagtgctaaagccccaggagtgttcagagaggaagaagaacaggatttggttggagaagatccttggagggaattctgatttgttgctgcctgaagggattctgagaaggctgcatggaatagtggaagaggctttcacaggacagaccagccaggaggacatccatgcggatgaggacggatgaagtgctaaagccccaggagtgttcaaagaggaagaagaacaggatttggctggagaagaagatccttggagctaagagctgggtccttatcacacagcc

SEQ ID NO: 475256 - DNA, 1455 bp, Homo sapiens
aggtttatgttccacgtgctttaagttgatgaaggaaaagggaacttgttatctgcagcatttttccaccctactcccctcttctgctgcaggcctgagacgctttgtcatcatcccccagtctttttgtcagatgtgggcaattccatgttgtggcagcacctgtctccccagggttgccctgggtcctcatcctcctgggcagtttcttccattcatgaaaacagcaatctatgccctcctccctcctcctgcatcccaggggacatggatgcccagcctagaagttgatcccaactgcttctgccctacgcacagccagtctctccaggctgtattagtccatttccacactgctgataaagacatacctgagactgggcagtttacaaaagaaagaggtttaattggacttacagttccgtatggttggggaaacctcacaatcatggtggaaggcaaggaagagcaagtcccattttacatggatggcagcaggcaaagagagaatgaggaagatgcaaaagcggaaacccatgatcaaaccatcagacctcgtgagattcattcactaccaggagaacagtatgggggaaaccgcccccatgattcaattagctcccaccaggtccttcccacaacacactggaatcatgggagtacagttcaagatgagatttgggtggggacacagccaaaccctatcacaggctctgtcggttctgtctcctcaatgtttcttggcttcgtgcccttttcacatctccatgagaacagtctcagccaccccaccttctgtaggcccacacagactgcctggtcactctggggtcttcacaccctgtctccccagtacagccctggcaaccttacctgcaactgcaagcaaggcacatctccaacagggagacagtgggacatctgtgtgtccattgctacagccagaaggattctcaaaacagagcctggaactgaagatgcttgggaaggacctgttgaaatggtgtcgtgtgagggctatggagaagaagaggaagaagaagaagaagaagaagaagaagaagaagaagaagaagaagaagaagaagaagaagaagaagcagcaggagaaggagaaggagaaggagaaggagaaggagaaggagaaggggaggaaggggaagggaagggggaaggaggaggagaagaagaagaaggagaaaaagacggaggaggaggagaagaaaaagtaagaagagagaaggaagaaggagaagaaggagaaggaagaggaggaggaaaggaggaggaggggaggtagaggagaaaggggaggaggagtggggaagtaggaggagaaggaggagggggagggggtgattgggatgcagataagacacaaagaaggatgaccatgtgaggtcacaacaagaaagcaggcaagaaattgaggtctcaccggaaaccaaacctgcc

SEQ ID NO: 475257 - DNA, 847 bp, Homo sapiens
aattgtcatgcccgttaggggaatggcagagcttggacaggagggctgtgggcatttgcaggagaacaggggttggggcattggtggtggcccatctggcagcatagacatagagtgtctgctgaatgcatatggcaggaatcactgtaagaaagatgtgaggaagatttgtccagtgcacccaggaaggcagggcctgtttgcagaaagcaataatgctggctggggacgaaggaggtcatggtcacagggacgttcccagggcctcatggttattgactttagatgtgttgggagtgactggggtgggagaaggcaaagggccttgctgatggcagcaggggacactgtggctgccatgggggtgtggggctggggtattactgggctgcagaggagaaggtgtgaaaatccagacccctgcagtccccctggcacctttacctaccactctcagccctgctggtctctgacttggtccaaagcagaccccttgccccatgcctcagctggccctgggctgccctgcctgggaccctttacacaatacagcagcatcctctcccgaggcttggggcctcacccctgaaggggcacccaagagcctgtggtcagtgcgtgttctgagaaggtattttaaacaccaccaccctgggggattgtcttccattccctctcactagtttctgcttccaaatgaataccacattccagattagaggacttcttgcaagatcgcctcaggtatctgtggaagaagtaaaggtttgctgacagatgaggattaaaaacagttcacttgtgggaaaattatgttttaaaaaggctttgtttttggcaacgcatt

SEQ ID NO: 475258 - DNA, 558 bp, Homo sapiens
actaggggacctggaccctcagttaccaggccctctaaagagtatggaggagcaacgtcaaagaatcccggaactgagggagaggaagaatagaataggtgcttcaaatgtggaagagcaggccacttcaaaagagaatgcccccaaaaaaggtgacctcaccctcaccactaacagtgcccttaaccctgctgctttcctaactgggaatccaaaccccaaagatcctgaacatgattgtttagatctcattgactaccatactaaggttagacctgatttaagagaaaccccttttgaaacaggacgtcatctttttatagatggctcctcccgggtggttgaaggaaaaagacacaatggatactttgccatagatggagttcttgccgaaatagaatctggaagattgccaaataattggtctgctcaaacttgcaaattgtttgtgttaaatcaggctctaaaatatttatgaaagcaagaagataccatctatacctactccaagtacgcctttgtgggtagtgcacaccttcggaaaaatttggactgagc

SEQ ID NO: 475259 - DNA, 699 bp, Homo sapiens
cactcgctgcatttgctttacaggacatccaagacacaaagaggagagcatcagaatgaggagagaatcattaaccgttaaagagttgcaacagggtggccagggcttcatcggtaaacgtgaaaaggctttgtcttctgctaaaagaattccaaatccagatggcaggggcctgctgaaaaggtcctccaagaaaaagacatgcattagacatacagtagatttattgaaagaaacatctgtgaaggacagagaggagaggaagcaggaggaggccgtggagagccttcagactagtaaacaggtgggtgtctggctgctcataaagggatataggcatgtgtttgagatgcccagatggcaaaaccaagatgatgaaacttctgagggaagtggcaactttaggatactagcctgcagcgagacgtgctctcagatggtatcgctgcttctcccagcacctggtcctaaatttaggttctccctagaccttactggatgagagcgttaagagtgccttgttacttctccctacacaccctccactgataccatgaagggctggggtgggaatgtggcctaattactgctgggtggttggtaaaagttctgtctctccactgtgcctcctctcacaccactttagggaggagggggaggagcaccttattactgatgggtgggggatagaagcccata

SEQ ID NO: 475260 - DNA, 1085 bp, Homo sapiens
tgtattctgtttatgaatgaaagttcttttgcagaacaagagatccgtaaagcagggtatgcaatatgcaccctgaatgacactattgagagcatgcctttctcctcgggtagaagtgctcaactagctgagctaattgccctcacaagagtgcttaaattaagccaggggaaagcagttaatatttatactgattctaactattctttcctagtcctccatgctcatgtcattatctataaagagaaagactctcttccatgggaagtggcagtaatacactgtaaaggccaccaaaaggagatgaatgaaatagctgcaggaagcctggattgggaaggaccttacactgtacttctttgtactccagtaaagatcactggaatagattattggattcattacactcgagtaaaggcctgggaaactgacagaattacctctgtcgatccagaagagcacccaaagcaccagtgtgaagaaatcggagaccgtaagctaaaaatcacaaaatatgctggtgcccaatgcggaagccactttcagcatgctgggtccagctgcaggctgaacacgaagccacggcggtatgggatccaggccagtagcccaagccaagcgcaacctgctggactgagtgggcagagcaagcccagcaagcctgaattaagccccaggcagagggcacagaggccacggagacttcaggctggcaaagcagcatcaaaggaatactggaacatggttaccctccctcctgttcaccgaccaatgggagaaaaaaccgaggttagaaccaagcaggtggaagaagggggatatgctgtttgcttgttgagtcttcttgctcgctctgtcttcctgtgccagatgcttgcttcctctcctcctgctcttggacatcagactccaggatctttggcttttgaactctggaacttgtaccagaggcctcgtgatatggttgatagataatatgtgttggtatctgtggccaaatttgtcctgaggcataattttattttaacttttacttattttaaactgttgacagctatcaatagctgcccatgaggaccctctgg

SEQ ID NO: 475261 - DNA, 981 bp, Homo sapiens
aaactatatgactcttccagaaaatagatataggattcagataaaaggagctcaccttattattaacaaaatggtatgctctattgggcaacgtctggtgaagggatggtaccagctcttctttgtatatctggtagaatttggctgtgaatccatcaggtcctgggcttttttggttggaggtattccagaagaaggcattgttatcaaagatgatgacagccccatgagtgttattttccctgatgaccttccagtaatacaagaagtgggagattcattggcttgttcatgggcttctgaagttacctctgaatcatataaacttgttagtcctgaactgtttgcttcacaagccttgattatagttgttgagtttagtatcttgactgtgggttcaactcatagtgacattatctattttaccaaagaaaaggactcaaattcaaatgctttaaaaattccctttagtcctctgatcccgtgtctatgggagagattcgggtttcctcctgtttgagcaagtaagcttaattttatttgaaatggcattttcctgtacacaaaataattcatacattctgatatgcctacatttcaacatcaaacatccaccccactatactcctaccggttgttggcagcttgggagttgctatttaatcacttcaagctcattttcctataaactaaactttgtaactgaaatttctttaaaacttttgatcaaattgactcctcaactaattccgtaacttgtcagtggctgaacagttccaccaaaatactgaaaatgttttggagctacagaaacagaaataaatcaagtatataccagggaaatgtgatatctttcataaaatgtcagacttttatattcttaatcaaattaaaaagacattttatcctcgttgcaagctaagcaacctatctcatttaattccatacatctggattattctacaacgagtatcaggtctt

SEQ ID NO: 475262 - DNA, 546 bp, Homo sapiens
gtggccagctgggataatcaggggagatgaatgggcccaaagaaaagacaatagcctgggacaaaggtcctctgagctctggggaaggtggtgacaagttatgggaaggtaccctacgggtggtgttgaggctggtccccaacattggtggaagaagcacctttatggaccagacagccatgtactcggtcagccccactgcagatacgccggaaggaggtccaaaagccgttttcagggagaggactctttgccccttgttagttaaaccttggcagacatgctgggcaggaatgacataccctatgtgtaagtacctggaaaaccccacggtgctcccacacactcaaccggaagcagcattttcagatctgctcgtgctggttcttctgcattagttgatagtcagtttagatttcagatgtcactgtccctgaagggcctcccctggtgcctcataaaggccaagagaccacaaaagttgaatggccaagccaggctggcacgacgcagtgccctagctatctccttttctgctgcagaagc

SEQ ID NO: 475263 - DNA, 922 bp, Homo sapiens
ccaagaggatgggacaaagcaaggcaggcacctagtacacctgggagagactgctgtagtccagaatggggtgtcagagcctgagtggggtaaggagggtgtctatgtagaaagactgcctggcatggggagtagacagggaggagaaggcatctgaggaggaggatgtcagagcctgtgaaaggagtctctctccacctccaacttgttggtacaagtgtcctgcgggagcagctgacctcttccttcatcacaaagccaaacacacacctggcgcaggagatggagctgctgaaggaggacacagggcaggtggagcagctgcagccgtcaaatgagcagcaatacaggatatccaaatctcagcctaaacaagtttctcatcagccacaaggattttcattttccatcatcacccagctctcccttaaggcaagacatggtacccagcccggtgctctcagcagggagcttctagctgttgttcccacaggggttgtcctgcctgagcccatggcctccctaggggagcccaatctgggggccagagagtggatcctgatggtatacaagaaggaggtggcctgggacatggctgacctgctgaccttggagatgtttgccccacaaatgaggctgcaggattgagtctatctgaggaatgtcctgcagccaggcccacaaggtgtccctcccagccctgccccagagccctctcaatccttcctctctaaaaccgcagcccctccttcagaaggaagccctctctgcacagactggttaaggtttattagtccttaaaattccttcgagatgagttggtatttatttccctgcaaagcttatgtaaccgtaagaggatactggggctgccaaagctgtctgtggtttggatggggctcacagcggtttcttctgggag

SEQ ID NO: 475264 - DNA, 1186 bp, Homo sapiens
taattgaatcatgggggtgggtctttcccatgctaatctcatgataaggcaggatctcaccaccttttctgggctagtctggaactcctggccttgttaccagcggcaaatcccacagagacagacacacacagaaggaagaccatgcgaagagatacagggaggagatggtgatgtgactggagtgacgcatctaaaagccactggctgtcaaggattgcccgcaaacatgggaagctgggagaggccagaaaggattctccccgacagtcctctgagtggacacaggtcatcctggagagtggtgtccttctggattgtcacataccctgtgaatgaagcatgtgttacaacaataatggaaaatatgcaaatgagaaaaaaagtttctcagtgccccaccaccctaaattctggctccacccctatttgttttctcatatttgtctgaatttctccaagaagcccataatcaatgctgggtcattcctggagtgttgacagtcaccaggattcacctttggcttttgtttcagtccaaaagtaagagttagtgtcacgtgtgaggcaaacacatgctgagacttgtttgagggaccactgagatttcaagttgaggaaaagccttctggtacatgaggtcgattgtagaatgaatatgaatattgaacattcctgccagcagtctgcagacttctgatttcaggcccctgaaaactgttatttcctgggcttgtttttaaaagcagagcccaaacttatttctgagaaaggacagaattaaaattcagcagatagttgttcatgctgtataaataaatccctcttcagagagtgaaggaatcctttttctcagggaccacaggactgcttataatgactgttttcctcacatcaagagctcagtctttgtggcaccttgactttttttggagggggcaaccagtagctgttgtctaaatctgcaggctgcccagagcctgcaacatgcgaatgtgtgtcataattgttcacaaagggctccatcatgttaagcatttcctagttatttgaccatagaacttcttttttcatagttaagtctattaatagctcctagaacagagttccaacgatcattgtgtgatgaacactgaagatctttttcaaaagctttgaaggttcttgtcaaaagtacatgcattat

SEQ ID NO: 475265 - DNA, 558 bp, Homo sapiens
cctgctcaccatgttgtggatgacaagaagagaagagctatggccctttgggaagcccggacctagggcatccctgagccagagctgtgacaccctctttggggctctgtggttcctggcatctccaggcttccaggtgccactgagttccccttttccaggcctgcagcctcgcacagagccagcacctgtgctggtgcctgaagctgtccaccccatcacagcaaccagcatgcctggctgtgcgcagtggtcagatcccgtgcttgctcactcgctcccacaccctttgctgcttctcaactggctcacccttggcagatgtggcatctgggttggtagtaggaaccaagcacagcctgccaggttgagttgggggaatgagcccagtgggcacaagcaaaacccaagtagaggcaccaccagccacagaggtttctggctggcaaagtgataccctaaagagcttgtgacattattcttatgtttgttatgttacattagctgtgtttacctacacaatttgttttcattcattttagatttttaaattacttt

SEQ ID NO: 475266 - DNA, 935 bp, Homo sapiens
taggaaccgcattttctttgagcagtcttctttgacctagagatgacgttacatctcattgcttcattggctgtgggtggctccctggagtggagcatggccctgtggcaaaggcagtttccagcaaactctccgcagtcggtattcccagcagctggagaagtgagtagctcagtgctaaggggagatcttggagcaccgcctatccactaccctattctaaaaaatatccggaatccagacctgcagaaagaaaaatctttccttctgaaagggcttgctggacttttccagcatgtccagtgtgcaagaaggcagggcaatagctcagcaactccagtggggaagtctgagtctaggacccccaaccaccatttcttattggtagcaataattcaggaaatccatcctaccatggagggtaaggagtgttccagaccgaagaatggcaataagaggtctagatggaagagccagcactgccctgcttggggacccaaaataatgacttctgggaagaggtgtaggtctgtggaggaatttgaacttgaacttcagggcaaaggggggctgctatgagtacagtagcatggtaatgaggagagacttagacctgtaaaattttaaaatttgtatatagtcaaaataatatgcttgtttatactttttttttgcattagaagtcctcaatttatcagtcaaatgctcatgtatattttctttttaatgtttttataggtgaaatttattctggtgtatggtaagatgtgaagatagaatttgaatttttaaaaaaatagccaattctcacaacaccgttattgaaaagttgtcttacattgacttcagttttagggctgtctatacaagtctactctctctgtcccatcttgcgttggccccgcatagttttgattgttgtgacttcgttagcc

SEQ ID NO: 475267 - DNA, 1267 bp, Homo sapiens
cctcctctctctctcttgatttctctctcatcatgcgatatgctggcttcccctttgctttctgcggtgatcataagcttcctgaggctctcaccagaatgtgagcagatactggtgccatgcttgtacagcctgcagaattcctgtgaaatccaaacaagttatctacttccaaaatacaatggtggaacaggcataggatacacatgcacatttcaaaagggagcaacaggaaaaaagaaaggagtaacaggtcccaagtatttgttacagcaacagtcttacttcttggtgccaattttctattttagtccattttctgctgctatatcagaagaccacagactagtgggtgatatgacagtaaaaagcatgacaaagaagctgtttccacaatgcattttagtcaggttgagtgtgcacggccacatctgcccaccacagtgccctctacaaccagactaggggatcttcccctgcagctgtccccatttctgcatcctcctccaccagctatgaacacccaatatttcaaagccttttgcttccctaaggacaatagcaacgcaagaaatcaggtcaggtcttgttcttcccccttctatctaaatggatttttctgaaaggaagaagccaaggagaagaggctcgagatgctaggtatcatctgagtgtacaatgttaatacttccttacctcacacatctgatttcctagtttgcacatgctttttttctgtatatcttttgaagctctttgaagacaaagaagccctctatcctttgcccagaaaagttccacatgcaaagaggtcctttcaagtgagcttttaatcacaccagaaataagtttgccctgtggtctctttatgtggctggcatactgcagtccatgttattttcaaattgaagatgttatttccactacctgaagattatgtgtctagataactcagaagggctgtgctgataaccatattaaaatcataaaaataccattatgtttttcaaggcagagtcagattgagttaatcagaattggtttgcaagatccagtttgtttctctgttgaaaatagtgtcaggttgataagtcttttgttcccacactatcacattgggttctattctaatctgtgtgatacccggacaatacagataagctaaatgtggtctaatcagttctgactcttctgatctgactgatatttttgcatggattttgattaatcagaaatgtacagaatattcatgtctcatcccatagtt

SEQ ID NO: 475268 - DNA, 584 bp, Homo sapiens
atactcacattccatcccgtctttcgatgctgaacacgggagagactgaggtctcaggatggctggaaaagttgggatccttcaccacaaggcaccagatgctgaacaatctgtaagagaagttagaatgggccttgcaaactgccagagttcagaggaaggagcctccctggcagccagggccctccctggaggtggtgttctggagctgagcatgaaagaggactgggtgaagggacagcttggctgggagaatggctgggcttatgcttggctggcaatgaatgcaggagaagatgcctcctgccctgtgagccggcaaaaaggaggccacagccataaggctcggactgatgggccactcaatagtccacaaccactggaaggaacatcaggagaaaatctcttctctgagtgtcttcatcttcaagatcctaaggcattctcagcaattgcccctgtgcccagagaaatggaaggagaaaagcagaccccaccaccactccactcgctctggctttgcaattccttggatcattgagctgctttgtgccggagttgtttcagctggagaatcaccctga

SEQ ID NO: 475269 - DNA, 549 bp, Homo sapiens
aaaggatttgatagtgtctgtgatacctgggaaacccaattatttgttttttgtttgttttgttttgcttttattttaagggaggattagatgaatatctctgagccacttatcagctcgaaattctacggtcaaataattcaccctcattacttacagacaagtggaaatagaattaggcagagacacaagcagctggacgtcaagaggaacacatcagttgagcacactgacaagtaccggcagatgccgacacgatggcaggccatcgaccagcggaatgacgtggagtttggccagggcagtcggaggggagcccagccactgggtggcctgactccagggaaaaaaccaccttcccacttcatctcccttctggctcccccatctgctgagagctacttcagtcagagctgttacagtggaaatcttctgtcaagtatcaggaacagatcttataatatggctttgacatttatgtccaaagaacatgaggcagatggaaaggtttatttttcagagattgtgtcccacagagaatgaggtgcc

SEQ ID NO: 475270 - DNA, 606 bp, Homo sapiens
ggtagctgacagaatttgacagctgctgtagatgtcatttttttgtttttgttcttaagacattcttttaatctttttttttttttggagacggaatagggcctgagggcagagtagcacgtcacactggggaatgagatgtcacgtctcaccttcttgcagacatcttcaattcctacaagtgatcctttagaggaccccccactggactttatgggtgaacattcaccttccttcttcattcaaagctcagcccagtgtttgcctcttcagcccttccaaagattttgggggccccctctgtctcttactaaaaaattctttgcttataccagctgtgcagccaagaaaagccatgagagactgcactgggaggaatggtacactcctgcccagatactgtgctttttccatggtcttcacaaccagcagaccaggagattccctctggtgcctggctcggcgggtcccatgcccatggagcccagcaagctaaaattcattagcttaaaattcttgctgctagtgcagcagtctgagatcaacctaggatgctggagcttggttgggggagggatatcagccattgctgaggcttgaattcca

SEQ ID NO: 475271 - DNA, 653 bp, Homo sapiens
ggtggagccctgagtaacaaccaaaagcctcactgcccattgcctctgcactggaaatacccttgctacccttggactcatgaaggtatttaggtggaagctaggcaatatagtgggtgttacaaagaatccggctaacatcttgtgcttgtgctctcgcgtgctctctctctcttttttctctttccctcagtttgggggaagcaagctgccattcaattgtggatcagacaggcaattctattgcatgtttcggtacagctggtataaactaacctgggaagatcttaagagggacagctggactctcctccacgtggatttcattcttcagcagttttataggaagattaatttgaagacaatatacaggacaaattacagaaccagaattggagatataagtaagaatctttttccactaatctggatgagggctgatgagacaatgaaccgagagagatggtgtggagaggtggagacaaaggatggatttgagtactctttcagaggaaaaggaaacaaacttcctgactgaatgaatatggaaagtgagagaaatcaaagatgactcagaggcttctaccaggatagttgtgtggatggcagtgccattagccaagacacaattctcagaaaggaatatattttgt

SEQ ID NO: 475272 - DNA, 990 bp, Homo sapiens
ggtgtttggttctttgtccctgcgatagtttgctgagaatgatggtttccagcttcatccatgcccaaggttatttcagtcagaagctagtaaatcctgcaagaaccaggtctatctcttcaagacagcagatttccttctggcccagtgtgggtctaggaatgctgtctaggagcaaagacctagaatcaagggctccaggaatctgcctggtgaatctctcctggagttgcaatgcctggagttgggtgagggttgacatgggtactcccttttcttgccacaactggtatcgcactgggtcatgcacatcccaagtccactggctccaagatcagtgcagcatgagtgtttgtccaaaaactccagttattgtggcctatcactcaaatttgttctggaccagtgggcaccttaatcagctggtggtaaagctggccaggaatcaatttcctcccactggagtggagaatcctcttctggcaagatctggtctaaatgttccttccacgaacaccagtagaaatctgtcgtgtgttgtgctttgctgttacagggaaacactgagttccagtgcaaagacccacactcacttcactctcccttcctgagcatactgattctctttccatgctgctctgcctcgggttggtggaggggtggtgtagaaaatgtaagtgtctttcctatcatctttaatgcgaattcccttgatattatatttaaaccaggtttttgtatatatgcttacattatttacccaaaataaaaatcactgttgaaacaaaagagcaatcaggcaatatatatgttatttcttgaaaactttacaagggcatgagctaaaatatctgtacctataagcttatggcattttgataaaaatgcgagcccatttttacatttctaattgtgactatgtatatctgaaatgagtttacatatgaaactactggaaagtaactcagactaagctatgacccaaatgat

SEQ ID NO: 475273 - DNA, 1649 bp, Homo sapiens
gaggcacagcccgtgcgggacacacaggccattgccagccctgccggggctccaaccagcccttctcgtctgcagcagtcacacaccacccctccgtgagggtcagcagggactgcctccctcccccaagtgtcgtctcagtgccttggcctgactgcagcttctcacctgcggtcttcagattggtcgggggaagccatgaaatctcacgtgcccagtcaggacccagcacggggcctttcctttctccccaccccacacccggggcccagcgtcccttcagcataagttctcccactgctgtggcaggtcccccagggaaagcacagccagagagctgctctcctgcagcctggaagctccagtccagccccctgctgctcccagcacccccttccgggctcccccgcacacccctctgtctgaaacacccctgccattatgagggctcagatccatggactggcaggaacccagacccttgcctgaatgagcagtcgcaggcccgggccggcacacacaccgggagcccctggcccacactccccagccggctcctgtggccctgttctcttcctgccgggcagagaagcagagcttgggacacgtcccacccgtaaccgccagggtcctcttctgccccgagcatccgactccagcctcccatggccggaacatctgaacgttcattgatctcatcgatttctcaacccaaagccatcgagtgctttgaggtgaagaaaaaggctttccttacccacggcagataccacggcagtggcgccacgccgccaaagaccaaagaccccaaaccagaaacgttctgtggtcagacagggctgcccaccatggaggtccgcattaatgtctcaaggcagcaggtcgagaaggtgttcgggctggaggaatactggtgccagtgcgtggcatggagctcctcgggcaccaccaagagtcagaaggcctacatccgcatagcctatttgcgcaagaacttcgagcaggagccgctggccaaggaggtgtccctggagcagggcatcgtgctgccctgccgtccaccggagggcatccctccagccgaggtggagtggctccggaacgaggacctggtggacccgtccctggaccccaatgtatacatcacgcgggagcacagcctggtggtgcgacaggcccgccttgctgacacggccaactacacctgcgtggccaagaacatcgtggcacgtcgccgcagcgcctccgctgctgtcatcgtctacggtgggccccgggactccctggtcacagggagaggcactgcggtgcccctgggcagtgacatgtggctggtgggtgaacggtgggtggtcgacgtggaccgagtggtccgtctgcagcgccagctgtgggcgcggctggcagaaacggagccggagctgcaccaacccggcgcctctcaacgggggcgctttctctggagcccgtggagcaagtggtcggcctgtgggctggactgcacccactggcggagccgtgagtgctctgacccagcaccccgcaacggaggggaggagtgccagggcactgacctggacacccgcaactgtaccagtgacctctgtgtacacagtgagtcctctctgccctgaggtcctcttctgttc

SEQ ID NO: 475274 - DNA, 737 bp, Homo sapiens
ctcctattatttgacatcttgtttaattctttgttgtctctctctctctctctctctccccccatctctctctctctctctccctctctccatctccttctctcttctctctctctttggttctgtcctttctctcactgagactccccaaactagcaaaggatgtctaactgcttctcaaattttctctgtccaaaccttgcattccagaatttgactctctcgaagtttcaaaattatgctttctgctttctcttcacccaatgtaatgaagaaccttgtaaaatagcctctgacgaacctcctctgaaatcgtgcctcagtaaatgggcttctcatgctgccttcatacctagtctttctgcttccttcttcattggaaacttacaattacggcaggagataaaggagaagcaagacaccttcttctcaagatggcaggaaggagacttgctgagcgagggggaaagaaccacttataaaacctcagatctcgttagaactcactcactatcacgagaacagcatgggggaaaccatcccaatgattcaattacctgcacctggtctctcccttcacacatggacatgatgaggattatgtagattacaattcaagatgagattcaggtggggagagaaaacctaactatatcaagtcatgctccgtttagtacaagacttagcactacccctcttttgcatcacagatctgttcaaatggatatttgcatatc

SEQ ID NO: 475275 - DNA, 1129 bp, Homo sapiens
ctgacatacacctgggagtctagagagacagagacagtctgtgttttgcaactccttctgttgcaatgcactcttatattggagactattggcttgaggagatgaaggatagacggttcagagagatgctcttccccaaggtagaaggctctggcaaagtttttcccccggaggtggaaccagccataggccctcatcagaggcagatgctggcactttgcttctcgtacagcctgcagaatggaggagctcgctgttacctgaagggatggactggtcggtggaatgtccggtgccgtgagttacctgctcagccctggagcaggggtcaaagctgggcggagctggacagccagtctcagcctcagcttcacatcctggataggcaggaacgtttccctatcatactcctgtcccgggtctcatgtgtctcagttcaaacagacactgccgtctatcttcaagctgcaatgaagctgagagccacagaaaacacctgtaccatggtttcagggaggagtctcttccctcagccgaaaacagacagctttgctggtcatctgttctccactgcgaggacgctgccactcagtgtggagagaggaaggggttctgcctatggtgcaagaaggtcggactcggcagttgcccctggtgaccagtcatctccattatgtagctatggctcgcagggcaagaagtcaggaagtgaagatcacaagcagactgaaactctgaagcttcatgatgaagctgttgtcacagttaatactcttggataatgtatttaaggatgcttaagtcatcaaatatttattaactgccaactatactatggcaatatattttgttcaacaaatgcttcttgaatgcctagtgtgtgaaaggaattatactgtgaaattcgggtataaaaacatatgctcttgatggtcttatcctccaaatgcttataaagagctaagtaataagccaaatgctattcaaaattaaaagtcattgtgtaattttaagaccttcaatacaatcaccaaggaaatattatgagacaaactccaatagctcattttatgcacattactcattttgataattaaactgatagcacttagaatatagttatgttata

SEQ ID NO: 475276 - DNA, 509 bp, Homo sapiens
cttaggcttgtgagattggagagaagacctgaagaaaagcaagactaaaggagaatcttacacaagaagacaggaaaatgagggaaagtttggaactccctagagacttgttgaatggctttgaccaaaatgctgataatgatatggacaatgaaatccaggctgaggtgatctcagatggagatgaggaacttgttgggaactggagcaaaggtgactcttgttatgttttagcaaagagagactggcagaattttgcccctgccctagagcagcaaagcattcaaaatgtgacttgggtgctgttaaaggcattcagttttaaaagggaaacagagcataaaagtttggaaaatttgcagcgtgacaatgcaatagaaaagaaaatcccattttctgaggagaaattcaagccagctacagaaatctgcataagtaatgaggagcagaatgttaatcaccaagacaatggggaaaatgtctccagggcatgtcagtgacctttgcag

SEQ ID NO: 475277 - DNA, 799 bp, Homo sapiens
agccaggattcacaggtccaggaatccaggggtaaaagtggaaatggcatcactcaccatcacccctagtgatccactagaaacatttttgcttcctgtccccatgacattacgttctgctggcctagtggtattagttccagagagacgaacgctgccaccaggagacacaacaatgattccattaaactggaagttaagattgccacttggacactttgggctcctcctacctttaagtcaacaggctaaggagggagttacagtgttggctggggtgactgacccagactatcaagatgaaatcagtctactactccacaatggaggtaaggaagagtatgcatggaatataggagatcccttggggtgtctcttagtattacgatgccctgtgattaaggtcaatgggaaactacaacagcccaatccaggcaagactacaaatggcccagacccttcaggaatgaaggtttgggttactccactaggaaaaaaaaacatgacccactaaggtgcttgctgaaggcaaagggaatacagaatgagtagcagaagaaggtagtcatcaactccagcttcgaccacgtgaccagctgcagaaaccaggactgtaattgtcatgagtatttcttccttattttgttaagaacatgtttgtgcatgtatacatttgtactaagaaaatatcttcattttatttcccttttcctttatcatgtgacataagatttattgacatcatatcagcattaagtgtttatgtaatattatttgggttgggggtttccacttgtac

SEQ ID NO: 475278 - DNA, 673 bp, Homo sapiens
aggcatttgggtggaaaggggagcatggcatttgttaagcaagaaaagagaggcccaggggtttctgccaaaaggaagaaggtagaagtgggtgttagggagcctgaatctgaagccaggaaactgcacagaggcaagagggcgtgcggtcctcaccagagcctgagggagagaggcactgccctcgaacctgccctcaagccccagctccacagcacccaactcgacgaggatggaaaatttcctgaagtgagaaatgcttttgccatctgccttgcccaggtagtctacctcagatggagtcaccacaaacaattgtgtgcgtgtctcctgatgtccatcgctgtcacggggggagaggccgactatcaccccactggagccctccttctagagggcatcagtggcccctatcctatctgccgctgggctaaggctagaatatatagagtcatctagattagcatcattataagctgctatttgtggtctcatcagaaaaacaagatatacaaaagagaggctgttatcccttctcaagtctaggcaccttaaaatatttatatttagattaatattagattcatattagataagtttagctttatatgaagattaggtttatgttcagattaagattaaattagattaagggtatatttagatttagagt

SEQ ID NO: 475279 - DNA, 1706 bp, Homo sapiens
ggcgtggctgattttctggagcaccgcaccgtcgaacgcacccaccagcctctgcctactgcttccggcgctcctaatcctccttccggcttatgaagggggaagaagcccacgcatgctccatagagctggccccgccctgggcgactcctatttataggcgccctgctcagcaatattgctcttcgtgcaccctcccttctctcttgagctcttgcctttgccttctgcagcagatcagctccaacgtcatgaagatatactctagtgccttgcaggagggagagctcagcagcccgtggtccacatgcatgcaccaagtcacaaggaggggtcctcagggaacctgtctttcaaattgcacccaagtgcgttgccaactgccagaagtactgcctgagcagatgagcaggtgcaaaattgtgatggtgagggatgtaatgacagtcctatgccagccgtgtttttctcacaaggtgtcctattcatttgttaatatagctaagcacttttattatgcatttcagagattttctaatctttttaaagcatttggattttacatctttgcacagatgggtaaaaatggagtgaatgtgtatgttgagtatacgtggggaggggagggtgtggtgatcgaggcagaggagactttacaaaatcgaaagcaagaatgagaaggtgcagcaatggatgaccagctcttttgctcttggtctgcaatcctcccttactggcaatgattgcatctaccacaatccaccaagtcactggactaattacaggttttccttacatgtgtgggttcctaaccttgaaaatacagtcataaactgaggtgtgccataacgtttcttaacagaagactcttgtccataagccaacctagaatctgctttccgcgcttgcttttttcagtgctaggaagggactgaagctccgaaattctcagttctagcattggaaggttaaaaggttttgatattttggttggcaaaactttatttacactatcactctaataattatctaatttatctgttctagaaagctcattatataacagattccaaacaaaactttgatctagaattgggtttggcttcaaccagtgctcaaagaaattagattctttagtacataccctcttcacttcttcctcagtagaaacaattgccaaattcctgccaaatgatttggtttcagaaatatcactgttaggttatgccaagagaatcaataagcagcacatggggatcatgttagagattctatttgagatagacatgcacctatagggtaaaacaattttaaaagaaggctttagcatttaccttgtgcttagaaacaaaattcatactccaaaggggaagaaaatttaaatatgaattctctctacaattaggaaccttttagcattgtatctttctgaaaaacatgtatttgaagccataaagagttccaacatcttggaaatatgaaacatacaattaacatagtgaaagccgagatattcaaaggcaacaataactaaaactgagacaactatcagtactcattaatcacataaatagaaatacaatttcttggtaagacattacttcaagtcacataagaatttttatgtgtaaattttagtattctatgtaattacaatgtgacttagcaaagctgtattttaacctgcttcaggaaaatcacatttc

SEQ ID NO: 475280 - DNA, 755 bp, Homo sapiens
ccacagcacaggagcccagcatgtgagtctcaagtcccctcaatgtctttcctcccctatgcaggttttaaaagactgacaatgccaaatgtcaacaaggctgtggaacgccccacacatttatacaatgctggtggcagcgatgaatcaaggaaaggagaagatatgaacaaatgtggtcaatatgtcatatccaatgagaagctttctcccacccttggcacaggggagcactgggcttctgagtgcattcagaaaacaagcaacacttacacctgtttagcctcatgtttcctaacagctttagaagtacaatatggccctaggtctttgtttcagtacagcactatcaggattagcttgaatgagcagacggcctcagttaacttaaaagcggagcatctgcaggcccctgctgaattatacagtcagcaggacagaggttaattaggagccgaccagcagagtcacagttcagatggacctgaagcttccagtcaactgctgataatagcataatttccaagtttaagagcaatacttccagggaaggcttgtgatcgcttttcggggccagttattacctagaccatttatgtatataaactcaaagcattgttttgttttgttttcatctcttttgtttcaaagtgttgctcctaaagttgttttaagatttataaatttgtcagatcaggctgtgatagaaatagttgttatttcagccctagacatcttagggctgcctcgtgcac

SEQ ID NO: 475281 - DNA, 752 bp, Homo sapiens
acgttggggtcagcggagtggaaaaaaggcgcctagttccctccttctgtcttggaaagcatccttttgcattcggtcagggacgtttcccgctattttctcttttgttggcttgggcaggaaagagcgtgcgttcctcttttcattcagcccaaacataaaacacgaagcttcccgtgctttaggggacatgtggttgtgttctaagagccatctgcagaaggacggttttgggaaagctgcttccccagaacggagaaacgtctccggagcgagcgatctccggcccgcagattcaataagccccaaccacacttggctccgtcacaaacctaatacggcagcccatattgttgctcgggaagtctccagccaaaccgagttcttatggctaacccctcgctcccctcctttcacggtgcgaacgcgaagaggctcggctccggggggcgggagagcagtactgcgccccccgcttcggtgtgcgccaggcctgcggacgcccgggaggctcggcgcggcggggctcgctcggcctcgagggcgcgcggttccgagggcctgggaacgcgagcgcaggcagccgggcctcgccctcccccgggccgcccgcaagaagccgctcgcagcctccatacacttacttgcctgccttaagctctttattaactcccccagaggagcgccggctgcggccgcgcctcctgcgccccggtggtctggctcctccgcgcggcgcacatgctaaacag

SEQ ID NO: 475282 - DNA, 1926 bp, Homo sapiens
ccagtaggtgcctgagtgtccactggaatgggtctgcgggcagtcacctgatgtctggaccccttttacttcttccactgacctttgggaggccagtgtttcagaaaaactcggggtgggagctgtgggaaagcccaatactagtgaggcaagaagaagtgggagggattctgaaagagactgaagtggacgaacttgagatgccagagaaaagcctgggctgctctcctggcagccaagagagaagccatggtggtggcaaactgagcaataccagccacgactcgtggccacaaaaatcagtgtcgaagctgccaagccttcgaggcctgactttgttgcctaacaggaaacccatggagcaaaacaacctatactcctcccccagaatggttgaccactataaggaaactcagagagcctacaatgagagaaaacccacaaaaacaccaaaaaagaaacagaagaaccctatgggctgcccactcctcctctcccaatctgaccctgtcaagatccacttgcaccagaggagctaccgagctagccaatactaactgctaacacatacataatcacacctggattaaacagtcctctggggatgcagcccatctgtaaagaagggccagtttttagaatgttcttaagttttgggaaaagcttctattttttctcttttggtggaagaagcttgccccttccaagcccgaagcatgatgttaatttaaccacataaccacacgcagctaaacccataccataagtgtgagcacactaagaaccagggagacttctttcaacttctctcagtgtatcattatcttatctgggactatgctgccgctgcctcctcctcctctgcctcctcctccccctcctcctctgcctcctgcctcctcctcctccccctccttctcctcttcttctcctcctcctccttcttcctccttctcctcctcttcttctccttcctcctcctcctccttcttccttctcctcctcctcttattcttccctctcctcctcctcttcttcttccctctcctcctcttcttcctcctcctcctcttcttcctcctcctcctcttcctccttcctcctcttcctcctcctttttcttcctcctcgtcttcctcctcctcctttccttcttcctcctccttcttcttctttcttcttcttcttacaaaggcaatacttatttatgagaaaggcatacagtaaacaaaacaaaacaaaacaaaacacgttcctctcatccctcccctacaaattctattcccttggagtaaccatgactaaaccatttggtgcatatttttttaaatctgacacttgccaagactcaaatacatactccatggtcatgttttagttgttgctgtttttagctcttgttttaaaatcaacgttattgagagaaatttacacacaataaaatatgcccattttaagtgtgcagctgggtgaattttgataaatgtgtgcaccctcaggaccacttccacaatcatgatatagaacattctcatcaatcagaaattcccttgtgcccctttgctggcaattccccaccctggccccaagcaaccccaatctgccctctgtcattataggttggttttgcctactctaggatctcatataaatggaatcatgcagtatgtactcttttgtatctgtttttttttaataaatcagcatgtttttgagattcacttgtgttgctatgtgtatcagtagttagttcttttctattgccgagtagtattccattatatgaatgtaccgtaatttgctcatccactcttctctggctggacattagagttgtttccagtttaggggtgatatgaattgcctgaaaagctgttatgttgtttttaatcattaaaaaagtagagagagtaaattcaaatgtat

SEQ ID NO: 475283 - DNA, 635 bp, Homo sapiens
aaagacttctagcctccaggacagcaatgggtttaaggtcaaagacacaggcctgggctcagattcttgccctatcactgaccagctgtgcagttatagtgctgggccctggcaaagtcaggaggttgtgcggtgggttctacagagggccctgtccagacatggatgccctggggcttgggagagggcttccagaatgtggggcaggagcacagacaatgcgttctttcaacagtgtgcggctccatgggaaaggctctgctgaaagtgaagtggtggggtccacagctgcccctctgggaaggagtggtatgggggcaggtggggaccagatgcctggccacagccgagctggggatgagcacatggaacaaccgcttctgatgcagatagaaaagaggcttagccacagccgttcacctgccccgctaggccttccatcttcagttcatttcaatgcctcccgcgtcagttccgctccagtgctgcagcagacatggcatggggtgcaaaaggggcacatgccctctgtcttcagtgggtttgcaaaacttgtgaaagagacaggtttaaccacaggaaccatctgaggacaatacaacccagcatatggctcagtggggaaatgaactgga

SEQ ID NO: 475284 - DNA, 954 bp, Homo sapiens
cccacccccggtgttcacgcaagagttgacacagctgcacctgctgctgccgtatgctgatcctaaccagaagctggctgggaggagaggccccctgggccatgaagcagagctcgggaatttgtcgtcttgcctttattagtcacaatattagtcgtgaaagccctgagaagtacctagagaatccactgagctccaagatagccctttcattgggatgctatatctgctgcacagacgcagaatacagcaggcccactcctggttcattggccacagtaagccatgtggtcacagctgaattcaacagccagagacgtacagtcctgcaagggagcccctcaaaggaggtgaaggatcttctgaacagcagcaccagccaccctgcatgccagtttgtgaatggttctactagaaactatgcaacccagacgtcaaggaacagagataagaacgacagccgacttctctgcagaaactatgcaacccagacgtcaaggaacagagataagaacgacagccgacttctctgcagaaactatgcaacccagacgtcaaggaacagagataagaacgacagccgacttctctgcagaaactatgcaacccagacgtcaaggaacagagataagaacgacagccgacttctctgcagaaactatgcaacccagacgtcaaggaacagagataagaacgacagccgacttctctgcagaaactatgcaacccagacgtcaaggaacagagataagaacgacagccgacttctctgcagaaactatgcaatccagatgactgatgacatcttcaaagagactaaagacgaatgcggccaccctggaattctatgctaaaataaacatcttttaaaaatcaaggcataatagaaacattttgaaatcagcaaaagctgagataattcactgccagtagttcataatgaccaacaatgtt

SEQ ID NO: 475285 - DNA, 1449 bp, Homo sapiens
tctcactttgtttcccagtatggagaacattgatagtccttggcatgaactctttagagagttatgcaaaataaatgcatttgacacttgtgattcactaatcatcagaggcaaggagtttagtgactctatacataataccttttaccatatgcggagaaccagggaacataatgaagttggttggttgctcctgagttcactggacaaagtgaagaaaggaaatgatgaactcagggattctaactccctgcctcagaagcagaaactgagtctcaaatcttccaagattgccctgagagacctccggccttttaccacggtaactgtgcactggggaaagggaaatgatcagacatttcagggactactggacactggctctgagctgatgtttattccaggggacccaaaacaccattgtggtcctccagttaaagtaggggcttttagaggtcaggtgcacgagaagcaatttgccttcagctggcagggtgaggaatatacctttatcatcctacctcaggagtatatcaactctccgtctttgtgtcataatcttattcagagagaccttgatcgcctttcacttccgcaagataccacactggtccattacattgatcatattatgctaattgggtccagtgattttgagtggggtccagaacaggagaaggctctgcaacaggtccaggctgctgtgcaagctgctctgccacttgggccatttgacccggcagatccaatgatgcctgaggtgtcagtggcagataaagatgctgtttggagcctctggcaggcccccataggtgaatcacagcagaggcctctaggattttggagcaaggccctgccatcttctgcaaataactactctccttttgagacaaagctcttggcctgttactgggctttgatggaaactgaatatttgactacaggtcatcaagtcaccatgcatcctgaacttcctattatgaactgtgtggtttctgacccatcttgccatgaagaaggactacagatggcccagacccttcaggaattggtccactcttctaggaaaaaaaaccatggcctgctgaagtgcttgctgaaggcagagaatacagaatgggtagtagaagaagcttccccattggctgaacccaaccagaagcttaaattcacagaagccttttgggtaagagcagagtgtaaaggaggcataatgaatctgtataggccaaatagaaaatagctaaatatttcagtctaagcatgtatccttacattgtctgacaaatcttatggcttagaagcatggtatgctaacttaatatcttcttcactctactaatagaaaggaaaaacacctttgctccctgaatacatgttactaactagataaggattaatttacatttttatccctatcctctctattttttaaaaatattactcatt

SEQ ID NO: 475286 - DNA, 683 bp, Homo sapiens
atctaccagatggttgagctgccaccatcatgggcagacctaggttgtaaggtgaatgttgtctcaagatactctccagtctatttgctccctggagttaaacatgagctgctcagagaattctccttgactctcaggaggaatgtatggccgcagttccatgtggggaatcagcctacattacttgctgtcttaagcaatgagttgctcaatacccattatctgaggcccaacacaggattatcccagtgggaagctctgctaacacaggtggctgagcagcctggcggcaacaagcctgtcctggaaatatggagaacctcctgggagaagaggcagcaacctccagatccttccctcttcctgtcccaccagatttacagtgaagaagaagaatcaagtgtacatcccaatctgaattactgcattcaaagaaaaattaccactgctagccactctacaagaatagcacaagaacaagaaagtcacctaacttgaagacttggtgaccaaaactcatccagcaaagataaataacaaagaacaatattgctgattaatctcttcctaggatgtacaaagagaaaacacaaggaaaaacaatgaaaccatggaacctgagcaagaaaactaaagtcatagtaaagtaactaaagacaaataaaggaaaaaacaaaatgaaa

SEQ ID NO: 475287 - DNA, 805 bp, Homo sapiens
tctgcagcccaactaaaaacttgctctcacttcaatccagccaccttcctcccagaggaaactggggaacctgaacatgactgtgagaaagttgtaatagaaacctatgcagccatggaggatctcagggaaattcccctagaaaatccagactggaccctctttatagatgggaaagaagtagcagtaatgcattgtaaaggacatcagaaaggatcggatgaaatagctgagggaaataagttagccaaccaggcagccaagtcagcagcacgaaagcctcagagtgccaacacccttgaagcccctctaatctgggaaggctccatcagggaaataaacttcagtattctcctgcagaaacagaatgggccatttctcgcagattcactttccagccatcaggatggttgcagtcagaggatggcaagctccatttgccagcctccaaccaaggagaacctactaaaaacagtcaagcaggttgttaatgcttgtgaaatctgccttaaaaacacctccctcaacagatggcttcttctccatcgagctcagagaatgggaagttatccaggggaggactggcaaatagacttcacccatatgccaaaatcaaggggcactcagtacctcctggtgtcagtggatacgttcactaactgggtggaagcatttcgatgtcaaacataaaggacctctgaggtagtaacagtattaatcaataaaataattccccgctttggactccctaaatacctccaaagtgacaatggctcttcatttaaagcagctgtcactcagggga

SEQ ID NO: 475288 - DNA, 700 bp, Homo sapiens
cctattatgtgatatttgaagtagtctcagctttcttcagtgtataatggcccctgcttttgctagaatttctctccctaacaagggagtggggctttcaggcataattagaaaagcatgtgaaaagagtaaagctcccccatcacaacttagtgactgggagaagtatctagtgactgactgtcctaggacccctcagacagtgacagatctggaagacagttgtccgggacaggagagtaagactgagaaggccgcaccagtgtccaggagacagttaacctcctggccctcaatggtcaagcatacctggggctctgtgagggtgacggcatgggctggtgcttgccctgggcaccctcagtcctgctgctggatcatctgcccaattggaagtggcaatgggcgcctcgctggatcaggagcacagcagacaccctgctggatcctctggatggatggaagtcagcggcgggtctgcgacggtggcaaacagcagtggtggacggcaagcaaaagctcagctcgagacttgatcttcaatctctgatatcctttcttttgcttgattgattcagctattgatatttgtgtatgctttatgaagttcttgtgctgtgctttcaactctatcaggtcatttatgttcttctctaaactgcttattcttgttagcagttcctgtaacctttgatgaagg

SEQ ID NO: 475289 - DNA, 788 bp, Homo sapiens
cagccagaggcagagcagtgagatctgacagaagatacctaatgatcaaagtgaagaaaaatgaaggtgcttctcgtctgcatcccacagagtccagctcattaccaaacctgtccactggggccagtgatggccctcatccgtgtctgcactgtgtgtatgttggttatgaggggctcttctccctgccagaactgcagccaagcttctggagggcagaggcctgtcttcctccttaccatgtcctctacaaacctctgtatttggcgcatagtgggagctcacaaactatcgcaaggacaaaaaaccaaacaccacatgttctttttctttcttgccatgtgacctctacaagctggctcccctttaccatctgccatgagtggaagcagccctcaccagaagtagaaattggtgccatgcttcttgtacagcctgcagaactgtcacccaaacaaatttcttttctttatgaattacccagtctcaggtattcctttatggcaacacaaacagatcaagacagctagaaagtgatagaagaaaaatgtataaatgttgtttaaaatgtttaaaggtatttttattaattaagttttgtatataatttaatacattaatcaaaacttccttaaaggttattgttgcacccatgaactcgtcatttacatgtatacatatgtaccaaacctgcacattgtgcacatgtgccctagaacttaaagtataatttaaaaaaagttattgttaaaatgtgtcagttttgagaacagaataataagatttat

SEQ ID NO: 475290 - DNA, 512 bp, Homo sapiens
tctagcactatgagaatcagttttggaaagctgacgacatttggaaatacctggccacccttttctgagctctctgattcctctgctttttcagctttggtggaccagtggtgccagatagcaacttttattgaagaggccgtgtatggcagcagcagaggcactggtccttgtggagcagagatactccataggcagtgtgcccagagtagcagctcagaggcagttcttcagtcatatttatacccacttttaattacatgcaaattaagaggtgtacaaagcactaaggaaaagttcagacccctgagccagaaaacttcattttccacattaagatcaaaggagtatgcgggagagatgtggcattcccagtactgggggttctgttataacagggtcagagagagggccagaaagggaggagaaaagcaaaagactgcccagaaagtcagccagtgaaagcaagtgactcatgtatactttcatgtactcattaatgtagcaaatat

SEQ ID NO: 475291 - DNA, 1643 bp, Homo sapiens
ctgggtgacatctcttctgtttaattcttacatctttctcccatgttggatgcttcctgccctcaaacatcggactccaggtccttcagttttgggactcagactggctctccttgctcctcagcttgcagacagcctattgtgggaccttgtgatcgtaggtgaggttgagagtgtgacccatgaggaggtgtgttacactggaaaagaactgtttgaattctccaatttgtataaacagaaatctggagaacaggcatgggaatggatattaagggtatgggataaaagtggaaggaacatagagttggatgaagctgaatttattgatttgggcccactaagtagggactttgcttttaatgttgcagctcggggagttaaaaaggttctaatactttatttgcttggggactgctggcctttcaccagggtaactgtgcactggagaaagggaaatgatcagacattttggagactactggacactggctctgagctgatgctaattggaggggaccaaaaatgtcattgtggtcctccagttaaagtaggagcttacagagtgtcagaatgcatgattgccatagccatacttagcagctggcagagtccccacactggctccctgactggtaggatgagggttattatggtgggaaaggccaaatggaagccattagagctgcctctacgtagaaaaatagtaaatcaaaaacaatatcgcatccctggagggatcgtggagattagtgccaccatcaaggacttgaaagatgcaggggtggtgattcccaccacattcctgttcaactctctcatttggcccaccagaagcaattttccttcagctggcaaggccagcaatctacctttactgtcctacttcaggggtatatggactctccagctttgtgtcataatcttatttggagagaacttgacctcttttcgctttcactttgctatcactttggtccattatattgatgacattatgctgattggatccagtgagcaagaagtagcaaacacactgggcttattggtgagacctttgcatgccagaggatgggaaataaatccgactaaaattcagggaacttctacttcagtaaaatttctaggggcccagtggtgtgggacctgtcaagatattccttctaagatgaaggatcaattgctgcatttggcccctcctacaaccaagaaagaggcacaacgcctagtgggcctatttggattttggaggcaacatattcctcatttgggtgtgttactctggcccacttgtcaagtgacccgaaagcctgccagctttgagtgtgatccagaacaggagaaggctcctcaacaggttcaggctgctgtgcaagctgctctgccacttgggccacatggcccagcagatccaatggtgcttgaggtgtcaatggcagataagaatgctatttatagcctttggcaggccctcataggtgaatcacagtggaggcctctaggattttggagcaaggccctgccatcttctgcagataactactgttttttttgagagacagctgttggcctgttactgggcttgggtggaaactgaatgtttgactatgggtcatcatgtcaccatgtgatctgaactgcct

SEQ ID NO: 475292 - DNA, 670 bp, Homo sapiens
ctctctctctctctctctctctctctaaatcacacacacacatctgatgacaggcacagggctctgagcatcagccaatgcgactcatatgtctggaaatcctgctgctgctgctgctgctgctgctgctgctgctgctgctgctgctgctactggagaagtcttgtttggatgctctccccactaccatttggttgaggagtatattggtgggctttgtagttactagcggggacttggctttcttctgttctgcatacctggagcctagagctaatttcctccatgaatttcctcctgggagaagagcaattccggctgctttgcttgactggagtgtggagagaagaacactaggtgcttctggtaaagtctttgggtctggggtgatggccagtgctcttaactccagcccactgacccagtggggtggagcgatgcagggaaatgaggatgaggcaaagaggatgggaggatgggacctggagaagacctgtgggctttttgtgggccccaaatgcggatcgactatctgggctgcatgcggggacttcacctatgtgatagcccttttaaaagggtttaatcaacaatgttgaaataggcaacactgtctttttaagatcttgatttttaattttatatttattttccagttacaaaaatgaac

SEQ ID NO: 475293 - DNA, 540 bp, Homo sapiens
agcagcgtggctgaaacttgaatgtgcatgagtcacctcgggatcttgttagacataggttcttggggatcattcttaaagattgtaattcagaaaatctgcggaggggcccatgaatttgcatctctgagaatgctgatgttgccagtgcctgagcacactgcgtcatggtacactgcgtcagtgatcattagatttctcaagctgctgctgaagcccttgaagcagtgtgccctggaggcaggcttctttgaagatctgcgaaatatggccatagagaaaaacacgcagccatattttcctctctctcttcctgaacgttatatgacagcttgggtaccccacacaagactctttacccctgcatatctttccctaagagaatttttgatttgggaagaagaagggatagagaatgcaattaaggacccagggctagtgtggaacagatgaaagtgatttgtctttcaggaaggataatgagtttctgaaagtagaaatagtgtagggagggactggatttttaagaagcctgaaaaa

SEQ ID NO: 475294 - DNA, 554 bp, Homo sapiens
gatagtgttgcttttttcttgtaaacatgtttaagttcctcaacagtccactggatgaaggcaagatgaatcctttttctgctggtcccttccatcttttgtttctcactgtcaaagtccccccacagggcaatagccctctctctccctccttctctgggttgtgttgcctggcctctccaagcagccactgggaatgctatggcctctgtgggtcccatccagagacactcacggtgtgtcttgttggaggtggtgccaatggcaggggcaggggtggtcaccagggctacctagggcagctccatcagacaagcaaggagaagcaggaccaaacaactttgggctgttgcataaaccagcctaaggaaataacagataattttctgcaaaatttagcactgtttccattagtgaaatttgacagtgaagctgctcataccagagtataatgtatataataaaattgaaatcatggggtagaaaacattagtgaaaaatttaatgatatatttttaagtgaaaaaagcagattacaaaataatgtcatatga

SEQ ID NO: 475295 - DNA, 831 bp, Homo sapiens
tcccacagcagctgctccagatgggccactgccaccatcactacttactgacagagctccccacagtcatatcccagggagaatcctgaaggggctgagacccgcgtggctgtccggtcttcacctccccatcaaactataatatcaagtagatgatcagtagctgcaccactagaaagatggcggagcaagagcaaagaaaaatccctttggttccagaaaatctcctgaaaaagaggaaggcttatcaagccctcaacgccacccagtcaaagcaggcacttttggcaaagaaggagcagaagaaaggaaaagggctcaggtttaagcgactggaatcattcctacatgattcctggcggcagaaacgtgacaatctaaaaatgctgtgtatagtggaaccttatgtgacctggggatttccaaatctgaagtctgtccgagaactcattttgaaacgtggacaagccaaggtcaagaataagaccatccctctgacagacaacacagtgattgaggagcacctggggaagtttggcatcatttgcttggaagacctcattcatgaaattgccttcccagggaagcatttacaggagatctcgtggttcttgcgccctttccacctctcagtggcctgtcatgctaccaaaaatagagtgggcttcctcaaggagatgggcacacctggctattggggtgaacgcatcaatcagctcatccgccagctgaactagacccacgtgccaaactgtggtaaatttttatcaatgaagtggaagcatgtgttttgctgttttaggaatttttatcaagtatcttcagagaaga

SEQ ID NO: 475296 - DNA, 552 bp, Homo sapiens
ctgggcctgaacactttcgttgtgggtttcacagccgttagaatgttagagctggcaaggactttatcaccaaattcttatcaccaacacccctcctttagcagaggagagaaactgaagctcagagagtttctgttctccccagcttccggttctctccctgcctttccaactacagcaggtcctccaataatgtcgtttcattcgatgtcatttcctcataatgttgatgaagaaaaagaaggggccactgtggagttcgtgtggtctccccaggccaagtccaggttctaccacctttttaatgttttccttgattgctgcagtgataacccaattattcccctttactcccaaactttttctgattatatcctaccatgtagcattgcacatcatagcctctcatatggttctctggcttttccttagaattgtgttgccttcttaattatatttaatgctctttgaaggcaaggcttatgtttatatttttatcatatatactattcccctcccatccgttggaaatatgttcaaagaccctcagtc

SEQ ID NO: 475297 - DNA, 599 bp, Homo sapiens
catcttctcacttataagtgggagctaaacaatggggacacatggacataaagaaggagataaaaggcactggggactccaaaaggggaggcttccctcagctgtctgtgtccttggctgtctgctcatatctagcactggaacacaaaaatctaatgggaatccctggcaatgccacactatatggttctgttgctgggctatttaactgggaaaaatcccagcatgagtacttgggtcatggtcaggggaaggtctgtaagactaggagtgatcttggaacatccaaaaaggacacaggagagaaaagagagagaaagaacaagggagaaggagaaagagagaagaagagagaaaaagatgagaggagaggaaatgcagtgactgtgccagaatgtggtgccctccgcttcagtctggcatgtcagcaactggctgtggctgttggctaatactactcagtggtgctcgtgttaattccctttccagtagaaatttcttgtggttaatatcagcagctaccatgtagcaagcatcatgcgggcttttacatttactctttaaaacaaccatgtgaggtaggtgaggaaaccaaggct

SEQ ID NO: 475298 - DNA, 667 bp, Homo sapiens
caaaagtaaggaagcgcactcacttacatggttgttggcattggtcgtttgactggagccctctgttcctcaccatgtgcagctttccacaggctgcctgagtgtcctgacacatggcagctggcttctcccaaaaaaccaagcaatgacattggaggcccatctggtctggagcatgacaggatgaagcaggatgaacaggtcaaggcaagaggttcaggctggaggctgtggacagcaggtcctggatggtacccaagaagtgctgccaggatgggaatagaatctaaaggacactcaactaagaatgagaactcacttctgcaagaatggcaccaagccattcatgagggatccacccccatgacccatatacccccaagcagaccccagtcccaacagtgggggtcacatttcaaaatgagattgagtggagccaaacaaacgatatccaaaccgtagcagtaacaaacaacaatcaacacctgtgactcagtcaccaacagttgttgctaatgctttgaaacatcatttaagttcatcaccattttgaagacacaatacttatttaaatccatcagtagatcttatttaatgtattaataaagaagcatctaactatatcacatatttttaaaaagtatttgataactattcttcagtataa

SEQ ID NO: 475299 - DNA, 1717 bp, Homo sapiens
gaacccagacactgccctccgttgcctctccccagcgctcccaccttttcgggtgtgaagctccacacctgcctccatagcactttgcctgtccctaagagggctcatcggagaagaaagaatggctgtcagccacctgccaaccatggtccaggagaccctgaagagtgatgaacttgtcacagaacgccagctccctgtgtgccagcagtcctgtaaatgcgcacaagctcctaggggctgccagtctcttttccagagaaccatgtgcaggggtagcccctggtcaaggagaatgaatttgctgttgcaggaatcggtgaccttcaaggatgtggctatactgttcacccaggaagagtgggggcagctgagccccgcccagagggccctgtacagggacgtgatgctggagaactacagcaacctggtctcactgggactcttaggacccaaaccagatacgttttcccagctagaaaaaagggaagtgtggatgccagaggacacccctggaggcttctgtcttgtattcgagagagcttggtgccttatccaagcactgtagcgtctccctgtcagctagcattttgcaggctgtggagtatttttataaaccttttgctacagattcttcacgacgtctatagatctaagcaatatttgctttgccgttgcgtgctttaaaacttaacatgtatgtactttactgtagaaacctttctacaactggcttttttcagatccatgttgaggcacgtagctctaggtcatttctgaaattgcacttttccttcagtgatataccttactttatccagtctcctgctgctggctgtgtaagttatttccagactttttactattatggataatgctgacctgaatattcttgtatatgtttccttatatacatggaccttgtttgggagtttctttgcgtgtattcatagatgtagagtgctttcggtgtcctgtttaaatcatctttcctatcttttgatccatgagggaaggactttgtcttgtttgctcttgtatcttgggcaatactaggtctcagtatgtatttgttgaataagttaatttctaataatatttacctttttcttttttttctgtgtaaatgttgtcaaaagtttgtcttttattagacttttaaatgactaaacatgtgactttgctgatcctttctatttttgtttattttattaatttttgttcttcactgtttccttcaacttttttggagtttattctgttttttcccccttttctttattttaagcatttatttttaattgaagtaatacaagcatttaatgaaactgtatgaggtttgtggtgaacaatggtggctctttccccccacttccccattttcccctctctagaagtagccactccctcttcttttagctgattatttgatatatttgcttccatttctgcaagtgacatgtttgtgttgctacctcttgacttttcagttttagacatgtattgaattctttctatacgaagtgaggcttaaactcagcccctgccccttcagtgactcctgcttgttggatttccattcgctgtcctctcggttgtagtgtagctttgacttggtcagtagtcaatgtttacattcttaaacactagtcataactgagctgtgtcggaaattatgaccacttttgctttcctaagcaatgtattcctagaattc

SEQ ID NO: 475300 - DNA, 1260 bp, Homo sapiens
gctgagggttatcctctagacccccagtgacccatctcgcccctgtggctgacaagatggagctccgaggagggcacccaggtccccaggaagccttgccatttggtcatcgccctccgtttcctctgtaaaatgaggattgcagtccccccatcacaaagctgttgtggggatgaaaccgtcatgcaggtgcaatggaatggtgcttgtgcaaacaatgaaacggtttttcattgctggtcatacagaacagtcctgacatctgagaaggaaggaaatgcaaaagagcttgatcctggctgctgcctgggacctgagaggggacaggttcctagcacaccttcttcttcattctttaagtatgtctatttacctgtattccatattattgtttccatagcagcaggtctgaatctctttctacaaactcagtgcaagaaactgatgtcaatctatttcccacattttcaacttgacccctccctctgtgggaatatacatctgaacccctctggtggggaattcaaccttcattattcttgaagacttttctgtcacaagattgttgccaagtttctggaggactgtaatgtggtgctaagcaagcaggagggagttgcacccagttgcttcttcactcccgttgtttggcaagtgggaggaagtgtcacagctcttttatttctgccacccacagcttgaaccttcatttgatcattatccactcaccttcccttatgctttgtgaaactcttgggcatttctgtattaccagctacttaaaaaaaaatcctgttttaaaaggcataaatctattaatttgccgtctgtttaagagtcttcaatagcttttgtaatgcaaataaaatgaaaattcttgtcgtggttcccaaggacttgtttggtttcagtcctgacttcctattcaccatccactcatgtgcccacctctgctgctttctcagctccagcggcgacagcttcttcaagttcttgatgctgttcaagtgcatcaaaacatgctcttccccacagcctttgcagagactcttttctctgctcttcgtaaaattgacttcttatccttcatgactcaacttagaagtcagttagttgaagacttttacactactcttctaaagtagattctataatgctgatctcaaaatcggcactattttatccccctttttacttagcatagaacgaactcatatgtatgttaaattgctaacctacatatatttttaattccccact

SEQ ID NO: 475301 - DNA, 537 bp, Homo sapiens
ctgagttcatgcatttgagcgctgtaacacagagtgatgctacagaagacttggaaaattgaggatccagggacttatggaagtggggacactggtgggtttcaaacacaggagggcactccagcaaggtaccattttgaaagcccagcagactgcatcctaccctgggaccccacagaccttgcaactccagattccttgagccccattgacctccccctaacgcagaccctgctgcttctggctgctgcctccatatccaatgtgggggccactggaagctacccaccatccccatcagcagggtaccgtacatttagaagcaccctgagaacaggctaccccaccagcaactaccacctggggccaaagtgtgtgctcccagtggccctcctaaggcttctgccaatgaaagcaaccccagcaacatggctagggtgtagctgctggtcctcccatccaagcattccactgagggcctggaaatcaccacgcccctgcctaccatagctagtgcctatatataccatcgggggg

SEQ ID NO: 475302 - DNA, 1832 bp, Homo sapiens
aggtcctcagaacatgtggaacgtgggtgtgggcacagacagtggctgccaggagtccagacagagcctgtctaggactctggcctgttcccaggtcaaggaggcaggtccagcagggagagaggcccagatggagggatgggaggcccctgtcagtttattctcaggcacctaccccagtggctcaagtgggggagatgagccagtgacaggagggcctagtgcagccaggccaggggctcccacagtgtcagcagggtcttgtccttcggtccttctcaccctgctccccacacaagacctcaggagctccaggctcctgctggctcattcaccccagtgggttgggggacagagtcttttgcccaaaacttccaggcagcgtcccagccctgatcattctcagaaggaagtcaaggggctacagacaccagtagacctacagaaagggacccttgagcagaaacacataacactccagggcacctggtctcctcaccaaagactcaccactgggggcaccaaggcaggcaaggagagagccccaattcatgcaggaaggcagccagtttcctctgctggccctccagggcagtggtctgtgcccttgacccaggccagcaagaccaggttcttccccatgggagcatatcctcccctcgctccatctcaggactgggaacaagatctgcaccagccacccctggagctggtggagggctttgcacaggcatggcccaaagcagacccaccgtgggatggagctttccaggggctacccccttctagctcccattatcagtcccacaatctccaacaggcccaggggagggagattctgagggccggccactggaacaggaaacctgtgcaaagagtttgggacttcttgatgcccaagcaatgaaatgctgatttggaggcactggctcttgtcacagaagctgagaggtaggtcaggaagtcaccctaggtacctctccttcactgtccacacccaaacaatccccaagtcctatttatttgacctccagaggagtctcaaatccatgctttctcttcctccccactacaacctcctggccaagtcatcattctctcccatctggactctgagttccctcactgtctccccaagtcttcttcagcctgttctccactcaacatcaagcacagtccctggcacctagtaggggctcagcttacactcatgccgtggacggacatggctgcttttaccttccagcaggccttggtgcaggagctttgcttctcagggtgtatgtcatacccctggatggtggggattgttgctgctatttttggcttgctgggaagaaaaataacaacttgtcctcattattaaaactggaggagaaatactacttcaccagagtaggtaggaatcacagtgagaacacctggtgttttggccacaggtccacttagtagatggtctctggttggaattatcattgctcatgtcctaccctgtgggaaaaaaaaacattttattttgaaataattgtacacttgtaggaagttgcaaaaattgtacagagtcccttgtaagcttccctcagctaatcttaatgctgacatcttatataaccacagcacaagatcaaaaccagggaattgacattgatattacaatgctactagactctagaccttattcagttctcattattgttgagatggtaatcattcctctctctctctccgtttctatgcaatttcatcccgtgtataaattttgataaccaccaccacagtcaagacacagaactgttcatcatcacaaatgcacacccttgcactacctcttc

SEQ ID NO: 475303 - DNA, 2343 bp, Homo sapiens
ttcatgtggagacaaaggctcatgtgagaacaccggctgggctgggtccctgtgtcagggaggtggcagcctgcggcaggagaagcaggcagtgcagatgccagatctcgcggcaagatgcattctgcttgacaccacccacggtggcgcaccggcagctccacaccccagcctcgatgctctgggtctctctgaagatgcccgccctggggccgacatccttgtgtgctggaaggccctgcttagctggcttcacccacccgctgctgccctacgggcccccttgggcatctgaccctttctgtgaaaggagctccaggcagtgccctgagaccatggctcgggcagagcggtgggacatgagagctcacaggcacagcggcagccttcatcctgccttgaggagtcacagtgctcctggccccgagctgcagagaaagcagggcgtggccacagagagtggatgtctgtcttggtgggtggtcgctgtcctgttagccagcagccaaaacgggggcctatggcaacagtccagatgtcagaccgtgggctggtggggaggccttgggaggcagagtggcgaaggtagaaccttgctcctggccctgggggcagcgtgcaggggccatagaggctgcctgagcaggtggggctggaagccaccgccagccgcctttgccaaagtcaccctgctgatgatgccttatttctccattgcttactgaaaccataaaactggacattttatggagaaaaaagcaagctccattctcctgaactttaaatgcccatgtagctctttcatgagaaagacatgtgtctgccattgcataaatgcacacatatatggacatttcagccaggaaaattagccatgttgagctgacgggaaaggctcatctttactctgcccaagcatttttattaaggatggaaggatgcaggcacccaccctctattccctgcctccccggtactggcatgaaacgccttttgtatgttattttgctgagtgtgcaaaacaacttcctgaggcacattgtagttttgttcccattttatagactaggaagttgaggccgggcatggttagcaccttcccagggtcacatggctggacagtgctggggcctagcctctgcagcaaggaccaacgaggccctagctggggaggtgggagtcaccgcagcagccccgacctgccacttccttcacctcggagtgtccttagaaacgtctgagtgcaaatcctgaagctgaattctcgtttctggctctggacagcttcactcatccgctctggtcgtcatgtcaaagttcaagcaggcagacagacttgattagatttgattttatcccttgtttgaattattcatgcctctcctctaatctccccgggaataatttaataacgcacggcagcaggagggcgcctgggtgagtggtgtctgcgacgtgctggccaagaactgccgccatggctgccgagcaggggctgccccacactctctactttaaagcagagcccgccctgagtatgcagcacccaggaccccgcttgggacagtttccgggcaggtagagctccagcacctgcacagtcctgcatcctggtccctgacacttcggcttccagcactctccctagtcctgtgcctggacccctggactctgctcctgtcatctcccacccaggccacgttcccacagccccagactgtgggggagaaaaccccagccacagttctctcctgtccagatccttccggaggtacctacgtatttctcttgggcaaggtcccagctcattggcctgggactgtggtttgaatgtttgtcccccccacagctcaggctgaaatccaattgccattgtcaaagtgttgagaggtggggcctttacaagatgattaggcctcaagggctccaccctcaagtgttcagctcctttcctctaggagctgctccccacccctcccaggcatgggccacagcagccaagttcaggccacgtggtcctgtcgcctcggccacattcatctggctggggtggataactgaccctagcgtggccaagcagatgccttcttctaggaatttgtaatggaagcgaagattctaattgagtccgggctggggggtgaacccaggtgaagggaactcaggccccaggtcaacagccctgcatcataccctcaccctcagagaggcggcagaaggaagggacggaaggcgatgtgctgggagctgcagacgggacctggggcctgggcctcacatgcattggcacaaacttacttgttcataatcatctcttatctttttttttgtttctttgcaaaa

SEQ ID NO: 475304 - DNA, 1253 bp, Homo sapiens
agacaggaacgatgaaatgatggccaagcccttccctccagccttggatgagctcctgcctggagacccccgccctagcagcctccctggcccggccgacctcattcctgcaggcgagagggtgcatgtttctgagagttcccagctggagtcgctgatctcagggccgagggcacgggctgctgacagaggagagaaccagggcctccgcctgctcaggcctgctgcgacaaaacaccgaacactggatggtttatacacagcagaaacttcgctctcacaccgaacactgggtggtttatacacaacagaaacttcgctctcacagttctggaggctgcgacgctgtgctctcttcctctccatcccaccccagctctccttgggtgggcagatgcaccggcagcctctccgagagacctctatgccttcttaaaagacaaacttacacaaattaaatttagcagagtttaactgagcaaagaacgattttcggattgggcggcccccaatcagagatattattctaaggatagaattaaagctggccaccaaaatttagctctactgattttcatcaaagcattgttcatgacaatgaaaactctcaacgtataacaacagtgaatcggttgagcaaaatctttggtcattaaaaaccatgcagtcaaggagcaaaagctattgacatgtgaaaatgttcccgataagctagggtctgagagcctcgttttcatggctctgcaataccccgctgtaggaagtaccgttattgacctaacgaaggacgctcaggctgtttcccctccttttcgatgaaggttttgcacagttaatttggcacctgtgtgtgtgatgatatttgtagataaagttctagaaatgtgtgaagctttgtatccagaaatttgggttgaaatcaccaaagcaccctccacggcagacacaccaatcacactccagcagacactgtcctgaattctgtaaatcccactgaggagtcatcctggaaatcacacacttgtccttaactcagcaaagttggtgtcgaccaacaccctcatcttcctcccagatgacacagagaccgtggaacaccctcatccccgcttatgtgtcactgctgttgcacatttaaattgtgtctttttcctgtgacttccagggtctgtttctagtgtctttgtcagtgatatcagatctaaatattttccccagtttgtctttttttaattcttattttggccatagag

SEQ ID NO: 475305 - DNA, 1431 bp, Homo sapiens
tgagagtcagggaaccaatttagaaatcgattgatccttgagttgtaagataaggaaagttggaattagaatggtggctgtgggaatagaaagcaagggatggagtcagaaacagggccgacttcataggcttgaagtcatgcctccaatctcagacgctatgtccaccaaaggctccgtggttctggcctacagtggcagcctggacacctcctgcaccctcctgtggctgaaggaacaaggctatgacgtcattgcctacctggccaacattggccagaaggaagacttcgaggaagccaggaagaatgcactgaagtttggggctaaaaaggtgttcattgaggatgtcggcagggagtttgtggaggagttcatctggccggccatccagtccagtgcactgtatgaggaccgctaccttctgggcacctctcgccaggccctgcatcgcctgcaaacaaatggaaatcacccagtggaagggggccaagtatatgtcccacagcaccacgggaaatgggaacaatcagaaccaagcacctccaggtctctacacgaagaccaggacccggccaaagcccccaacacccctgacattctcgagatcgagttcaaaaaaggagtccctgtgaaggtgaccaacgtcaaggatggcaccacccaccagacctcattggagctcttcatgtacctgaacgaagtcgtgggcaagcagggtgtgggctgtattgacatcatggagaaccgcttcattggaatgaagtcccgagggatctaccaggccccagcaagcaccatcctttacctcgctcatttagacaccaaggccttcaccatgggccaggaagtgcgcaaaatcaaacaaggcctgggcttgaaatttgttgagctggtggataccggtttctggtacagccctgagtgtgaatttgtctgccactgcatcgccaagtcccaggagcaagtggaagggaaagtgcaggtgtccgtcctcgagggccaggtgtacatccttggccaggagtccccactgtctctctacaaggaggagccggtgagcatgaacgtgcagggtgattatcagccaattgatgccaccgggttcatcaacatcaattccctcaggctgaaggaatatcatcgtctccagagcaaggagtactggtttttgaataaaggactgaattttcattttgctctggactccatgaatgatgtagtcagccctagtcagaagatgttttgctgggagaatcaacaggactttgtgattcaccgtaagaaacaatgtagcagtcaggatgacatttgattaaacaggtgaaatgcaaccattttcatatatgaaacagcatccccctttaagaaaacagacttctctgaagcttctcttacagctctccttggattagttttattctgacttga

SEQ ID NO: 475306 - DNA, 890 bp, Homo sapiens
gttgtcaacttctgatggccagccactacactcctcgtcttcaaggctctcgtctcctttgcaaacttcttaagctacgactgcactgattctatcatgctaactagagttccttggtcttccaagactctcagttgcttctcctcgactccaagtcctgcatctctgcaccaggacctggaaactctcctcagacaatatggtccgtattgtttggtcacagctatgaggagtaaaaagaagatgtcttcaaaacataaaaaagtacaaaatgaagtaacaaatgctgatgtagaagctgcagcaagttatctagatgatctatttaagataatggatgaagttggctacattaaacagcaaaatttccatgctgtggctgccatagataagaattcctctgatggaactgggaagactatattgaaaacattctggaagggactcacaattatagatgtcaatggcattaagaacatttgttacggaggtcaaaataccaacattaacaggagtttggaagaagttgattccaacactcatggatgaatttgagagatttcagacttcaggggaaagaagtaactgcagacgtggtgaaaatggcaaaagagctagaagaagtggagactgaagatgttattaacttgctaaaatctcaggataaaactcttggattacctctttgctgccctaagttctttatcttgcttctctcttcatcttaactcacacttgcctataagcccgtccacctaatgagtaatcaaataacactttcacttaaacttcatatttactatctgtacacattttaagtttagagagatttggctcttttaatacattatggtttgaggtatcatttctaaaactacttttcagaattt

SEQ ID NO: 475307 - DNA, 585 bp, Homo sapiens
gagaattcctacagccagaaagttgtgagggtttgggcggggggcggggccacttgcttcagggtgatgggaaacatgataagaccaatgaattccaagaccatgagcacattagcatatgttatgtgctataaaacaaatttcttggtcagaagcaatgctgtgctgaataccatgaagaagcttatactgagtttggtaggactcactgccaaagtattgcctggtctggagaaggtagagacaagggagagttgggatttctactatttcctactagcatcatttgtctgccataagatgccaaaatgcagggccccagatttgcaaggtatggaattagagcacaaggctattgaggcagtaacaatcagcttcttggcatcaaacactggtggcccatttttcatgaggagactaggaaatggtactccatattcattgcttccacccactctaagttctgatttctcccctaagcccttgattggtgtatagcaaacctagtttgttttatcataggatggttgtttccatattaaattctagtttctgttatcctgtatgttttagaaccaaggtgac

SEQ ID NO: 475308 - DNA, 557 bp, Homo sapiens
tgctagcactgccatagaattgctcagggtcctcctggaaccataagacatcccgggcttctgtttgaagctgaaggttaaagatgaggccagaacaacctgacttcggggtcacaggcgcccccacctgggtgctgctgcggggtccccatggagcttgctcctgccagtggccaaaccagccagctggatcccgcactcatttgctcacacctggtttggctgcagggcccacatggagcttgctcctgctagcggccaaatggccggctggatcctccactcacttgctcacatgcttcctcctgcaaggggttgagcaccatgggctgagtaaatggggcacccccgtcgcaaatccaacaaagcggtcgagaaaaatcctgcatcagacagaggcatctcagcaggctggctccctgggaacacagatggagctcgagaggagtaggttcaggactgtttctgtgaatggagaagaggtttcaaagagatttttctgaaatttcattctctggtttgtttgtgtgctgtacaagtaagatggatcacatgtt

SEQ ID NO: 475309 - DNA, 596 bp, Homo sapiens
cctgaatctgggtcacatgcttatatcttagctgcataggagatgggaaaggggatgtgtcattttcaggtttcttgtttcacaataccaaaatcttatggagctacaatcaaattggttcatcttggttcaaatttccagccctgtcaatcagcaggactggcggtggcactgattagatatgactgccgaagccgatcccttcagaagagaccaatgctaaaggaaagtgtatgtgccaagtccttggagatctttccattcaataagccaaggagaaaagatgccatgcagatacacccaaagtgtgtccctcttggttgtggcccatctttactgctcgctcctagtgtgcaagtttgggcttgtgattgtgtttatagcaagaagagccgcagacaaaatccttcagacaccaagttaaagaaggaaggggtttattcggccgggacatcagcaagactcctgtctcaagagccaagctccctgagtgagcaattcctgtcccttttaaaggctcacaactctgagggggtctgcctgagagggtcgtgatccattgagcaagcagcggatggagtctcactctgtcacct

SEQ ID NO: 475310 - DNA, 603 bp, Homo sapiens
aaccaggtacctcagttggaaatgcagaaatcaccaatctttgatcacgctggggactgcagactggagctgttccttttcagccatcttggaatgctgctctggaggaacctgtggagagacagtctaagaccatgcaaatatccttccagtcatcaaaatgtccctctagatttaatatccattgatgaattttgcctgatccaaccttataaaaatgctttcttaagtcacccagtgaatctacctggctccgggctggtactgagtgttgtctgcacagagtcctgtgatgtaaactgtctatgggtttctgatctgtggataccagcgcctgttccaggggagatggtggagtgtgcagtggactccatgagggtccttagctttggtgaaagcatcagctatagtagttacggaaagggaccggtggtgggcagggccctggaactcccaagattatattccctttgtcttccactaccagggtggatcgggaagcaccatcagaatcccacagtggatatgttggtcaattgatggtgtttcataagttccataggctttcttcactgtttttcattctttttcactttgttcctc

SEQ ID NO: 475311 - DNA, 653 bp, Homo sapiens
tggagaaatttacaagagttttagggcatggatgggatgtgccttggtactgagggcagatgggcagctctctctatgtggtctatattagtgcgaatatcacagaaagtagtgattaatgagaactgggagcctgagggagagacaaaggtttcagggaggagtaagaatagggtcatcaactcaacccagtttgccggaaatggaaacatactgaggatgattaccaaccacataccacaagagaaacatctgtacacaaacgtggagcacatcattaatgccaaccctggcaccattctcctgtggcaagtttccttattcctcacagttattgattcatgtgctttttctgggctctttgttgaaaagatctgtgatttagagagacacaactttcatgtgaacaagcatcacctggggattgtgttaaaatgcagattcagtaggtgtgaactgaaatactgcacttttgataagttcacagatgctgttgattctgctctggggaccacattctgagcaataagagcttagatctgtgctgtccaatatggtagccatgggtctttcgtaggtattgagcacttgaaatgtggctagtgtgacagagaattgaattttaaattttattccattttaattaatttaaa

SEQ ID NO: 475312 - DNA, 1185 bp, Homo sapiens
gggcaccctttctctgaagatgagaagaagaaaccgaaagactaggagatatggagttttggacactaacatagaaaatatggaattgacacctttagaacaggatgatgaggatgatgacaacacgttgtttgatgccaatcatcctcgaagtgttgaattcctggggttctttgtggcccaggccattgtccaaaatcaaaagaactttaaaagtcagtcccctactagcaatgtacttctggacttcagggacaaagcatcagtggaaccagtccagaaaaagagttttcagtgtccaggccttcttcttgtacaactaaaagactggcagctggtgtttgtcttttcccttcaaggtttggtggttagcagctttgtatataagaatgtgccttttgatgaaagaactttatctttctacaatgaagagtggaatttctatgtttaaggaataagaagccactatatcaatgttgggggtatttaagttacatatattttaacaacctttaatttgctgttgcaataaataccgtatccttttattatatctttatatgtatagaagtactctgttaatgggctcagagatgttggggataaagtatactgtaataatttatctgtttgaaaattactataaaacggtgttttctgatcggtttttgtttcctgcttaccatatgattgtaaattgttttatgtattaatcagttaatgctaattatttttgctgatgtcatatgttaaagagctataaattccaacaaccaactggtgtgtaaaaataatttaaaatttcctttactgaaaggtatttcccatttttgtggggaaaagaagccaaatttattactttgtgttggggtttttaaaatattaagaaatgtctaagttattgtttgcaaaacaataaatatgattttaaattctcttaaagtggtccaaattatgtgtttataaaataaacataagactatagaattaaaaattaatatatgtatttgtaatttgtcggaaaatctatcaaaatgttattctattttagcaactactatgtaacatatctgctttgattagatatttcagaaatctgtgaattttacagccatttaatatctttactgtatagtaagatgtagaaatggcaataatggcatagttcaaatacttcattgtgtt

SEQ ID NO: 475313 - DNA, 892 bp, Homo sapiens
caggcttcaattgtcatgtacaaagaactatgaattctgagttgatctaaaactctacgggagctctgctccgggctggctgctgcactgcgattccaccgggcacgcagccctgcccggagatgagaggggccaaaaacagcctcgagactctcatgtcgatgagtcaatggctgaaaccacagacgggctccagtcccctcaagaagacacagatgctaccgacggtgagatccaaagcggcctgaagctgtctggagatgccagcgcctgtggaggttgaagtacacacgcccagggcacccgctgcagcccaggccgcctccggcagctgctgaaaacctaggattccatcaggaaggaacccggaaaggagaggaaccccagcctttctgcaggcctgcagcacgacctgcttcaactgctgccctggaaggagtccgaggcactccaatggggaccctcatgctgtccctgtggacatttgcactggaactattctcaggaggagcgcacaaggtagatcccttgcatgtgcagtttacagtaggcttcgtgcacctacgacaatctaatgtctctgctgatctgacaagaagtggagctcaggtggtaacgctgggctgctggccactcccatcctgctgtgccacggggctcttaatgctaacggtagagggtgtccaggttcttggcgtcttgaagaaagaattggacaaaatgcgcaagcaaagcaaggacggaatgaagggatttattgaaaacaaaagtacactccacagtgtggtagtgggcctgcgcataggggctcaaagttacagagtttttgtgagtttaaataccctctatttggggtacgccctatgtaaatgaagaggatgaagtaaagttt

SEQ ID NO: 475314 - DNA, 498 bp, Homo sapiens
cacttccccgtctgaggagaacagcagaggcagcgggaaagacgcaggaggaagctgggggtgggattctctgtggacatggctgtgaaagtcatcaggggatcggtgttgttgactctgtccttgcaggagaatggagctgagaaccacagagcagaggatccctttgttttgagtgtgaggacaacgtgtccaggggccagtgtggcacctcccataactgacctggtgactcagcataaggtctccaggacggaagagcctgcacaccatggctggcacagaaccataaaacttgtgagcctggagcctccagttcttatctcagtcctgtttctaccttccaggggctccagggcaagtgcctgccacctcagcgtcctgcctctgcccactgatctgacctccccttctagcatcaacccctcgcccactctgttccagacacgggcttcttttctgtacacaccacatcccacgcttgcctagggtgttcac

SEQ ID NO: 475315 - DNA, 569 bp, Homo sapiens
gcagctgaccaaagatataggagtctcatgcagttgtggtggtatggtgtgggcctgtgcttgtgtgtatgtacacgcgtgtaacatgtgcctgtgcatgtatgcatgtgtgcatgtgcctgtgtttgtggctgccatgacaaaatcacaaactgagtggcttaaacaacaaaaagttactgtctctcagttctggagactggaagtcagaaatcaaggaggggctgacccatccaggaaaagggctttcccacaagttgaccagaaaagttcacaaaaccaaaacctctttttaaaggacgaatatcttctggctccacaaatacggatacttataccaaacagaaaggttttacttgtggcagttagagagaaaagagggttggggcagcagacaagtaaaccagaaactggatttgccccagtaggaaaagccatttgttttgagaagcagagatccacaggatatttgcagatataaaattgaaaatttggattgacctttcttcacattttctagaaaatcattagcttaatctctgatatatgcaatgctttttctaatcctt

SEQ ID NO: 475316 - DNA, 519 bp, Homo sapiens
taacgtacaatttttaagttctagttatcataggtggtgatgggataaaagatgtttacacaggagtgtgatctttgtaacttcacttcagcctctggttggctgctttctgcaaccaatcagactgcttgcaggctaccacttcatttacatgaggccctgacaaccaccctctatcctgtttctatgagttcaacatttttagattccacacataaaaatattcatgaacatgatagctcatgcagatatgttgatatttctgaaacatgggtggaaatactttcctgctgctgcacttttgacctgagctttcctgatgatatgtcaggactgatgtttccacttgccaggagttcaaaagcttcttctcaaaaccagcttgttaatgtttccacttgccagagaattttatataaaggatttgcctgaaatggataattttatgagaactgtttgccttcatatggcacttgaagagaccacttggaggacacttcagactctaaaatatagagc

SEQ ID NO: 475317 - DNA, 606 bp, Homo sapiens
gctggtgatataggtaaacagggtctggagtgggcctccagcaaactccagcagacctgcagaagaggggcctgactgttagaagcaaaactaacaaacagaaaggaacagcaatgacatcaaccaaaaggatgtccacacaaaaactccattcgaagcttaccaacatcaaagacccaagggaacaaaactggatggagaatgagtttgacgaattgatagaagtaggctttagaaggtgggtaataacaaactcctctgagctaaaggagcatgttctaacccaatgcaaggaagccaagaacgttgaaaaaaggttagatgaattgctaactggaataaccagtttaaagaagaacataaatgacctgatggagctgaaaaacacagcatgggaactttgtgaagcatatgcaagtatcaatagccaaatagatcaaaccaaagaaaggatatcagagattgaagatcaacttactgaaataaagcatgaagacaagattagagaaaaaagaaggaaaggaaacaaagcctccaagaaatatgagactatgcgaaaagaacaaacctacatttgactggtgtacctaaaagtgatggggagaa

SEQ ID NO: 475318 - DNA, 554 bp, Homo sapiens
gcagcaatatatgctattctgcaatatttgctgttctgcagtctctgctggtaatacccaggcaaacacggtctggagtagtggacctccagcaaactccaacagacctgcagctgagggacctgttagaaggaaaactaacaaacagaaagaaatagcatcgacatcaacaaaaaggacatccacaccaaaaccccatctagcagaaaagctgaaaattccaaaaaccagcgcgcctcttctcctccaaaagatcgcagctccttgccagcaacagaacaaagctggatggataatgactgacgagttgacagaagtaggcttcagaaggtcagtaataacaaacatctctgagctaaacgagcatgttctaacctgtcacaaggaagaatctcatatccagccaaactaagcttcataagtgaaggagaaataaaatcctttacagacaagcaaatcctttacagacaagcaaatgctgagagattttgtcaccaccaggcctgccttacaagagctcctgaaggaagcactaaacatggaaggaaacaacc

SEQ ID NO: 475319 - DNA, 734 bp, Homo sapiens
gaatacacatttccagctgcaatttgccttcgcaggattgacatggcaatgcgggttcttttttggttccatatgaactttaaagtagttttttccaattcttcaggaccctcagctgcaggtctgttggagtttgctggaggtccactccagaccctgcttgcctggatatcagcagcagtggctgcagaacagcggatattggtgaaccgcaaatgctgctgcctgattgttcctctggaagttttgcctcagaggagtacctggccgtgtgaggtgtcccgcctctactggggggtgcctcccagttatactagttggggttttcctgagtggtcttatctgtcctgtgcctttacagctttcaatataatgacttccaactgtagctcagtagaatttggagactatttacagatcctgcttattcctatgaaccaaccagtgatctctggctgcaactcagaaaaacaagagggatgagtaatgtaaaaacaaaaatctgaatcaaaattctaattctgggcacatgttggaatcagctagcaatcccacatcagcttggttccaacaattgcctaactcatgggaagccttcttatttagtttatttgggataattttgctattttgctttactgttgttgaatatattgctgttgtactctctgtgtaggaatgcaagataaggttactcaatattctcttgaatggaacacttattaatcttccag

SEQ ID NO: 475320 - DNA, 3143 bp, Homo sapiens
tgggccgcctctacttgcagcagcttgctaagtccagtcaaagaggaacaagttctaacccaatgcaggtttaaaacataaccaaaagaacaaaagagagagcttgacacaccaatcttgaggtgttgtgccattctctgggaacatacagatgaaatgacctgaaccctgcccaccatttaaccaagtaagaatacaattctctctcatttaggttatcacgctataatagagaatggactcattaatatgggattacagaggaaggaatggttaagaaaaagacatggcctctgactgctccaaaaaaggataagcagggcttcacagaagaggtgacaggtaataaagatgattgcacgtgtctgtatatgtccctttttttctattgtgctcagaacattatctttcactcaaaaattgttatcctaattgtcaaaaactatgtggagatctaagtgataaaaccactcagggttgggcagggacaggatttttctaactctttttcctttcatcacaacgggtagtatattttatattaaaagcagaagctcactatatgctggtgtttaatgcattggtgaaaatcagtaatttttctatgttagataataagtatgcaattaacatatttttaatttatagcaggtttctggatggcagatcattcaaccttctttttcttgagttttctactctgctgtcatcttccactcatttctgcttcattttgtgattcgttaacagaaaaggaagtggaatggaataaaatcccccaatacagtacaattatacattaatggctgtaatgtgaagagcatcacacacgaagagagccatcttccagaaataagtttatacactctctcctctaattgcatcaggactttaccagataatgttcttccagatctgaaaaggaaaatgcctaaaagagcttccaaactcatttttgaataatactaggctacaaagaattacactgtgaattcattaagggtaacaccaaatcactaaacagcactgtttgtacagaaatgtcgaaaagctgtggaaataatttagcggccatttctgtaggaatttcgcttcttttactcttagtggtttgtggaattgggtgtgtttggcactggaaacaccgtgttgccacacgatttaccttaccgaggtttttacaaaggagaagcagcaggagaaaagtctgtactaaaacattcttgggcccccgcatcattggcttaaggcatgaaatctcagttgaaacccaagaccacaaatctgctgtcaggggaaataacacacacgacaactatgaaaatgtggaagcaggtcctcccaaagctaaaggaaaaaccgataaggaactatatgaaaacacagggcagtctaatttcgaggagcatatctatggaaatgagacatcttctgactattataacttccagaagcctcgtccttctgaagttcctcaagatgaagatatatacattcttccagattcatattagcttttcaaaatattgacttttgttattggatgataaatattcactgtaatttttcaacagcaaagacaaggaatcaaactaaatgttgatcaactgtagactggataaagaaaatgtggtacacatacaccatagaatattatgcagccgtaaaaaaagaacaaaactaacatgggaacagaaaatcaaataccacatattctcacttaaaagtgggagctaaataataagaacacatggagagaaggagaggaacaacagacactggggcctacttgagggaggacagtggaaggagggagaggttcagggaaaaaaaaaatatcaggtactatgcttagtacacacatgatgaaataatctgtacaccaaacccccaagtcacaagtgttcctacataacaaacctgaacatgtacccctgaacataaaattataattaaaatattaaaaataattcactgtgatttttattgtactgatgccattcttaatcaagttctgataagtggatggtctctgcctatctccacctttctgaatcctatgtgtatcgctgtggattaattctagatatcttctccaccctccttgcaccagactaaatctgtattatgtgatattgattcttccttctaaatattacccgttatctctttcctttatttctaccattatctttatctggctcagaattattgtcataggctcctaactgttcctcctgcttctagtttctacccactcaatcaattaccgatggtgttgccagatttatcttcagaaaatattcctaacagccacattatttctttcacttaaaatgttttaatgccccctctttgcaaaagacataatacccataatttgaactccaaaatttatggttttccacaattggttccaattcacttttccagtgacttctcttactatctctcatttctttgccttcagcagaatcatcttaaaacctgccaaacttatccttccttcacagctttgcttttctgcctcttctctcaagcctgcttcagatcataagttcttccacacatctcctgaatcactccaaacccgcatttacctttttattttctgatataagctttgatgcctcttcaattcttaggacatttaaacatatgaatgttgccacagcattttattacctagcttcatatgaaaatgtcttaaattcccacctaaatgaaaagaaactgcccaaatgcctagaacatcacataaggcactaaatgcctcatgttttactgacgggaattgaattgtacattttgctgagtagttttgagaaaaaaatctaataaattcatctgttattcatccatacaaggaatatttgttgtgtcttctatctacttgctattgtgctgtgcacctgagggacatgggaagccattgtggctggagtttcctgaggaagggttggagtgacacctgctgcgttggtgaaggagggaatgggagaccatgagcttctcataagtcttagtacgtggctttgactctattataggtgcaacgggaatcagtaaagggttttaagcagagacgtgatgatgacactagcatttttaaaagatttactgggttgagaagtgactggaaa

SEQ ID NO: 475321 - DNA, 1335 bp, Homo sapiens
agcggagctgccttgatgggcgactcgtcctgcaagcatgatgaccatcgtgagcgaattgcggcagagtgtaacactgtcctccaggtcctgcaggacctgcttttggagtacatgggcaatgctggatgtaaagaaagaagtaattccctcaattctgctatagataaaatgaccaagaagaccagggacttgcgtagacagctccacaaagctgtcatggaccacgtttcagattctttcctggaaaccaatgttccacttttgaaagatgtggatggcctggactgcacagctagtgcaattcaaggttgggcagcctgggccattcacatagtcacctcagagatggacaactatgagccaggagtctacacagagaaggttctggaagccactaagctgctttccaacacagtcatgccatgttttactgagcaagcagaagcagctgtggaagccctcagctcagaccctgcccagcccatggatgagaatgagtttatcaatgcctcctgcctagtatatggtggcatccgggacatcaggaaagcagtgctgatgataaggacccctgaggacttggatgactcttactttgagatggaagatttcaatgtcagaagtaggatgagcatccagacaaaagacaatcagctgatagctggccagagtgagcaaaaagcgaagactgcagaacaggtggccagcttccaggaagaaaagagcaagctggacgctgaagtgtccaaatgggacaacagtgccaatgacatcattgtgctggccaagcagatgtgcatgattatgatggaggatggacaagcttggctgcaccatcacagaccactgccccgactcggcctgcaagcaagcccggcctgctcgactcagcctgccctgacttggcctgctggcctacctgcactgcatcgccctctactgccacctgctcaacagctgcagcaaggtcaaggccgagatgcagaatctcggcagggagttcattgtccctggaatggacagcgctacgtccctgatctgggcaaccaaggacttatgaatgctgtggtgcagacaatgaaggcatcctacgtcgcctctaccaaataccaaaggtcacagggtatggcttccctcaaccttcctgctgtgtcatggaagatagaggcaccagagaaaaagcccttgttgaagagagagaaacaggatgagtcacagagcgagattaaatgggcatctcagaagaagcacttgaacccggtgcaggccctcagcgagttcaaagccatggacagcatctaagtctgcccaggccagctgcccccacccctc

SEQ ID NO: 475322 - DNA, 786 bp, Homo sapiens
ggtgtcagccatggaagctgcttgctgtatgcctagcccagctgcagcctcacagggagcctgtgcctgtaccagcgcctggagctgcccgccccactgccgcccacatgtgtggctgtgtgcagtggctggaccccaccctcgatcacacactcctcgctgctctgtgcctggccaagcgggcagaatgaacccagtgggcccgagcaaaactcggacagaggaaccactggccacagaggtttccagctggcaaagtgacagcccaaggatcccaggtgatgtcggcaacatcaatcgaaacattaaatgcacatgccttttccgctcagaaatttcacgtctaggaatctactcaacagatattcatgtatgtgtggaaagatataagatagtaactgaagcattatttaaaatcaaagtctagaatagcctacaagtccattaacagaacattaaatcaatattagaacacctgtataatggaacatctatatactgtacatctcttaaaaattagctgaatatgtgctgatatgggattttctataagatccgtaatggagagaaaagcaaggtggagaacagtttgtatagtaagtgcccttttatgttacaaatgcgtgtctatattttattgttttataacagcaagatgctatggaaactatataataaaccattaatagtaactatctctgacttggattctgtgggaggatagtcttttcaattcttcaaataagtaaacattttttcagtgattgtatttagggttggtgaggg

SEQ ID NO: 475323 - DNA, 815 bp, Homo sapiens
ggctgctagcacattgtcacctctcgctgctagcacgttgtcacctctcactgctatgcaaatgtactctttgtttctaccagtgttctcagacggagatgaggagattgttgggaacaggagcaaaggtgacccttgttatgctttagcaaagagactggccacattttgtccctgccctagagatctgtggaactttgaacttgagaaagatgatgtagggtacctggcagaagaaatttctaagtggcaaagcattcaagaggaagcagagcataaaagtttggaaaatttgccgcctgatgatgcgatagaaaaatttcagaggctgtatggaaatgcctggatgtccagacagaggtgtgctgcaggggtggagcactcatggagaacctctgctagggcagtgaagaagggaaatgtgggctcaggacacccacacagcatccccactggggcactgcctagcggagctgtgagaagagggttattatcctccagagtccagaatggtaggtccacatacagcttgcatcatgcacctggaaaagctgcaggccctcaatgccagccagtgaaagcagctgcgatgggagctggtgggttgaaacggcttcgatatctagcctccatccccgagaagcagcactttagcttggagacctaaatctgaaccaaatcaattttttttgtagtatgaattaaaaggaatgttacttttcccttcctacattgtttgattttaaatttctgtgatttttaagagtgtatcctgatttatagaattactcagaacctttctagaaatgggctat

SEQ ID NO: 475324 - DNA, 1075 bp, Homo sapiens
gtcttgttttgctgtaatgggagttccagaaaaaatcaaaactgacaatggaccaggatattgtagtaaagctttccaaaaattcttaagtcagtggaaaatttcacatacaacaggaattccttataattcccaaggacaggccatagttgaaagaactaatagaacactcaaaactcaattagttaaacaaaaagaagggggagacagtaaggagtgtaccactcctcagatgcaacttaatctagcactctatactttaaattttttaaacatttatagaaatcagactactacttctgcagaacaacatcttactggtaaaaagaacagcccacatgaaggaaaactaatttggtggaaagataataaaaataagacatgggaaatagggaaggtgataacgtgggggagaggttttgcttgtgtttcaccaggagaaaatcagcttcctgtttggttacccactagacatttgaagttctacaatgaacccatcggagatgcaaagaaaagggcctccacggagatggtaacaccagtcacatggatggataatcctatagaagtatatgttaatgatagtatatgggtacctggccccatagatgatcgctgccctgccaaacctgaggaagaagggatgatgataaatatttccattgggtatcgttatcctcctatttgcctagggagagcaccaggatgtttaatgcctgcagtccaaaattggttggtagaagtacctactgtcagtcccatcagtagattcacttatcacatggtaagcgggatgtcactcaggccacgggtaaattatttacaagacttttcttatcaaagatcattaaaatttagacctaaagggaaaccttgccccaaggaaattcccaaagaatcaaaaaatacagaagttttagtttgggaagaatgtgtggccaatagtgcggtgatattataaaacaatgaatttggaactattatagattgggcacctcgaggtcaattctaccacaattgctcaggacaaactcagtcgtgtccaagtgcacaagtgagtccagctgttgatagc

SEQ ID NO: 475325 - DNA, 4777 bp, Homo sapiens
gtggaggcttttctctagggtgaaggacaagtcgacgagagatcccgagtacatctacagtcagccttacggtaagcttgcgcgctcggaagaagctagggtgataatggggcaaactaaaagtaaaattaaaaaacaaggaacttcagatctaaaagattggaaaagaattggtaaggaactaaaacaagcaggtaggaagggtaatatcattccacttacagtatggaatgattgggccattattaaagcagctttagaaccatttcaaacagaagaagatagcatttcagtttctgatgcccctggaagctgtttaatagattgtaatgaaaacacaaggaaaaaatcccagaaagaaaccgaaagtttacattgcgaatatgtagcagagccggtaatggctcagtcaacgcaaaatgttgactataatcaattacaggaggtgatatatcctgaaacgttaaaattagaaggaaaaggtccagaattaatggggccatcagagtctaaaccacgaggcacaagtcctcttccagcaggtcaggtgctcgtaagattacaacctcaaaagcaggttaaagaaaataagacccaaccgcaagtagcctatcaatactggccgctggctgaacttcagtatcggccacccccagaaagtcagtatggatatccaggaatgcccccagcaccacagggcagggcgccataccatcagccgcccactaggagacttaatcctatggcaccacctagtagacagggtagtgaattacatgaaattattgataaatcaagaaaggaaggagatactgaggcatggcaattcccagtaacgttagaaccgatgccacctggagaaggagcccaagagggagagcctcccacagttgaggccagatacaagtctttttcgataaaaatgctaaaagatatgaaagagggagtaaaacagtatggacccaactccccttatatgaggacattattagattccattgcttatggacatagactcattccttatgattgggagattctggcaaaatcgtctctctcaccctctcaatttttacaatttaagacttggtggattgatggggtacaagaacaggtccgaagaaatagggctgccaatcctccagttaacatagatgcagatcaactattaggaataggtcaaaattggagtactattagtcaacaagcattaatgcaaaatgaggccattgagcaagttagagctatctgccttagagcctgggaaaaaatccaagacccaggaagtacctgcccctcatttaatacagtaagacaaggttcaaaagagccctaccctgattttgtggcaaggctccaagatgttgctcaaaagtcaattgccgatgaaaaagccggtaaggtcatagtggagttgatggcatatgaaaacgccaatcctgagtgtcaatcagccattaagccattaaaaggaaaggttcctgcaggatcagatgtaatctcagaatatgtaaaagcctgtgatggaatcggaggagctatgcataaagctatgcttatggctcaagcaataacaggagttgttttaggaggacaagttagaacatttggaggaaaatgttataattgtggtcaaattggtcacttaaaaaagaattgcccagtcttaaacaaacagaatataactattcaagcaactacaacaggtagagagccacctgacttatgtccaagatgtaaaaaaggaaaacattgggctagtcaatgtcgttctaaatttgataaaaatgggcaaccattgtcgggaaacgagcaaaggggccagcctcaggccccacaacaaactggggcattcccaattcagccatttgttcctcagggttttcagggacaacaacccccactgtcccaagtgtttcagggaataagccagttaccacaatacaacaattgggagcccccacaaaaaatccctacaggggtatatggcccactgcctgaggggactgtaggactaatcttgggaagatcaagtctaaatctaaaaggagttcaaattcatactagtgtggttgattcagactataaaggcgaaattcaattggttattagctcttcaattccttggagtgccagtccaagagacaggattgctcaattattactcctgccatatattaagggtggaaatagtgaaataaaaagaataggagggcttgtaagcactgatccaacaggaaaggctgcatattgggcaagtcaggtctcagagaacagacctgtgtgtaaggccattattcaaggaaaacagtttgaagggttggtagacactggagcagatgtctctattattgctttaaatcagtggccaaaaaactggcctaaacaaaaggctgttacaggacttgtcggcataggcacagcctcagaagtgtatcaaagtatggagattttacattgcttagggccagataatcaagaaagtactgttcagccaatgattacttcaattcctcttaatctgtggggtcgagatttattacaacaatggggggcggtcactgtagagcctcctaaacccataccactaacttggaaaacagaaaaaccggtgtgggtaaatcagtggccgctaccaaaacaaaaactggaggctttacatttattagcaaatgaacagttagaaaagggtcacattgagccttcgttctcaccttggaattctcctgtgtttgtaattcagaagaaatcaggcaaatggcatacgttaactgacttaagggctgtaaacgccgtaattcaacccatggggcctctccaacccgggttgccctctccggccatgatcccaaaagattggcctttaattataattgatctaaaggattgcttttttaccatccctctggcagagcaggattgtgaaaaatttgcctttactataccagccataaataataaagaaccagccaccaggtttcagtggaaagtgttacctcagggaatgcttaatagtccaactatttgtcagacttttgtaggtcgagctcttcaaccagtgagagaaaagttttcagactgttatattattcattatattgatgatattttatgtgctgcagaaacgaaagataaattaattgactgttatacatttctgcaagcagaggttgccaatgctggactggcaatagcatctgataagatccaaacctctactccttttcattatttagggatgcagatagaaaatagaaaaattaagccacaaaaaatagaaataagaaaagacacattaaaaacactaaatgattttcaaaaattactaggagatattaattggattcggccaactctaggcattcctacttatgccatgtcaaatttgttctctatcttaagaggagactcagacttaaatagtcaaagaatattaaccccagaggcaacaaaagaaattaaattagtggaagaaaaaattcagtcagcgcaaataaatagaatagatcccttagccccactccaacttttgatttttgccactgcacattctccaacaggcatcattattcaaaatactgatcttgtggagtggtcattccttcctcacagtacagttaagacttttacattgtacttggatcaaatagctacattaatcggtcagacaagattacgaataacaaaattatgtggaaatgacccagacaaaatagttgtccctttaaccaaggaacaagttagacaagcctttatcaattctggtgcatggcagattggtcttgctaattttgtgggacttattgataatcattacccaaaaacaaagatcttccagttcttaaaattgactacttggattctacctaaaattaccagacgtgaacctttagaaaatgctctaacagtatttactgatggttccagcaatggaaaagcagcttacacagggccgaaagaacgagtaatcaaaactccatatcaatcggctcaaagagcagagttggttgcagtcattacagtgttacaagattttgaccaacctatcaatattatatcagattctgcatatgtagtacaggctacaagggatgttgagacagctctaattaaatatagcatggatgatcagttaaaccagctattcaatttattacaacaaactgtaagaaaaagaaatttcccattttatattacttatattcgagcacacactaatttaccagggcctttgactaaagcaaatgaacaagctgacttactggtatcatctgcactcataaaagcacaagaacttcatgctttgactcatgtaaatgcagcaggattaaaaaacaaatttgatgtcacatggaaacaggcaaaagatattgtacaacattgcacccagtgtcaagtcttacacctgcccactcaagaggcaggagttaatcccagaggtctgtgtcctaatgcattatggcaaatggatgtcacgcatgtaccttcatttggaagattatcatatgttcatgtaacagttgatacttattcacatttcatatgggcaacttgccaaacaggagaaagtacttcccatgttaaaaaacatttattgtcttgttttgctgtaatgggagttccagaaaaaatcaaactgacatggaccaggatattgtagtaaagctttccaaaattcttaagtcagtggaaaatttcacatacacaggaattccttataattcccaggacggccatagtgaaagataatagacactctaaggacaggctcaatttc

SEQ ID NO: 475326 - DNA, 850 bp, Homo sapiens
gaatactacttggcttggattcctggaaaagatactacctgacttggacccctggtatgatcgtgtccctgagaggcttgttttcaatctgcctggtgctcagagatatcgagtgcccacaggacaatgctgtccctcccactggtgatgaaaggtactgggaacttgttacctataaatgccaactgaccctcagctgcaggtctgttggagtttgctggagatccactccagaccctctttgcctgggtatcagcagcagtggctgcagaacagcggatattggtgaactgcaaatgctgctgcctgatcgttcctctggaagttttgtctcagaggagtacctggctgtgttagatgataacttccaaaaatccaaggaatatagttctgaaaaaaaaatagacttcatcaaattgaaaaatgccttctgtgtgtattacacatatttaaccacagaactgggactaaaacaaatgtggtgattagaataacaacacagtatatatatgtatttactctaatgatgtggaaatgacacaagaagcaaagttagagaggaaggagagaaggggttgcagaaaagttagcatgctaaagactttatttctaattgctaatagtcgaaggttatttaaaatttacaaataaagaatcatatggatgcttaagatttaagatataaagacaagcatgcaagacttgcgcactacaaactacaaatattattgaaaataaaaaaataaaatgtatttaagtggaaaaacatcccatgtccccatgtctatggacttaatcttgttgtaatggcagcattccccaactgatctacagattgaatattatactt

SEQ ID NO: 475327 - DNA, 1860 bp, Homo sapiens
ccatttctcatgagagtgaagttactcagcagtctgacaatgacagcacgagttatgaagacaaccatccagaacatgttcagtgactgcaccctgcaagctctcagcaaagtaagcaggcactgcttggctggggtagctcggtttctgggctcccagttgggcctgggttggctccagctctccaactcagaactgacagctggcacccacaccctcctcctcagcttccgggatggcctgatgggcaaagagaaagagaatggaatctggatgacagggctgggcagagcgagtccagaatgctataagcctgtttgtcctcctcttctggccccaggaaaggcttactgggtccagtgtggcaccatactaaggactcgaccctgggtccttgattattactgcaacagagaaattaatatcttccatggctgtgctcatcaacagaaagaagcagcacaagccgaggctctgcctctggccttccaaatcacatgtggagtccccagtctccaggccacagactggttccagtctgcagcctgttaggaactgagcggcacagcaggaggtacatatggatatacatcccttcatgtacattgtagcataaaaagaggcatctcactgtgcaggtcaagctgctgctgcagccactgatgtacccattagaggggccacccaatgggaagaggatgaactgggcatgaagagccctgagcacctatcttcttccaaggcaatataattatgacagaaataatgttcacagattttaagtcaacaatgaccctcttaaatattcttattatgagttttgtaaaggtttgtgttttatcttttctctgttaataaactgagaggttgctgagggtaagaatttggtgttactcacctttctatccatgggcctagaacagtgcctggagccaaaaaagagctgacactgtgaagtgaaatgaagtggaaacttgctctagtctcctgaatctttcagaggaatcagttgtctcctttttgcttaccttgctatactttcatttgtaatactctggtcactctttcgaatgcctcagggacataagttgccggttcagtgggaatggggggaggaagaaatttatagaaatgttttctaggttgtattatttatgaatttattggtggtatttattatattcccaatagatggagagtttcaatgttttttaaaatgtcattttggtattcttagcagcaagcctagatcaggattttgtaaaaaaaaaaaaaaaaaaaaggaacacttgaaaaaaaaatctctaaaatagaatattaatattaagaagcctagcataaattcactgatgtgatagatatgtttatttctgcaaaaacataaagtaaaaatcagagcttagctcatttgataaaatcatatttgtttcatagcaattttttttctttcaacatctgccaacaatttacccaatgagatatttagttagaacaggtgtctgtgctaatcttaacatttgcagttgctcacattcatttttaattggagcattaaataaagacaattagttttaactggaagctaaaatgaggttttaaaatttataactgtcagaagccaggtttaaaaaaatctccccattaactttttaaaatatattcttcgccatcctccaacagaaagtttagaatctaaacaatcttgcagcctgcagataagaatgttagattctaaatctgaatgcagacatgggaacaatgaaattttaaatgcaattggtctccaaatttaatgtgttgtcaacaggaaatataataagaatgaattatattgaatatctctgcattcagagatttaaa

SEQ ID NO: 475328 - DNA, 568 bp, Homo sapiens
atccatggacagcttacaccatgtgcttggaaaagctgcagacaccccacaccagtgaaagcagctgggagggaggctggctgctgcagtttgctgggggtctgctccagaccctagtctcctcagaccctccctcaccaggtggtatcaccagtgaaggctacaaaacagcaaatatggtagcctgctccttcctctggatcacacctaaagccttgcagaccattacagtactaaggcttgtactcaacgctcatcatggccactactcgccactggttgccactgatgtttattcaagacccaagactactttagtcaacggatggaaaatcctaccagaactggtggagggagtctgccctggagctgcctggagttggggagaggataatgcagacactctcttggttgccacacctggtttcaaacttggttgtaccccaaatccactgcctctgagaccagtgcagcaccagggcttgcccgaggactgtagtccttgtgacctgactgccactgaaattcgttccaggccccaggccactttggtcagccagtggtgaag

SEQ ID NO: 475329 - DNA, 1205 bp, Homo sapiens
gccgtgggtcttcaaaggcttgagggtgatatttcagctgcgatatgaaagataagatgaagccagttatagaaagatttaggagaagggcataccatacagaagaaatggcaggtgcaaagggaaatagaaaaatggagcagttggttgccagagggccagttggagtcaagggaggatttttgaaaggaggagacacaggaacatgtttgatggaaatgatcctgtgtaaggtggagacagctgttttctcccacacagtggaggagaggttgaatactaagctgtggtgtctggctgcctgtcagaacaatagtaaactgcacacctgtcggctcttggcaagcagggatgaagttgccacagacaccccaaccattagcaacaaccaccctgatcagccaacagtcataaacattgagtctctttctctctttctggctctgttgctactgctccaaataatagtcctggaaaaatcaagagagaggttgactggccagagagctgtcatcccagcaaaagcacctcctgtgaccccggtgtcactctgcttggatgagggtggcatggaagtcagtggtcttgaagaaggagaaggaagaggagaaggaggaggaggaggagaaaaaggaggagagggattaaagagagtacggacatgtgacccaacaggcccattcgaacatttcctgagagtattactggagcttttgaaagagggctccgtgtcattgaggactgctagctctagtgctctgagctgccatgggctgtctttgaccccaggtcgaaagagcttgtcaaaaaacaaattcgatgcagagaaaaactgaaaagagagacagagaaatgaataattctgtttattaaagtcagatgtttgtcctttccttaaaaacttatctcacttgttcaaagttgacgtttcactccattagaattgggtatgtatgttatgcacattggagagtgaattattgagcgaaccagaaacacagaacttctttgctttgatatcatattactgttctctctgtttacttttggagggtgacttatatgtgaatacattccagggtaaaatcaatgtctccatttttttcagtctatactttagtattggccaagtgttgtaatgtcagtccttgttcctaaaaaaaaaagccacgaattacctgatgtcctaagaaagcagatgcagc

SEQ ID NO: 475330 - DNA, 2089 bp, Homo sapiens
gcagaggaggcacaactagagagactcctgactgaaaatagcagaataattcctgactaaggaggaatggccatgtcacatctctacataccacagaagattgatggagatacctcttcctgggcctctctgaatccgcttcatcagatgtgtgacatagcctgctatcttgttgcagagcttcttgctggggataatggcgatctcctcacacacgcgcttgttcgtgtggaagtcgttgcccaggcacgtgtagtacttttctatgatgccccaggccgccttcttcacggttttggtgcgaatgaggcccatgttggcaggtccttggtaaaaggggcaaagcatatgaataaaactcatctcaggcttcaatcctcacagcctagtgaaagagtccatccttttttgctgtacgaacagcagtcttggtggttagcagcgcaagacaccgagttaaagaaggaagaggtttatcggccggtagcatcggcaggactcctgtctcaagagccgagctccccaggtgagcaattcctgtcccttttaagggctcacaactctaagggagtccgcatgaggaggtcatgatcaattgagcaagcaggggggattgatagaagatagatagatagatagatagatagatagatagatagatagatacatggatgactgataaggaaggaaggaaggaaggaaggaaggaaggaaggaaggaaggaaggaaagagggagggaggaatgggagggagggaggaaggaaaggaaggaagggaaggaaagaaggaagtaaggaaaggagggagggaggggaaaggaaatgaaggaaggacagaaggaagtgatgatatacgaaaggttattaaacaaaatgttgttttcatcccgtaaatagccccatataaccaacttctgatcataatagctctcaagcaaatcaggtttgataatttttattcaaattttctatagttttattttaaattttgcttacttaatgcatcagtttttaaaacaagcacgtaaattcgcagattacaatgttaatgtacattttctcacatttttagtgatttctgccttaggaaatttgaaactatggtgtacataacatcttgtaacgaatacatttcttgttgaattgaaccttttatcaacatgaaacatattgttttttccctttaaataatcttaatattgagttctattttctctaatattaatatgttataatagcctttgttatcattattgttattagtatttgcttagaatgtctctacccatccatatattttcacctttcttgagtcattccattttatgtgtcactcataaaaaacatatatctggtattcatttttcaaagctgtgtttctttgtttcatgtggagtcatttaaaccatttacatttatttctcatactttgtacttgtcccagtcatcatttttgtgtgtattatatttaccatgctttgttattgactcttattttaccgtttgacaaattttttggattgattatatttcttttacatattatatttattccacatttttccttaattggttggtggttattcctcttatttctgcttttctagtagttatactaaaaattttaagacatatttcaatgtatgtcaaatttatgaaaaacttatgtttaaattattgaagcctagctttaatgagtacttgtaacttcctgtctcctcctctgacctctgagctcccacaatgttgaaattatatgagattttagtacgaaattttattgtgttttaaataattctcagttataaattatgctttctttgctcagtactgctgtttgttttccatatctttgaagctcatttttaatattgctgaagtgtgttctgtattaattattgcgtggttcacaaatggtatgtttttaagtgtttttgttgttataaaatgtcttaatttacctttctatttgaataacgggtggatggatgtggtatggaacacaattctctcagtgctctgcaaatgctaggtatacatattttaaagtttcctcttggttgctatattaatcatgtctcttcagat

SEQ ID NO: 475331 - DNA, 584 bp, Homo sapiens
tacaatttggctttaggtgaaatagaggaagccttctatgctgttaggattctagggcacttcaaccatctagcttaggaattaattcttcatggaagaacgttttcagtgggaacataatatgggaagaattactcatactcactattgcccatcattacatataaaagtacagttcttttctcgttttaattgtttaaaatgtgcaaagattggtaatttatatggaatcagaaaaacccctatgttgttcctacagtccaaatttgaattttcactctatgttggcaagattttcttatctatcctggtgagagatttgggcaaaagtcagaccgcctgctgcctgaaacacctgactgaacttggaagtactccagtcacagaaggcttagttgcttctgtcctgccctggcccacgtctctggtcctcatgctccaaggagagcaggttgatccctaccatgccccacctttcatgctacgaagcagccacaaagttaaatattcctttctctaagtggcccatgatctcactggccatatggctgttcgacagagcattcacgactctgattgctctt

SEQ ID NO: 475332 - DNA, 921 bp, Homo sapiens
aacaggtacgtgtaattgtggcacctgtgggtgaactaggcagttcaagggagcagtcatgattcactcattctggctctgttgtttggcagctgcagaactgtgggcaagtccgttaaccatttggtatctcctcatcaatggcaaccacaagcaggcagctcatcctctcctaggacctatcttcaacttgcaccatgggcagtacctgagagactccaaatccaacaccggcagggggtgcatgtcccagttgcacacatgtagtcaggctgggagtgagttggagccaaaagagaaggaactactttcccaggattcccactggctgtctcttgcccctagagagaggccacatccagctggaatctggcagggactaagtagggattctggttctgggagcacacagagaaagtctccttgtctcttgaatatctccagttccttctgtgggacttcctctgctccatctgatgtccttcgagtcttgtcacagcatttcccaccttgacttgctgtttacttaattttttcttactattagacttgtagtcattaatagcatggactctggtcttagactatctgagctaaaatgctgctctatcacttgtctcagggtccacatctgtaaaatgagggtaaaaatcactcttccttaatagggatgttgtgaggattcaatgaatttatgcagaaattctcgagtgtatctgcttagagagggtctgtggttggtaatctttccagtccttgcatgtcagtgattttattttgcccttcaactttaatgctagtttggctcagcatacaatagttttcttgcagctgttctcttttcagcagttgaaaaccagtgaatacccctaaatagctgtcatttttgttctggtgctgcttttcctttgatttcagttt

SEQ ID NO: 475333 - DNA, 1808 bp, Homo sapiens
gcctgcgctgcaaccacgtaagacatgattttgctcctccttcactttccgccatgattatgaggcctccccagccatgtggaactctgtagccacggctagaaggggccaacgtacagctcaggctgttgcttcagagggtgcaagcaccattcctcggcagcttacacatggttttagacctatgggtacatataagtcaataaataaggtttgggaacctctacgtagatttcaggggatgtatggaaatgcctgtatgtccaagcagaagtttgctgcaggggtggggtcctcatggagaaactctgctaggacagtgtggacgggaaatgtgcggttggagttcccacacaaagtccccactggggcaatgcctagtggagctgtgagaagagggctactgtcctccagactccagaatggtagatccactgaaagcttgcatcatgcacctggaaaagccacagacactcaacgccagcctgtgaaagcagccaggagaggggctttaccctgcaaagtcacagaggtagggctgcccaaggccatgggtgcccacctcttgcatcagcatgacctggatgtgagacatggagtcaaaggagatcattttgaaaatttaaggtttaatgatggctctattggatttcagacttgcatgtggcctacagcccctctgttttggtcaatttctcccgtttggaatgggtatatttacccaatgcctgtacccccactgtatctgggaaaaaccatttcacttcagccaaaagagctccctttaacactgcttactagcgtagacctggtaccaatgaattttcttcgagtttcccttaccccagctttgtacttgttaagatggagtgatgactttcaagctgtttacatgctgaaccagaaaccagaagtctggaggcttttaaagatgtttctcttcatcactagttgtcagcaatttgattatgatgaacaaacctgctgcaattgcacatatgtttgactgtttaatattgtcccataactcactgatgctgttattttttcaagtctgttttttttttctgtttcatttgggatcatttacatctgtataacttcatgttcactgatctttcttttttcagtgtttaatgggctcttgaattcagtatatttttcatttcagctattgcatttttcattgcttgaagttccattcaattcttctttatttcttcgatttctcccctcattgtgtccacattttaaaaatcatttgaacaaatgtagcatgtttataatagctttttaaatacacttttctgataattccataatctctgtcatttccagatttatttgttactaatggatttttctcccaggtatggattgcatttttcagattcctattctgtataatttttttgtataaaagaacattttatataagtaaataaaatttctgtataaattttattttctgtataaaatataaactattctgtataataatttttattgatactcagacatggtgaatttcacattgcagagtgctcaattttgttgtctctctttagtgagtatgcagagattgataatcaaccaaagttgcaagggactccatgaacacttctatagcagttaatcctttgtaagcagaaggagaagtcactatatctatgtttaatgaagatagaaagagatgcagaaatgttgcatcatgtttttgccctcaacttttcaaatcccaaagacttaaattacctacagttatttttaagaaatacatttgaaaatatttatgtattaagcatttt

SEQ ID NO: 475334 - DNA, 1013 bp, Homo sapiens
tcaaactaagacaaccctaataatgagcacagctattgcccatatcttggcttctagatgccattctccactaaagaacccaaagtttctactgaaagtggactattttgatgacgtgatgagtcctagactctcaggattcacagatacacatcagaggattaaaggggctctaagcatggggtttaatctcagagatagggctcagcccagccaggatccagacctcaaggagagggtcaacttgactggggctgctgcctcaaaaactcagaggaaagccccttggagctggactcagacctctgaggaggaggctctggccagctgccgctggtatctctgtggggaacacactaagctggtctgggagactgagggaagaatcctgagaactggaattcaacagccactgccggaaggaaaaaccattgctggggtgataccgacggaaactggaagcaaacaggaaggagcaagcaagcaccttctttctcttccaaccttccacgtccctcaacacccctgttggcagagctggcaaagccaaaatgtggtttacatagtccgagtcctaacatcacaaagcagagcattaaaaggtggttttggaattgagagacaatggcttactcaccaactcagtgggatccctcgaccaaagttactgggatcaggtaactttggtccaagtgtgggtatgacagaagatgagcctataaaggttagagatggctatgatgaaccttcactgatataccagagggatgggatattattggcagagaggagtcattgaagtattttaataggaatgagataaagagattcctgatttcagaatattaacagggctggaatgtattaaatgaattatgatgtctgggagggggagataatacaatgtttctcatttatgatcaggttatgtactgataaacccaaaatattttaaagtagaaagtgcatttttggcatatgatattttcaatttacaatgggtttgtttggac

SEQ ID NO: 475335 - DNA, 1085 bp, Homo sapiens
gcctgttttgtttctctgctctgtctttagtgttgaaaagttcatggtacttgtcttcctatgatggtcacagttggggaatttctgccactgcggaggagccaaccagctggctctgagcctgtatttcatagcctcactgtcacaaggctgctaggccttatccacaggccaatagctatctttttgaaggcagacccgacaaatgcatggggcccacagttgccttcagaagctagccatgagggggctggtgagcaagcagacactggccttcctgtcctcaacaaagctactgtcccccagtgggggctttgctcagctggctgctgcctgtccttggattacacaggcataaatgctctggcctcttgggcttctggacagattctagtgggcctcaaagggcttaatactgaaaaagctaaggcagctggagctcagcgagtgagaggtggtgctggcgttggagagcaacggcccacacctgggtatgtgacagaagaagtttctcagcagcaaagcattcaagatgtgatctggctgtttctaaaagcatatagtcatatgcattcacaaggagataatcagaaattggaacttatgtttaaaagggaagcagagcacaaaagtttgggaaatttgcagcctaatcatgtggtagaacagaaaaacccattttctggggagaactgtaaacttttggctgcagaaatttgcgtaactaaaatgaaactgaatgttaatagccaaaataatggggaaaaagtctccagggcatttcagagatcttcacagcaatccctcctatcaaagacctggaggcctaggagagaaaaatggttttgtgggccatgctcagggtcctgctgctctgtgcagcccggggacatggtgccctgtgtcccagccactccagctccagccatggctaaaaagggccaagatacagcttgggccatgactgtagagggtgcaagccccaacccttggtgacttccatgtggtgttgtacctgagggtgcacagaagcccagagttgaggtttggaaacctctacctagatttcaggggaggtatggaga

SEQ ID NO: 475336 - DNA, 1523 bp, Homo sapiens
aactgggtggagcccaccgcggctcaaggaggcctgcctgcctctgtagaatccacctctgggagcagggcatagctgaacaaaagacagcagaaacttctgcagacttaaatgtccctgtctgacaactttgaagagagtagttgttctcccagcatggaggttgagatctgagaactgacagactgcctcctcaagtgggtccctgacccccaagtagcctaagaggcacctcccagtaggggccgactgacacctcatacagccgggtgcccctctgagatgaagcttccagaggaaggatcaggcagcaacatttgccattctgcaatatttgctattctgcagcctctgctggtgatacccaggcaaagagggtctggagtggacctccagcaaactccaacagacctgcagctgaaggacctgttagaaggaaaactaacaaacagaaaagacttccacaccaaaaccccatctgtatgtcactatcatcaaagaccaaaggtagataaaaccacaaagatggggagaaaccagagcagaaaagctgaaaattctaaaattcagagcgccttttctcttccaaaggaatgcagctcctcgccagcgatggaacgaagctggctggagaatgactttgacgagttgagagaagaaggcttcagacgattggtaataacaaacttctccaagctaaaggaggatgttcaaacccatcgcaaagaagctaaaaaccttgaaaaaggattggacaaatggctaactagaataaacagcatagagaagaccttaaatgacctgatggagctgaaaaccatggcacgagaactatgtgatgcatgcacaagcttcagtagccaattcgatcaactggaagaaagggtatcagtgattgaagatcaaatgaatgaaatgaagcgagaagagaagtttagagaaaaaagactaaaaagaacaaagcctccaagaaatatgggactatgtgaaaagaccaagtctatgtcgattggtctgcctgaaagtgatggggagaatggaaccaagtttgaaaacactcttcagggtattatccaggagaacttccccaacctagcaaggcaggccaacattcaaattcaggaaatacagagaatgacacaaagatactcctcgagaagagcaacaccaagatacataattgtcagattcaccaaagttgaaatgaaggaaataatgttaagggcagccagagagaaaggtcgggttacccacaaagggaagcccatcagactaactaataagagagtttctggatctctcggcagaaactctacaagccagaagagagtgggggccaatattcaacattctcaaagaaaataattttcaaaccagaatttcatatccagccaaactaagcttcataagtgaaggagaaataaaatcctttacagacgagcaaatgctgagagattttgtcatcaccaggcctgccttacaagaactcctgaaagaagcactaaacatggaaatgaacaacc

SEQ ID NO: 475337 - DNA, 597 bp, Homo sapiens
agcaaacggctttatggccatttttatgagggatgcctctctgaaccctgcaaatggccctggcccactggccagcaaagagccagggatggagcctgcaggtgccactgctcttcaaacgtgtgtcatagctgattttcttgtcctcacagccttggcagctctctccgtgtcactgtcctccacatccaacccaccagagggtcctgaagcggggggagtctggttggctcctgtggccaacaccgctggctgcccactcagcaaccaccctcctcatcaggtttgttcaggtgaacaacctcaggtggtgaatacatcattggtttgtaagagcgctgagagtgaaagaatctgtgactggaaatacttaggttctcaattaaaagaatacaaaatgttatttgaccccgaccccaaaaaatgcacacgcaaatactagaatggaaaaaaaaaagcctgaaacaacacaaatgattaacagtattcaacaaataaacaagcaaatacaaatatacaatatcgctgtgatattcttaagaaaacagtattagatgtgccatacttaggcaagcttgtgtggaacagcaacagtgc

SEQ ID NO: 475338 - DNA, 700 bp, Homo sapiens
gttccggttcatctcagagatctcagtctttgtaagacgcaggtcttcccagccagcgtctgcagctcctcatacttgatctgatacatgctctcggcctcagcccgactgcgggagcggctgttgtcaatggacagcaccacagacgtgtccgagatctgggactgcagctcccggatctcctcttcatacagctgcctgaggaagttgatatcgtcagcccttccaggcaagactccagctctacctcttgttcttgaagtcctccaccagcccctgcgtgttgccaagctccgcctccagcttcagcttctcctggcccagagtctccagctgccgcctaaggctgttgatgtagctctcgaatatgttgtccatgttgctcccagccgtcttctgctgctgcaggaggctccacttggtctccagcatcttgttctgctgctccaggaaccgtaccttgccaccccggaagctgctgctgcccactcaggagaagctcaaggagctgatgcagacaccaggcccactcgtgtaggagcagctgcagaaggcccgggtgccagaggtggacaccttgtaggacttctgcaccctgatggacatggtggaggcaggagtggaggcaggcgggctgaaccaggcggagattccagaaggagtggagaagctgcttcttggtagaatatatcttttctaa

SEQ ID NO: 475339 - DNA, 2057 bp, Homo sapiens
cagtctcatcaccctgctctggccagcagcccagaggctagttcagccccagcactacttcccattgcatggggtggctgatgggctatggtgttactgccttcttcatatgggcattcagcagggtcctgagttcttgtcctgcatccaagaagaatgagcttatgctgacagccatggatatatgcgctctttcccttcggtgtgccactgaagatcctggtgttgccatgggccgccgccccgcctgttgttaccggtattgtaagaacaagccgtacccaaagtctcgcttctgccgaggtgtccctgatgccaagattcgcatttttgacctggggcggaaaaaggcaaaagtggatgagtttccactttgtggccacatggtgtcagatgaatatgagcagctgtcctctgaagccctggaggctgcccgaatttgtgccaataagtacatggtaaaaagttgtggcaaagatggcttccatatccgggtgcggctccactccttccacgtcatccgcatcaacaagatgttgtcctgtgctggggctgacaggctccaaacaggcatgcgaggtgcctttggaaagccccagggcactttggccagggttcacactggccaagttatcatgtccatccgcaccaagctgcagaacaaggagcatgtgattgaggccctgggcagggccaagttcaagtttcctggccgccagaagatccacatctcaaagaagtggggcttcaccaagttcaatgctgatgaatttgaagacatggtggctgaaaagcggctcatcccagatggctgtggggtcaagtacatccccaatcgtggccctctggacaagtggcgggccctgcactcatgagggcttccaatgtgctgcccccctcttaatactcaccaataaattctactaactctccaaaaaaaaaaaaaaaaaaaaaaaaaaagatgtgcttttattgttttaacaggtccttcctcacaggtcacacagatattattttctattaattgtatagtcatacctttcccatttatgtttttaatttttctgtaattcaccattgcatataggggtttgtgagcatccaaccttatttttctaggtaaactggttttcccaacataatctccaagaaaatctttccattttatttgttattacataacaaattctcatgggcctatttttgagctctcaattttgttccattggtttctttcttaacactgaggacagcaaaaatcacctggtgaccatacagcagccatggagacaaaaactccttatctgaggaatttagaagtataatgaagggagcaaagcccacctggtggccatcaggtgggccatttagagaccaaaaacctccttatttgaggaattttagaagtaattagacttccctattatctaaagtcagcacctggttccaggcctcttttcaacttaaaatttacaggtaacaagaatttctatacatctcagaatacatgcatggcaaaactctttgtgcaacccttgctgacattaagacatcagaatgtctacaaatgtaatcatttatcaggtaaactactcttcatctcctgctttgaagtccataaatgctcctaaggaaaattcaccacggtgggcttagttctctcttgctaaggcacccccctgcaccccatctgcagtgttctttctttctaataaaactttcctttttcaaacctatactgctgtcagtaaatccttcttatcaacctgtgagttgaccattttctgataccagagctctgatacctcacctgtcaaacaccaccacactggattaattattgtgattttaaaatatgccttcacatctagtaagtctattagtctattggaattttcaggtagatgctccctggtgaacttagatcagttttagtggagagaaggggacagaagccagattgcactgacttgagaaataaatgggaggtgactaggaaaatccagaggtgggggtatagaaggggagaggggacagggaggaggtggggagagaga

SEQ ID NO: 475340 - DNA, 1019 bp, Homo sapiens
atccagcaggggttacaaggacacttctgcagtttcaaagggttcaggagtacctggagattcaaagttcttatgtttatacctttaaatagccccttcttaggctcagggcctcctctcttggtattagagccttgtgtttggtataaagacacatgctttgctgactttgctttaagttgttgtccaacgtgtccatcattttttctcttcaacaaatcagcagtgcttagcaagccactgagttccacactctttgttcacagtacccctgcctctgacctctcaaatgccagagaggccgtatcagctcttgtaccccttccaatgttacctgaccctgttcaccagaagaaacaagataaagctggtgaaaagctaagcttttcagaatgtggcctcagtgggaatctggttttagcctggtttccctgtgactctctggagcacaaatggtgccacagagatggccccaacttgagccaaggtgttctcatctaccaagaaagagtcttacatctgtattgcagaattttggctaaagccatgaacaagtgtgccttagaaaagaaattttcactaggacattcacagcattcctgatgactgacatcgcttcaagttcagtgaattattctaacaggcatagcataagtacaaagtgacccagttgtgaatattcagggctgggacgccacgagaggaaattgacgttggggacaatctgtgggagcaacatattctcctatagatgaaatgccagggagaatggtgggctgcttctcaccagctagttttctgtatgtccccagaatgtctaatgttttctcacagtagagctcttaaagaaaagctctgttaccttttattgaaaattctggactcaaatgctataattaaaagaaaaaaattaatatgccctatactgacctttgaaatacttggatatagaagggaatagggcaagatctcagctgtcataaagttcatattctaggtatacatcatttttgttaagt

SEQ ID NO: 475341 - DNA, 1728 bp, Homo sapiens
cagacgatgaggccgggatgaaaacttgcttctgctcaggattccccatgagggttatttttagcccaggacagtttggtctgtagcaggaaaccacaaaggaatgcctagccttgccatgttgaaggacggcttccgcactgacagggggtctcactcagacctgtggtccagcagcagctctctggagagttcgagtttcccgctaccgaaacagtacctggatgtgagctcccagacagacatctcgggaagcttcggcatcaacagcaacaatcagttggcagagaaggtcagattgcgccttcgatatgaagaggctaagagaaggttaaagttaaacagtaagaggaaccagcttgtgagagaactggaggaagccacccggcaggtggcaactctgcactcccagctgaaaagcagcatgcagtccctgtcctcaggcagcagccccggatccctcacgtccagccggggctccctggttgcatccagcctggactcctccacttcagccagcttcactgacctctactatgacccctttgagcagctggactcagagctgcagagcaaggtggagttcctgctcctggagggggccaccggcttccggccctcaggctgcatcaccaccatccacgaggatgaggtggccaagacccagaaggcagagggaggtggccgcctgcaggctctgcgttccctgtctggcaccccaaagtccatgacctccctatccccacgttcctctctctcctccccctccccaccctgttcccctctcatggctgaccccctcctggctggtgatgccttcctcaactccttggagtttgaagacccggagctgagtgccactctttgtgaactgagccttggtaacagcgcccaggaaagataccggctggaggaaccaggaacggagggcaagcagctgggccaagctgtgaatacggcccaggggtgtggcctgaaagtggcctgtgtctcagccgccgtatcggacgagtcagtggctggagacagtggtgtgtacgaggcttccgtgcagagactgggtgcttcagaagctgctgcatttgacagtgacgaatcggaagcagtgggtgcgacccgaattcagattgccctgaagtatgatgagaagaataagcaatttgcaatattaatcatccagctgagtaacctttctgctctgttgcagcaacaagaccagaaagtgaatatccgcgtggctgtccttccttgctctgaaagcacaacctgcctgttccggacccggcctctggacgcctcagacactctagtgttcaatgaggtgttctgggtatccatgtcctatccagcccttcaccagaagaccttaagagtcgatgtctgtaccaccgacaggagccatctggaagagtgcctggtaagggccgtgtctggctggctggctggctggctggctggctggctggctggctggctgaccggccttctgtgtttatggggattggtctaccctgagcttcaggaagaagctccaccttcaaaagaaccctagattccacttctcaccacttccccagacccaagccactgtcttcccttacctggatgatggcagccatctcctacttggtttcccggcttctgtccttttccccttcctcttttttcaacagagtagccagactaatcctgtttaaatgtaaatcagtgcatgccattcttttgcta

SEQ ID NO: 475342 - DNA, 628 bp, Homo sapiens
acgctctgatcttgtctgtctgttctagaattagaatccagcaggggatggctgtcacagggatgcatactaacactggaacactgaaggaggtttaagaagaagaaaacttaaaggtggatgcttgagtccttcgggctggggctgggcgtacaggctcaggttagcgacaggacctggagtcagtgtccttgtgagaatctatggcgctgtggatcttctcaacctagtgctggcacacatgagatgcttggccagggcctgccagatggggaggctggagatgggtcggctgtgattgagacctctgtggccaagttttactctaagaggcagacctgtcagcaagcagttcatccccagctgccaatctccttttggccctcagtcttccagaggagctgggaggtgggagagaggggttctgcagggcagtgttgttcagagcactcagcacactgcctggaatgcaggaaatggttgctgaatgaagcgatgaattacatttcagcactcatcaagtgctcagcctataactaagtctgagtgtaggctgctaacacttagacctttaccttacagaatcttcgcagccagtgctgtgcattggaagttgcagatggggaaa

SEQ ID NO: 475343 - DNA, 535 bp, Homo sapiens
gttcactacccgatgaaagatagtgaagaggcagtaaagcctaggctctcacggctggcaaactttgatatgcaaaggcaggccattagaaactgggtccacccaaacatggcgattccagctctcttctccttgcccttgctccaacatgtgcctgacaacatggccgcccacacatttccgcatgtggagcacttcatttgcatattaaaaggtggagaggtgggagtagataaaaatgtgggaaaagtcaggaatgtgcacagagcctctagtaaacatcattctactctctacctccatgagatcaactttttaagctctcagttaactaagcagaagtctcataaggaaataagagacttgaaaaacatttttaaccaactagatgtagcatatatctatggagtacttcaccaaactgtagctgcagaacatataatctgaagtgcacagggaatgttttgtgagatggaccatatgctgaaccgtaatacaagcctcaatacacttaaaatgattgaaatataaagta

SEQ ID NO: 475344 - DNA, 674 bp, Homo sapiens
gtgccctggatgacttgggtttatgtttgaaggtctgctccagctgaaagatgagtaaaaccgtggataagtcagacaatggacccacctgcctgacgcagccgaaggaacaaactttatccattgggctaaatccttctcctggtccttggctggcacctggtgccatagctcttctgggagggcttctggggctgctaggggagagtggaagtagatttcctgtgcaactgccctgtcccccttcaccagtgaagcaagcattgctgctttccaaggttcttgcctgctgctatgagagcaaattgggatccagagtgcccagccaaggcaccaatgctctgaaacttacaatcacagcagaaggagaaggggaagcaaagcatgtcttacgtggcagcaggagagagagaacaaggaagtgccacactttaaaaccatcagctcttgtgagaactccctcactatcattagaacagaaggggaaaaaccgcccccatcgtccaatcacctcccactagagccctcccttgacttgtggagattacaattccagatgagatttgggtggagacacagagctaaaccatatcagtggttaaataacttgtctaaggctcgtagctaagtaaagagatagggaaaggattttgaacctagtcgggttggctcct

SEQ ID NO: 475345 - DNA, 1213 bp, Homo sapiens
gtgttttgtgcgaaatctgccatggaagattatggtgtgccacgcttttatccagagagaccacaccaaaaaagtgtaggattctttctccagagcaatgctgaatctgactccacgtcacggacttgtcatgcacaagcgatgctgaagataataaattatggagatgacggaaaatcgttcaaggaccagttttgtggccaccagggaaatgacatgtacgatgaagaaaaagtgaaatatactgtgttcaaagtattgaagaactcctcacttgctgagtttgttcagaacctctctcagatcatggaatttccacaagatcaaattcaattgtggcccatgcaagcaaggagtaatggaacaaaacggccagcaatgttagataatgaagctgatggcaataaagcaatgattgaggtcagtgataatgaaaactcttggacaatattcctggaaacagtcgatctcgagctggctgctagtggagtgaccttacccaagtttgataaagctcatgatgtaatgttttttttgaagatgtatgatcccaaaatgcggagcttgaattactgtgggcatatctacacaccaatatcctgtgaaatacgtgacttgctcccagttatgtacgtgtctcttgaaaaagcccttgatgaactaatggatggtgacatcatagtatttcagaaagatgaccctgaaaatgataacaataaaaagatcaggttgccacaggttggacaggagggagaaatgaaaagggataatgagctccctactttgactcacctgctcaggccccttgagggatgtctgaatgtcaccatagtgatagggtaccacagcagggccctactgggaatgggtagtgctcaagggattatgctcccacctggtttgcatgagggttcctatagctctatattcttgccagctgatgatatctttaatgcttgaattttgccaatatgaatagtatcaagtgatatatcctgatagtcttaattggtatttatctgattattagtgagactaagcatctcttcaaacagtttttcaccattagagtttcatgaattgcctattcatacctttttctgttcattttctgctgggtttctgtcctttccttgaagatttttgagagtttcttagatattctagaaactaatgttctgtcggttatttatgtgaagatctcccagtctac

SEQ ID NO: 475346 - DNA, 527 bp, Homo sapiens
cctggatacctcagttgctgttttggtagacgtatgtaccaaattctcttgggtaaatacctaggaggagaattcctgagttgtgtgacggactgttgtgcagactcaggcagctcactcggggctgggcagcagacagtgattatcgtcaccccctgctttcatccattacggcgggtgttagcaggacagcgagtgggtgcagagatgtcatccaggagcaagggtctggaatcagggaccccaggaatctgcttggtgttctaccctattgtattccacaaacttgtgactaagcgggtacccaagctgcaagacaaagtcccctctactcttccctcttatttcctcaaagagaaggactttgatgccacaggaagccagcttgctagctccctgttacctgatagttccctgactaaaaagactcttcagtgaggatcagcattttaccctagacaggagtcgtgaattttctttttaaagatacacatatctcttaaaagggtccagaatatttcctgcaa

SEQ ID NO: 475347 - DNA, 634 bp, Homo sapiens
cctgcttcagcacctctttcctcaatatgatgttataactaggcattgtgaagactggaaatatggatgacgagtgttgaaaccttcacattgaatgatgtcaagactcctttcatgtaccacctcagacacacttcacccactctgactcgtgttctgtcatcccactggggtattacctgcaagttctatgggcaccacccgacactgttatcactttatgcctactccatatccccttttcttccccctgaggcttccctgacacaaagaaaaggaataaggcagactcccaaggtgctcacaaatgagcaaccccaaagtgtgaggaagttaatactccaaggagcacaccctcagccaatggaagataacagttgggagataaatttgttgccctttctctataacttttcaacctccaccatgtggaggtggtatgggaatgagattcgggtccaattattgtgatcaattgttcatattgatccaccacttttcaggtacagatataatcacaagctatcaaagaaactccttggcccatctcttaagagctcaaagaatatgcctgggagcaaaggaaccaccagctcagttaggttgaaaccagttagccattgtagtactactt

SEQ ID NO: 475348 - DNA, 1280 bp, Homo sapiens
cagccatttccacatgcttagctgcggcccagcatgctccgttgaaatgaaaaatgatcaaaagctggagatgggatctttgccattagggaccatcaatgagagggaaatacagtctcattttcaatgtttgatttgttctgacacaggcatgactttgactaaaaaaaggaaaaaagaaggcaagaagtggaaattacatgatgaggaggcaatagagttagaacctgtgacttggcccatgaacaagctttcgggccatgtggtagaactggatgagaactatgggattaaaagtctggagacaagactattttttctggttcagcaacctggggttttgaaacctccttgctgctgtcactacaagagagtcctgttgtcattgctaggacttggttggatggatctgacattgaaagtgaggggcattacatccatctgtttgctcaaggaaggaatttatgaatcatttttaataaccctacaccctcactcctacttcgcatcaggagcaaatagtttagtgggggatatagaggagcagacaggcaattccaaacaccacaagggcatgtcagagatcttggcagctggccctcctgtcacaggctcagaggccttggaggaaaaatggttttgtgggctgggcccagggtccccccaacacctgtccagcctcaggacatggcaccctgtgtcccagcttcttcagctccagtcgtggctaagccaaggtacagcttgggctattggtttggagggtgcaagccccaagccttatcagcttccacatggtgttgggtgtaggggtgcacagaagtcaagaactgaggtttggaaacttctgcctggatttcagaggatatatggaaatgcctggatggccaggcagaagtctgctggagaacctttgctagggcagtgcagaaggtcaaatgtggggttggagcccaccccctgccacagagtccccactggggcactgcctagtggagctgtgagaagaggaccaccatcctccagactccagaatggtagatccaccaacagcttgcaccatgaacctggaaaagctgcagacactcaatgctagcccatgtaagaaaccaggaggaggactgtatccttttccatgatgttaagtgaaaatatctacattgccattgactcgggtagtagtatagctgctttcgttagtttaataatctcttaaaattggaaagacttatcatttgatatggttaggatgtttcattcccttcaaatgtcccctcaca

SEQ ID NO: 475349 - DNA, 705 bp, Homo sapiens
ggcggtggcttgcagcaggagggagcagtggagacagtgagatatgcttagattcgggatgtatgtgttgttccctctggctgtaattcttctgcctcatttgctgctgactagcgcccgcccgggtttgagctctggggtggctgccagaggcttctgctgggtcatcgcagtcaccctcgtggatgcaatgtcaggatgctgcctcagtgcggaggctgtcaacacctgtccagagacttcaggcacactgcttacgcatttcgatgagcgcatttcacttgaatccaccaaagtggacctgctgctagttctatttccccctggagtggagactctccaaagtgagcttcgggcaattacattctttctccattattgcttttgttcctcttacacagccacttgtccaaactctattaacacttggtgttggctgaagcttgtgttttcaaacatgtcagcagatggcagggccccagatgaggtacgaatccatcttgaagggtcacagggcactcgatggctgcaatcaaaattggcagccaagacgtgtcttttgaagcaatcttgataaatgcaagaaagaatatagccagaagaagggacatagctgcccttcatgttcattcacatcccttccgtccaatgagcatttcttaaaagttcaataaacattgattgcacttctactgtgggccaggc

SEQ ID NO: 475350 - DNA, 453 bp, Homo sapiens
cagcagcaactctcctcagacttctcatgcatacactcatggccatgcagagttttcaaataggggatccaaagtcttcttggggtgccttgagtggcagaagtaaacctgaatctatagacataaagaatgagatagcatgctgcatcattccagcagttcttgattccccgtcaccaactagatgccccacaattcagttcaacgctgactacccagggttactgccagactccatgggtttaaagcctcaatcccacaagattgccctcactttagatgccagtcgcaagtcctgggttcccaggttacctgaacttctgttggacttggctataaattcagggattctcactacccctccctgcctgggcacccccttttttcacttccagtttcataatttgttagaacaactcagagaactcaggaaagtgctatacatgtgattac

SEQ ID NO: 475351 - DNA, 712 bp, Homo sapiens
cccgggaactggaaccaccgaaagcgcagtccacccgccgggggttcataaagtggagacgtagatggcgccggaggctcgccagagggctgcaggtgatgattctgggtgttgtaatgaggcatgtttctgggggtgaggcaagtgactcatggggagctgctgaagaatgcgttgggggaaaatgctagtgaagttgtaaaaggcttggaggacccagaacccagaaataccgcattttcctctctgcagtcacttggacaaagaaaaccctttcaattaaaacccaaagagttgagtagttctgcagattcccccatggctggtctgaattataatttggacttgtcactcggtgaatgccgggacattctgcttcctgtcatcaccaaagagctgaaggagctgctggagcagaaggatgacatgcaacaccaggtcctggagaggaagtactgcgttgaattgctcaacagcatcttggaagtccttagctaccaggatgcggtgagtcctcctgatgatgtagatatcctggactcagactagggctaagttgattacattgtgaaatattgatactgatggatagcagctggagtctaaagataaaagtcaacggcttgctcagcaggcctacttttcctgtgactaacccccattgctgtgaaggatggctaggggactggagttaatcatgttagcattttgt

SEQ ID NO: 475352 - DNA, 730 bp, Homo sapiens
ccacacgtggttctaccctgggcaatgcctccagaccccaccgtccagactaatgatcagaaacgtgttttaacagctcctccaggttactgggggtgcctgctcagtgccccacccaccccagaccaattcagtcagaatacttgggacaggggcctaggtattactgcttttgatgcaagatttttcttctcagtcgctttgcaagccggggacccccagccagtgacgccctgcccaggtctcactcagcccatccagctcaccaactatgttatagcttgtacccatattcagcggttccggatctcttgtgccgcacccaagaagaatgaggatacgtggggcattgaaggcagtgaaaacggctttcagtgggggggcggggggatggtggggggtggaggtggggcactggttcccctaccccaagattggaaagttgtcccctccccgtccctccccacaccttgtgtgactgggtctggggccttttatagactcagaatggggactgccgatttgtttgttagtacgcaaaaaaaggttaaagggaagacaccactcaaaggtgggcatgacagtgtagaaaaccaattaggaaaagcaggagaggtgagatgtgaagctcaccaaaagcatcaaaatttctaccaaattcaatggtgataacagtatttaataactcatccagcaaagacagttgctcacccggagaaaggggtgggtt

SEQ ID NO: 475353 - DNA, 3557 bp, Homo sapiens
gcgttgttgtgtctttcttttctgcggcgcttgttttgtgtctgttgcggctggtggtgtttcgtgttcgtgctgtggtgtgttctctggttgtccgttgcttgtgacgtgttgagtgtggtgtggcgttcgctgttatcgttatcctggcgagcctgtgtgtgggactcgctgcgctagtgctgtactgtgtctcctctggagaatgccatagaaaccatgtccacggccaatgagaagatcctgatgatgataaaccagtaccagagtgatgagaccctccccatcaacccactctccatgctcctgaacgggattgtggaccctgctgtcatgggaggcttcgccaagtatgagaaggccttcttcactgaagagtatgtcagggaccaccctgaggaccaggacaagctgacccacctcaaggacctgattgcatggcaggcccagagcagccccctcctcagacattcgcccactctgggctctcagcaaaccacccatcagaacacaggggtgggctccggagggcaggagctggcgggaggtccccagccttctggggtcgtcatgccctttattattcaaataatgatgttctcccttagcatccccagtttgggaagcaggaaggccaggctttgactcgttcccatcctcagatattgctgggaggcctcagggaaggctaacatgtcatacagatttgcttagttgttggatgtcactctgaatctatacaattgccctggtcctctccactggggacctcttctcctctggaaacagcttctccatgctgtgtttactgtacccaaagaatgaactgcagcttcacagcacagcgaataccaagctgtaccttccaagaaaattctactactgtcttggagcttactagagggacattaccaacaaagccggaaggctttgaaagcatgtactctattagatgtggcggcttctgagaaccgttagctaggcgccttcagacaccgccccctagtggccgccttctccttagcaccacccgctgctcctgagaccacctatacagaggcccacctaacccccaaacgaggttgacctcagccatatccctcccacccagcgcccaggcaccctaactatgggcacccgcatgcaaaagatgcagtcctgctcatagtgaaggcagccttttaacattatcacatgcagcagattagctcttccctacctgtttcattccgtttgttcttgcaacttatatttattgagcctctgttgtgtcctaggcaacagtaatagtgatggacaaaattgggcctgctccctgctcacttggagcttaattctatgttggattttggttttgcaaagccaaatacactttgaatttacttaaaacacgagaaggttagatttcaaggggagtgaatgtatttgtacctctagcaaccgaacaaatgctgaagccttcaaagtacatttggtgttcaacgtttttgcagatttcaagatcgatagcttgttaatttattttctttctgaagactttctattttttggcataaaaagatgtctatagtatgctcttcttttaaagcttttgttgtgaaatattatgtacagaaaagtacacataaaaatatataacccactgatttatcaaaaacatacatccgtttgaccaccacccagatgaaatagaattctgctagctcccctaatcctatcttaggcctccttccctaagagtgagcactgttctgtttttatagtaatcatttccttgctttaaaaaaaatactttaccacccaaacactcattcttaaacactatagtttagatttgcttaattttgacctacatataacagaatcacataatatacagtctttcgtatctaacttattttgcccaatgttatgtttgtgaaagtcattcattttgtttatgagtcataactatgattcacattcattttcattgctatatagtagtccgtacagctggcttatgtaactataccaaaatgcatttatttatttttatactaatagagaattgggtttatttcagcttggggctattataagtaatgctattctgaacttccttgtgtgtttttttggtacacatatgcaaaatttttgttgggtatatacctatgcattgatttgcttggtcatagcatgtgaggatattcagctttcataggtactgccaatcttctatcaccataggttaggttattttgcctgttcttgaacctcttataaattgtattatacagtacagtatgtactactgtatctgtagcttctttggctcaatataatgcctttgagattcctctgggttgttacacatactagaggtttgacttttttgttgtttctaagtgtcatctattgtatgtgtatctaaattaccaataatatatcaatttatttatccgttctgttggacatttggatgttttcaggtgttgtatattatgagtaaagttgctatgaacattcgtgtttgtgccttttggtggacctaagcacccagttccctcagtatacatgcagtagtggaattgctgggccatgcacatttaaccttactggacacaagaagcagtttttcaaagtggctaaatcaattttcactcccacacaacttctaagtcagttgatccacattctccctgacacttgatactgggagtcttttttaattctagtccttctggtggatgtgtaatgatatctcagtttagttttaatttgcatttccttcatgagcaatgatgttcagcaccttttcatatgcttactgctaattggattacccttttgtgaaatactttttcaaatcttttacttatgttgttaatttagttgtctctttattattgatttataggagtttatatattctagatatgcatcttctgtcaaatatatgtattgcaaatatcttctcttagtctggcttgtctgtttgctttcttaatgatgtattttgatgaacagcagttgtaattttggtcaggtttaatttatcatatttttaaatgattagtgcttttgtgtccactttaagaaaccgcaactaccccaagatcatgaagatattctcctatgttttattctgagtttttattgttttgtcttatacatttaggtgtatgatcctttttgactgatgtaaagtaagaggcagattattttcttacacagatttccaatttctttagcaccatgtgttgaaaagactattttcccccacttttgaccccccaaattgaccatatatgtgtttttctattctggactttctattctgatccatcggtctatgtccatgcttataccaataccacaccatcttaggtcttgaaatctaatagtcagtgtaccccaattgttgcttttcatcaagtgtgtcttgcctcttctaagtcctttgtatttctctataaattttaaaataacttgccaatgtttacacactcctcccaaacacattgagatttggattaattgtacataactattagattaattggagaattgtaggt

SEQ ID NO: 475354 - DNA, 711 bp, Homo sapiens
cttaagatctttaggctgagatgatgagcaaagaggagaaagatgataaagtggtcagtgactgaggcttcaagagttgtaacactgaagagctgctcacactgcaagagctatagcactaagcaaaggctcttttcagagccctcatttttccagacaggcggtggagctccctaccctctcaggggttacccgtcccaagaaagtgtcacaagattggcatctgaaatgcccaaagaagagttcctgactctctggcccctgggtagaatcagtgtgtgtagtataagcaaaagggctattgacaatgagaatgtcttaaccatccccccactgactccacccagacttgtggctcatgactcaactgatcctgtggccccatacagaggagacttagtgcatgaggaccattttccacacccctacgatttcatccaaaatcaatctgcagcacccatttcctacccaccaaattgtccctaaaacccctaacttctgagcctttaggaagactgatttgagtgataactctagttctcctaggcttcaaaaacattttagatagaaaatatggagcatagcatgctgacttgaaaaaaagaaacgggcatttttcattttcattgtgtcaagtgggtgaccttttgaatctgaactaaaacaaattggcaatgacagcttcgaattttcactgatttctcttgaaaa

SEQ ID NO: 475355 - DNA, 663 bp, Homo sapiens
agagggtcccttccagctgcatgaggccctgtgagcatcttttctgtgccaggcactgtgctcctggtaaggcagatgcagagttgaaagagacgggagcttgcactcccaagaagtgtccatatttgtttggagatgacctgcatgtccctccttatgtccagaggctggtggagctgagtgcctgctggtcttccgagttgctcttcactgagctgggcccaaatccttccaactcattgtcacccggagaacctataaggaggcgaggcccgggcccacccagggaggtggctgccgtgggtccagattgtgagctccatgtgggcaggactgtgtgtgtctcagacgccctgagccccagtgccccaaacagcaccaggcacattgtaggcaaccagcacatacttgctgaataaacagatgaaatgaaagttcacaggttcattatgaaacagaggacactgtctacctaacaaaatgcccatcaatggtacttcactcttcattcaacaattattagtgcctcttctatagtcttcctcacaccatcctggtggcagaagggaaatagggagacacagagatgaataagatagatgtggttcctgtcctcaaagactatacggtccactgtgagaaagtgccgtaatgcataggaag

SEQ ID NO: 475356 - DNA, 1052 bp, Homo sapiens
tctaagataccggataaaggggattggttgccctgtaccagcacacttggtccttccaccacaatcaacaatggggcaaagaagtaagaaaacccaatacctaagagacagccccttgggaaagggaagaaagagagttgtggggaggaagagggagggacaaagagagagagaaaaagaagaaaaaggaggagaggaaaaagaggagaaggaggaggaagaagaggaggagaaggaggaggaagaagaggaggagaaggaggaggaagaagaggaaggaggaggaggaggaagaggtggaggaggaggagaggaggaggagggagaggaggaggaaggggaggaggaggagggggaagaagaggaggaggtggaagaagaactaagagaagaggaagaggaggaagaagaagacgaggaggaggaggaggacagttttaggagaaggggaagaaatgacacattcagaatctgaatctttgaacttgaggttcctataggagacgttcgggacacaactggatattagggtctggaactgttgagttgtagtagtggataaagccttgcaaaggcagagcagtgttagaaagtgtgcagaatgaggagagtagaagacagtgttcaaccctggagaacatcaacatttaatagaaacaaaaaagcttacaacaaatgcaaaggagtggctagaaaggtaggagggaaactagggggaaagaggtttaatagtagccaagtgaggagagaatgttgaaaaaagagaatggtcaattatacacattactgctgaaaggttctctagggcaaggaagatacaacaagaaggtcttttaggacattgcttgaaagaacttcagtagaattataaggacagaaaacccaggtggcctgtgaaagaggtgtggatgggatgtaaggcaataaaatcagagggtggtccagtgttgatggcacccatttgctcgttgcagtagacccattgtctaaagcactttatgacacattgtaggtattcagtagacatttgttgaataatatatattgaatgt

SEQ ID NO: 475357 - DNA, 1325 bp, Homo sapiens
cggcgtcactcagtattatataatgaatgataacggcgtcactcagtattatataatgaatgataacggcgtcactcagtattatataatgaatgataacggcgtcactcagtattatataatgaatgataacggcgtcactcagtattatataatgaatgataacggcgtcactcagtattatataatgaatgataacggcgtcactcagtattatataatgaatgataacggcgtcactcagtattatataatgaatgataacggcgtcactcagtattatataatgaatgataacggcgtcactcagtattatataatgaatgataacggcgtcactcagtattatataatgaatgataacggcgtcactcagtattatataatgaatgataacggcgtcactcagtattatataatgaatgataacggcgtcactcagtattatataatgaatgataacggcatcactcagtattatataatgaatgataacggcatcactcagtattatataatgaatgataacggcatcactcagtattatataatgaatgataacggcatcactcagtattatataatgaatgataatggcatcactcagtattatataatgaatgataataatgctatcactcagtattatataatgaatgataacggctattatataatgaatgataacggcgtcactcagtattatataatgaatgataacggcgtcactcagtattatataatgaatgataacggcgtcactcagtattatataatgaatgataacggcgtcactcagtattatataatgaatgataacggcgtcactcagtattatataatgaatgataacggcgtcactcagtattatataatgaatgataacggcgtcactcagtattatataatgaatgataacggcgtcactcagtattatataatgaatgataacggcgtcactcagtattatataatgaatgataacggcgtcactcagtattatataatgaatgataacatgaaacggcgtcactcagtattatataatgaatgataacggcgtcactcagtattatataatgaatgataacggcgtcactcagtattatataatgaatgataacggcgtcactcagtattatataatgaatgataacggcgtcactcagtattatataatgaatgataacggcgtcactcagtattatataatgaatgataacggcgtcactcagtattatataatgaatgataacggcgtcactcagtattatataatgaatgataacggcgtcactcagtattatataatgaatgataatggc

SEQ ID NO: 475358 - DNA, 854 bp, Homo sapiens
agcaaacacaggaggatgagtgcatggctctgacgctaggaactcctccacaggtgactctgctgagtttgttcccctgcagggacccacccacaggtgacagtgaacaactaagccatgggaagatgggtgaaccagtcctacacagatggcttcttcctcttgggcatcttttcccacagccagactgaccttgtcctcttctctgcagttatggtggtcttcacagtggccctctgtgggaatgtcctcctcatcttcctcatctacctggacgctggacttcacacccccatgtacttcttcctcagccagctctccctcatggacctcatgttggtctgtaacattgtgccaaagatggcagccaacttcctgtctggcaggaagtccatctcctttgtgggctgtggcatacaaattggcttttttgtctctcttgtgggatctgaggggctcttgctgggactcatggcttatgaccgctacgtggccgttagccacccacttcactatcccatcctcatgaatcagagggcctggaaaaaagccctggccacctgctcctcccacctaacagctgtcaccctcttctatggggcagccatgttcatgtacctgaggcctaggcgctaccgggcccctagccatgacaaggtggcctctatcttctacacagtccttactcccatgctgaaccccctcatttacagcttgaggaatggggagccctctgctcactgagatcgatgcagcttctgattgactcctttggaatgtctcatcggaaactcaaaagactgcaaccatttgtctctcacctacctgtgacctggaagccccctccctgcttc

SEQ ID NO: 475359 - DNA, 1704 bp, Homo sapiens
gtgacgccagtgataacagactcagagtgaccaggagcaacaaccgagccatggagacgtgggtgaaccagtcctacacagatggcttcttcctcttaggcatcttctcccacagtactgctgaccttgtcctcttctccgtggttatggcggtcttcacagtggccctctgtgggaatgtcctcctcatcttcctcatctacatggaccctcaccttcacacccccatgtacttcttcctcagccagctctccctcatggacctcatgttggtctgtaccaatgtgccaaagatggcagccaacttcctgtctggcaggaagtccatctcctttgtgggctgtggcatacaaattggcctctttgtctgtcttgtgggatctgaggggctcttgctgggactcatggcttatgaccgctatgtggccattagccacccacttcactatcccatcctcatgaatcagagggtctgtctccagattactgggagctcctgggcctttgggataatcgatggcttgatccagatggtggtagtaatgaatttcccctactgtggcttgaggaaggtgaaccatttcttctgtgagatgctatccttgttgaagctggcctgtgtagacacatccctgtttgagaaggtgatatttgcttgctgtgtcttcatgcttctcttcccattctccatcatcgtggcctcctatgctcacattctagggactgtgctgcaaatgcactctgctcaggcctggaaaaaggccctggccacctgctcctcccacctgacagctgtcaccctcttctatggggcagccatgttcatctacctgaggcctaggcactaccgggcccccagccatgacaaggtggcctctatcttctacacggtccttactcccatgctcaaccccctcatttacagcttgaggaacagggaggtgatgggggcactgaggaaggggctggaccgctgcaggatcggcagccagcactgaacccagggcatccagtgcctggctctgccatctcttagctccagggatcgcagctgagatgagcaaacaacttcggaggaggctccttcccttgggggtttaattgcctgaaaaggtgtctccaaggactggtgaaaatagaagtaactttccttagtcacggggctgcaagattttccactgtgtagatggatcttagtgtattctgtgaccacttgctgatatcacttaggtaatgcccaacctaccaaattaatttaagctctataatatcaaatatctttctgtgtattctcctcattttcatcatatctttttgccttgtacacatttctatttgccccaaattcttctcttccaggaagcatccctgattaacctcatgcccactcagatttctctgggattttgcacccttcaacccgtaagtaccttgagtgtttcaaccacaactctttatctatagccactgaacccctagactggaagaaaatttagagcaaacttaatccagcccccttccgtgatgcagaattttggatcataatcacccaagcaaaagtttcaccagcctttaccttatctagtcccatgatggggaaattcctatttcattttaattgcatttcattggcataggcttgatgtccttaattcatttcccgcacaaggaccagggaattccattgaaaattatctactgaac

SEQ ID NO: 475360 - DNA, 867 bp, Homo sapiens
gcaggctggaagtctagatcagggtgcagcacactgcagttcttggtgacagagggaaacgtcttgaacaaaaagaagaaaagaaagaaaaggaagttttcatgcccgacgcggtagcataagggggcatgggagaccggacgagagggtgtggcagcgaccgcagggagaggagacggcggacgcggaactgtgcggggttggcagtgggcttgggggtggcacagcggggacgcgctggcaccggtttctgagaggggacattcgggagaagctgcctggggaatgggaggccacgagttcgggcgtggagacggagcttcagggcctggagaaaggggagtggaaatgacggaggaagtatccgtatcgcatcctcggtttgcccgagagatgtctggagttccggcgggcccaggtcccctctcctcctgcagccctgggcccgggctccgctgcgtctggcgctgcaagacctgcgcgccgagatcccggggcgagggaccctgggcggcgcgatctgcacagcgccgagcctgcatcgcgcccccgccaggaccagagccgcgccgcggtggagtcctgagcgcccccgagcggtcacgtgtgcggcggcgacccaagaatttgaaagagtcgcggaaaactgcactcatcatagagcatctgaaggttcctagagggagctgtgaacggttaacaaaaaacacggccatggggtcccctggtggccctgaggatgccaagtggacacaggaagccagcgtggccacacagcaatgaggaagcacaggacccctcatcccctcccaggggcttctttcaacaagttacaaatacaaagacaggtaaggaacttggaaaggc

SEQ ID NO: 475361 - DNA, 906 bp, Homo sapiens
cctccaggcctgtgatgggcaggcctggtccctggatcctgtgggaatgtctggtgcctgggactgtgaggacctatctgacactggggtaagtcttaagcctgagtctgcagttgaacctctggagtctgggtcttctgagaacaacacagaatcttggtccataggagctagtctggagcttggggctgtgggcagtagactggtgctgttgcagggctgccctggtactgggaaagacccaaatcctggggccactggaaccagcttcacaccaggattcactgaatgggcctggtgctggggtctgctggagttttctgagggtccactccagaccctatttgcctgggtatcaccagcaaaggctgcctgctcctttttcctggaagctttgtcccagaagagcacctaccagatgtcagttggagctctcctgtatgaggtccactttcaactgggtttctgtcacttgcaattgaaattatccaaatcaacataatagttcaaaaaaattttgataatttatttatcatagtaactcatcaacttttaaaatacttttatattaagacatatggcaaaatgtttttgagaagagagaagttggagtaatgacgaaagctgatttgtgagtcaaaaacagtttttcttaaagtaatagaattgcacaagtagcctatataaagtaaaggattttaaaatataaaggtttctagtcaaaaagtttttggggggtgggagaactggaaaactggacttattcctagaatagattcagcattttacccttatgaaataactttgtgccatagacacagatttattaaatcatgaggaaatttgcctgaccacagtgttagcacacataaatcgttgggtcttgtgtgtatgttgcatgtatgc

SEQ ID NO: 475362 - DNA, 582 bp, Homo sapiens
ttgcaacctatttttttttttttacacggagatcttgttcatgggcctctctgtacttggtctccagggacctttccccaatcccaacgcagccaactcctgcttgtccccagaagtcagcttagcagctcttcctccaagaaggcttgcccacccacagctctggaccaggagttcccccacccccatggccacctgtactgcccctcgcatgacaggaagtgatgcctcctctgagatctcagaagctgaaggcagggtggtgggagtctggggacattccaggcagaggggattggcctctggtaggaaagagaaaataatatatgagggatggagatggggagatgggcagtgtgtctggggccaagagcatgagaaaagatgtgtaagagatgatgctggaggggccagcagaggccaggctacacagagctttctgggacaagtaaggagtttgcggttttatcccaagcaatgaaaagacactgaaagcttagagggggtgactgatatggtttggctctgtgtccctacccaaatctcatcttgaattgtaatctccatgtgtcaaggggggaa

SEQ ID NO: 475363 - DNA, 1077 bp, Homo sapiens
agtcttcatcagctttaactagccatgcttactagagcagtggctcttaatccatcagacataatgcatgctttcaaggcccaagtttcaccggctgcacggaaggctggagaccacagggtcaactttctgctgatggaggaccctgagaaaaagctgaatcagaagagtgatggcaaaccccggaaagtacgatttaaaatctcctcctcctacagcggtcgagtattgaagcaggtctttgaggatgggcaggaattagagtcaccaaaggaggaataccctcacagttttctgcaagagtctcttgaaacaatggatggtgtttatgggtctggggaagtccccaggccccagatgtgctcccctaagctgactgctcagaggatcagtgtgtttagagagggtaatgcctacaccttggcaggcggccagcctcggttcaacgattacaaggcgaatgaccataagcataagctctgggtagttggagtcctgggaagggatggtgaaacgcaaatcagccagaggatatgttatgtgaggaagaagtttgagctaatgcccctacctattatagattttggaaagataatcatctacactaataacctgaaaatcattcgaaccccaatggacaagagagattttgtgaggaaaattctccagaaggaagaggaggctgaggaagagtctctgatgaacaaagaagaaagctatggaggcagggaccagcacgatagacctttggtggaggcagaaagcacattaccccaaaaccggtatacacaggtgcgttggggagcttgactgtcctgctcggagctggccctacagcaatggtctccaagctggcttgattgtgcactgcttaagtaaaaccttttgaatatgaatacttaagatacctaaacttgaagatatgaggaattttaacatttgttatattttaatggtacattgttagcaatagcagttataagtccatatttcagatactctaaatttttaattttttggctgacttctttttagatctgattaaatatttattgttttcactgtgcagtgtggttt

SEQ ID NO: 475364 - DNA, 639 bp, Homo sapiens
cgctgctcctccaggtgggaactggagttttgaaataaaatggatgatttgacgttacttgatcttctggagtgccctgtgtgctttgagaagctcgatgtcacagccaaagtcctcccttgccagcacaccttctgcaaaccatgtctacagagggttttcaaggcccacaaagagctgcggtgccccgaatgcaggacgcctgtgttttccaacattgaggcgctgccggccaacctgctgctcgtgcgccttctggatggagtgcgctcagggcagagctccgggagagggggctccttccgcaggcctggcacgatgaccttgcaggatggcaggaaaagcaggaccaaccccagacgtctgcaggccagtcctttccggctagtgcctaatgtcagaatccacatggatgggtccagcagaattatttgcactgtcacccctggagtcagtgtaaaaaagtggacacggaaagctgtggcttgggccattggcatacttagaaaatcaaagctacattccttgaagtcttacctagagcaagcattagagtctaaatgctggcagcagtgtcccacatctccctgctctgaagaggaataacgtgtgggagggtcttgcaggactgcttcctta

SEQ ID NO: 475365 - DNA, 867 bp, Homo sapiens
ggtccttgcgatagtttgctgagaatgatggtttccagcttcatccatccaaacctcaccgcaagacaccttttagagaagaacaaaggtcgccagtcatcccgcacaaaaaacctgtccctggtgtcctcgtcctccagaggcaacacgtctaccctccgtaggggcccagggtccaggaggaaggtgcctgggcagttttccatcacaacagccttgaacactctcaaccggatggtccattctccttcagggcgccatatggtagagatcagcaccccagtgctcatcagctccagcaacccctctgtgatcacccagcccatggagaaagcagacgttccttccagctgtgtgggacaggaaatgacctcacagatgaactgcaactacggactaaaaacaatggcactcgaaaacaattcaggattagacctgaagatactgagagtcacaacccaactttatggttctcagggctgccatgagaaatggtttacttagcactaatatatatattttttcctttggatggttctcagggctgccatgagaaatggtttacttagcactaatatatatattttttcctttggacaccctcccagttcaaatttatatttaagattcttagctaatcttccttcttgaggggagcttttagaatctgtcatttgtgtgactggggagaaccctgaattaacacagggaatgggccaaacgttttaaaatctaaatgatcattccaatctgaatgttttaaggtatagtttttcacaactactaacagatatggaggagggggtgatcttgcctcttatatgtaaaacactggcaggaaaaggtacttccttaacagactcaagg

SEQ ID NO: 475366 - DNA, 1821 bp, Homo sapiens
tttaatcttgggagggtggctagcagacaagagaggttaagtctgatgaaccatggagatcatggctgcatttcctgccatgggctccatctcagggagattagagttctgtctgcaaaccctggctggagttattgaaattcccacagggaggcttcacccagtgagaaggaatggatctgagtcccacctaaacaagaagtctggccatgatctgcacacagccgctgtgctgccctgtggagaattcctcttggtccaaaccacccagtctctctggcaccagcaggggaaaacaacagactggagccacagtgatggctgttcccctccccttgggagggagtatttggcagtcatcttaggcagtcccaatcatcttatgcagtatccagcctgcagctgctggctgcaacctgagcggccatcaagcatctgcacagctctgtgcttgggaacctaggccctggtggcatgggctcacgaagagatctcctgatctgaaggttgcacagatctgtggagaaagtgttgtttcccaggcagaagctgtatgctatggatttttctgatcatttcatgctgagctcaggggagggactctaaagtgagtgcatacaagtccaaactgttaccattgttgtcaactgcccccaggcatgctgagtgtgctgagtccctacagtgttcctttgcgagaagaagaagagtgaaaagatgaaggttggaagtctgaacaggctcatgtcagatgagtcttcctttataatggcaattccttcttaaattgcattggccatggataggaacatagctagcctcaattgtgttagtctggaggtgcagcatttttaacatagcacatttccccccaccccctgcaagattaggattttatcaagaagagagaacggattctaggtgagcaatcagccaagatttatcagagctttatatttctcagcaaagcacttagttttgctgagattcagtttcttcatacttgaaatgggaaaaataaagtgtctcatggggttgttgtgaggacataaggcatgtatgtaaagcaatcagcacaatgcctaacatataataagcattcaagaaatttcagctattacatattaaaatgcttataaacataataatctatcatatgattgtacctcaatttcattggcaacgctaattgaatttttggttattgtaaatttcttataaataataataaatacttgtatttttatttaagcttatgctgctgggaataattcgtgtgtatatttttcttcagtttgtgttatattcttaaaaattcataggaattaaagtaatggatcaaggtgcttcaacattttaaaaatactcaattcatcttgatggcttgctcttcaaaatgcactttttacacaattcatttccacagcagttcccatttcttcattctaaactttacctcattgagtatagtcattagaaatgaaattgctaatatgatgggtgatatggaagactattacctactcatcaaagcccagactctcttcttcttcatgggaatactgcttatgtatattcctcatctgcccttgcagataggaatgcagccggtgcatcacctgataataagtacataagatgtaaaacgaaatatattgtgtgatgaacctatatatatatattcttaaagacatcttgaaccatcataaaatcatattagtattgatttttgtttaaataagcattgcagactgaaatgccttcagggcataggcaagtatcataaatgtacgaaggagtcagaaacaattgagaagtgtt

SEQ ID NO: 475367 - DNA, 709 bp, Homo sapiens
cgcggcggcagaagccatgagcagcaaagtctctcgcgacacccagtgggaggcagtgcggaaagtcctgcacaggaaccagcgctagcgccacaaattccaggagacggtgtaggtgcagatcagcttgaagaagtatgacccacagaaggacaagtgctcctcgggcaccatcaggcttaagtccactccccgccccaagttctctgtgtgtgttctggcggaccagtagcactgcgacgaggccaaggccatggatatcccccacatggacactgaggcgctgaaaaaactcaacaagaataaaaaactggtcaagaagctggccaagaagtatgatgcgtttttggcctcagagtctctgatcaagcagattccacgaatcctcggcccagatctaaataaggcaggaaagttcccttccctgctcacacacaacgaaaacatggtggccaaagtggatgaggtgaagttcacaatcaagttccaaatgaagaaggtgttatatctggctgtagctgttgctacaatgcaaacccagcttatatatgtagcattcatgtggaccctcttcctcaccaccctaaccctgggggcaagaggaactaaagcaaacatgcggatgctcatgctacttactgaactgtgagtaataaattcttttgcctctgacccattaatcttgtgtctcctgccagtatccttgaaa

SEQ ID NO: 475368 - DNA, 879 bp, Homo sapiens
caataagaaaatgggtcagaacttaagtcagtaatctacattgctaaccagttttcttgagaaaaatataatgcaaacagaggaatgcacaagcagctgaatttcagaggaaggttgtcagtcttcttctcctttattgtgacttacaaagactttgtaactgtgattcaggccccccagcacccccgtgactgtagagtaccttcaaaactcagctgtcccagccagtgccaacctgtgaacttcccgccatatcccagatctgctatcccccaaaccacttcccagttttcctttgaaaagaagaccaaaatgaccattatcaggaatgaaaaagacatcactgcaaagcctacagacattaaaaataatcataagaaaccggaagacgactttgaagcacggcctaataagaacctggtgtttgcctctcctttagacattgtggatgctcttgagagcagcagcctcgaccatggctttagctgaattacgtaagttttgatatgtcatacttctatgagcattcaatgaaacattttaaaataatttccactgcgatttcttctttgattcatgactttttcttttggaagtatattgtttaattccaaacatttggggatcattctaattatctttttgttattgatttataacttaattccgctggtcagaaaacatactctacagatttcaatccttaaatattagttgaaatttgctaaatttattgaaatttatcatccagcatataagtctatcttagtaaataatctatgtgtacttaaaaaaatatataccctgtagttgatgagggctatataaatatatatgttaattacatcttgtctgttaattgtgacattcaaatcttct

SEQ ID NO: 475369 - DNA, 588 bp, Homo sapiens
tcgctgtgctaaacacttcccatgtcaatttacacagcaaattcaaaagtttgtgttcctgttttattcctgaaaccagagtatagtaaagaaagcctgagagactccttacagagtggattcacactcttttcttgcctgattttcacaataactctaagccaaaaagttaagacacttattatttccttgttacagacaaggaaactgagactgactgagagatcaagatctttgaatttggagattgtacatgccacacagataaattgtcagctttttcttgcatatccctgcgctctgatcacgttgtccccagatgccacctgctgcattcaactcattgacatggagcataacaatgtggatgtcatcaggctcagcaggttccatgtttgcaggaccgtgggccacacctttgtaccttcctccatttggccaccctcaagggaccttgatgaagctgttgatacttgtggctggaaataaccgtcccagaggttccagctgccccaagaggcaaggcatcaatatcataccccatggtgcactgactcgccatttgggccgtcccgtgtaggatgcatc

SEQ ID NO: 475370 - DNA, 654 bp, Homo sapiens
ccctgactgttagaaggaaaactaacagaaaggaatagcgtcaacatcaacaaaaggacatccacgcagagaccccatccgaatgtcaccaacatcaaagaccaaaggtagataaacacgaagatggagagaaaccaggcaaaaaggctgaaaattgcaaaaaccagaaagcctcttctccaaaggatcgcaactctgccagcaagggaacagaactggatggagaatgagtttgatgaattgacagaagtaggattcagaaggtgggtaataacaaactcctcccagctaaaggagcatgttctaacccaatgcaaaaaagctacaaacattgaaaaaagtgatggggagaatggaaccaagttggaaaacactcttcaagatactatccaggagaacttccccaaactagccagacaggccaacattcaaattcaggaaatacagataacaccacaaagatactcctcgagaagagcaaccccaagacacataatcaccagattcaccaaggttgaaatgaaggaaaaaatgttaagggtagcccatcaaattaacagcagatctctcagcagaaagcctacaagccagaagagactgggagccaacattcaacattcttaaagaaaagaatttcaacccagaatttcatat

SEQ ID NO: 475371 - DNA, 764 bp, Homo sapiens
aaaagaaacttagctgctgctccagccatgactaaaaggggccaaggtacagcttgggctgttgcttcagagggaggaagcccccagccttggcagcttccacatgatattgagcctttaagtgcacagaagtcaagaattgaggtttgggaacctctgcctagatttcaaagggtgtatggaaactcctggatgtccaggcagaagtttgctgcagggatggggcccggatggagaacctctgctagggcagtgcagaagggaaatgtgggatcagagcccccacacagagtccctactggggcactgcctagtggagctgtgagaagagagccactatcctccagaccccagaatggtagatccactgacagcttgcaccgtgcacctggaaaagctgcagacactcaacaccagcccgtgaaagcagccaggagggggcctataccctgcaaagccacaggggcagagctgcccaaggcagtgggagcccacctcttgcatcagcatgacctagatatgagacctggagtcaaagaagatcatttggagctttaagatttgactgcctcactggattttggacttgcatgggccctgcctttgactgattgaataagaccaaaccacgttttgaacactaatctgctttactcaaaatctatagttttaaatgttaatcacatctaaaaaataccttcccagcaacatctatactgctgtttgaccaaaaactggggtaccatggcctagccatttgacac

SEQ ID NO: 475372 - DNA, 934 bp, Homo sapiens
actatccaggcatttcctccagttctcccatctctctaggcttcaggatgcagactatagatagaagttggtaaggtgagatggggtctggggagtggaagatggagagaggagactgggaacagaatttcttccaagcttccttaaaccaaattaaccacagagggatgacacagagacagaaaaacatcaagaagggggagaagaacacaattgtcacctcctacaacaggaacttcacgggccgcaatgacacaaaccccaagaccatgccttcaatcatctccccagagattgtcacagccctggccattgcaagaaccctaagttcaacccagagaccgactgccttatgggcaaggatggcaagaagttcaagctggaggctccagacgcaatatgagcttccccaagcgcagtttgacccagggcaggacacctaccagcaccccccaaaggacagcagcaggcagcatgtggatgtgagctccaccagccagcacctgcagctcgtggagccttttgacaagtgggatggcaaggacctggaggacctgcagatcctcatcaaagtcaaagggaagtgtcccactgaccacatctcggctgctggcccctggctcaagttccacgggcacttggagtacatctccaacaacttgctcattggtgccatgaacattgaaaacagcaaggccaactccgtgcacaatgccctcacccaggagtttggccccatccctgacactgcccgctactacaagaaacatggcatcaggtgggtggtgattagggatgagaactaccgcgaggactcgcacggggagcacacagcactggagcatcacctcctcaggggccgggccatcatcaccaagagctttgccaggatccacgagaccagggcctgcagggcctgctgaccctgaccttc

SEQ ID NO: 475373 - DNA, 1102 bp, Homo sapiens
tgataccagcgccacaggttctccagaacctagagaactggccatggtgaggcagggtgccacatcagctcacgtacctggagggacagatactctgctgggccagggccccagttccccagttcctcaaaggaaagagaggaaggaaggaaggaaaaaaggaaggaagccagcgaccaagccacgaccaagcccaaccacgaaggccaacaccaagcgagcgccagagcgaccacaaagccaaagacctcacagagcccacacgcgcccccccggccccacagggccacacgtccagaccaacagagccagagccgcgccaccacaacacaccacacagaccacgacacgacaggccacagccagcgcgaccaaccacaagccacaccccagccacacagccaccactaccgggggcgacacgaccacgacacacaagccacaaccacacgcgagcccaccaagccaccccgccagccaaaccaagccacggccaccgcccaccccgcgaccacccgccacgccaagccacaaaaccacccccgccacaaacaacgaccacacacggccaggccacggcacaacacccgccacgccaacgcccccgacgacacctcacgagggccacccacccacagccacaaagccacccccacagcaccccaccacgaccaaagaaggaaggaaaagcgaaagacacgacacagcacgagagaaaccgcaacgacaagacatcccgacaccgggcgacacacgacaggacagacgagagagacgggaggacagacagcagggagggagcgaacgagaaccggcccatggcggcgcggcagcggaccctctgtttttggtgtcccaatagagggagatattgaatatgtcttaccttgattgtggtgatagtatcatgagcgtttttgcatgttcagagtcactaaattgtacatattaaatatctataattatttctttatcaattatagcttaataaagctttttaaaaaagaaaaaagtggaacatattatctttagagaaactaagctgtgaaaacaagtagtaaaaacaacatacctttagtactttactaaagaaagtcagtgt

SEQ ID NO: 475374 - DNA, 609 bp, Homo sapiens
tagtagtaaagtccacttgatatgaaccagtgtcaagatcgcatgggtttggaatatgggctctcattcctctgtagctggagctcttctagcagaggcatgggttggggagctgatgccacagtattggttttttgcgcatctggcggcgagcccctttgctctatgacacctccagtgtgccccagccccagctggtctggctctctcaactccactgcctgtctgtttgcacttctggtgaaagcatgtggaggtggcgagggaatacagctcctcaagtgtgccaggatcaccagatctattcccaagatctgtgattctgtctgcgctgaaccatccaaggtgctggcgtctgccacagagaaaggtcttgtcgtgcagaatgcttttaactttacacattgcattcgaagagggaggagacacatcatgatgattatggccatgggttaagctccctgggtcttggtttccttattgtaaactccggagactgatggtgggtgggctggagagtttctaaagcaccttcccctttttaaatgtctgaaaacatgacaaaagctaagatggtgtttaggactgcgtttgaatgtttctgataag

SEQ ID NO: 475375 - DNA, 828 bp, Homo sapiens
aaatccatagaggcagaaagtagatattgtttcattctggttttgaagccagtacaaacctagagagaatgctagttaaagtcacctgagctgcggctggggtccgggaacagatgcttgactgggtgactaaaaggcatggcagttttcgttatgagaaccgactgaaaagattagagctcttcatcctgaaagggactcagactgcagcctatgaatcaagaagcaatgtgaaggctggggtaagcactctttgtccaacagaccccttggtgaggctgctgaaagtgccatttgatgctcgacaaagctcctttcagaacacggaaagggatttttctctttcaaactgggccaaacgatatcagttcttagtggccataggatcttcctgggaacatctctatagagcagcaggagtgcctattggaggctgtgggacccacagcaagtttgcagactcagtggatgtagagaagagattgggtgtaaaagtagcagagcatgggctcttaaatatgtctgaaatacccccgggggtcccagaacaacttgtagtagaaggagacatggtcaaggcactatggttctatggttaagaaagtattaaagggggtatcagaatacaattttaaaataaaaccaacaaacatgacaacttctattaaaggccagtagttgttgaagaaacactaaaaagaaagttattattttgaataaaagaagcttaccaagctatgtgtggcttggattgtggctaatgtttggtaaggcctcaactttgactctccattcatgaaattcaaggtttcttatctcctgtgttgt

SEQ ID NO: 475376 - DNA, 1257 bp, Homo sapiens
ttaatagcttcctttgcatcgtgggacgagggaggaggagcagaaggagagagagggagctgaaagattgttttgtctgatacagcatgagctttaccactcactccaccacctcctccaccaactactgttccctgggctctgtccagctgcccagctacgtggcccagctggtcagcagtgtggccagtgtctatgcaggtgctgggggctcaggcttccagatctccgtgtcccactccacaagcttctggggtggcttgggggacctggtgggaataggggatatccagaacgagaaggagaccatgcaaggcctgaatgactgtctggcctcctacctggacagagggcattacttcaagaccattgaggacctgagggttcagatcttcgcaagtactatggacagtgcctgcatcattctgcagactgacaaggcccatatagctgctgatgactttagagtcaagtgtgagacagaactggccatgtgccagtctgtggagagtgacatccatgggctccgcaagaccactgatgacaccaatgtcactcagctgcagctggagacagagattgaggctctcaaggaggagctactcttcatgaagaagacccacgaagaggaagtaaaaggcctccaagcccagattgccagctctgggttgaccatgcaggtagatgccctcaaatctcaggacctggccaagatcatggcagacatccgtgcccaatatgacaagttggctcagaagaaccgagaggagctgaacaagtactggttggagaacagcctgagggaggtggagacccgctatgccatgcagatggagcagctcaacagggttctgctgcacttgaagttggagctggcacagacctgggcagaggggcaacaccaggtccaggaatttgaggctctgctgaacataaagatcaagctggaggcggagatcactacctaccaccacctgctggaagatgaggagggcttcaatcctggtgatgccctggatagcagcaactccatccaaagcatccagaagaccaccacccacaggataaaatttccagaagacatagcaagtgctcttgttcacaaagaaaatgaaattcaagttttgagtaatggcattgtgcagctgaaatagctgcaggtgaccagactgagaaattaaaaaacagatgatgaatgtctcacaaaaggaatctttgttaacaatagttgaaaactacatagaccatttctaatcc

SEQ ID NO: 475377 - DNA, 747 bp, Homo sapiens
tgaaggcttataactcaaccactactacccattcagaagagcagaaagtatctgctgtgtgagcgtccatatgttacctaatgtgtattttgctgtcatctcagctgatagatgtcagagagctagttatcatgaaagtcaaggaggaagagatttacaaaggtcaacattgtcaaaaggagcaaagaggtcaaataagatagagctgtcggaaattttcttaagatcagttgcagtgaatagactgggggtaaaggaggaaaattcaaagattgaggagagaatggagacagagtcttgctgtgttgcccatgctaaagcacagtatctattcacaggcaccatatcgtgcatcgtgcaccttgaactgctggactcaagcaatcctgctgcctcaacctctccagtagctgacactataggcatgtgccactacaccaggctgccccacagatttcttctcttccttggaccagcagcatattattctcacggcaaaaggcagaagaggaagagggcaagcccaaatgctcatttcaaacctgtgcttacaaggcccttggcattcactgaccgaaaaatactggaatgagggctaaggtttaacaaattttaataagatatttagaattaccttctcagaatttgaatactgtaactacaaacattcaaatatattctaaacttcaatttaatctttcttgaaaatgacaaatacatatttttaaaaatttatttatttattta

SEQ ID NO: 475378 - DNA, 707 bp, Homo sapiens
cggttcgttcattgagatctggacatctgaatatggtcaaccagaatctggaattttcgaaggcatctcagatgatgcttctcagagctatatttaggaatgccaccttaaaacatatcagtagtaatcttatctttagcattctgcagaaggttttagtggtctggatggaagatcaaactggccacagcagttcctcaagtcaaaacctaatccagagcaaggccctatctctcttcaattctgtgaaggctaagagagacaaggaagctgcacaattaaagctggaagctaacagaggttggttcatgaagtttaaggaaagaagacatctccaccccgtaaaaataccatggtcagaaacaagtgctaatgtagaaacctcagcaagttatccagaagatctagctgagatacctgaaggtgactatatgtctggagttggttccttccagtggatttgtggtcttgctgacttcaagaatgaagccgcagaacttcacagtgtaacagctcttaaagatggcacagactcaaagagtgggcagtagcaagatttattgtgaagagtgaaagaacaaagcttccacagtgtggaagggaacccgagtgcattgccactgctggctggggtggccagcttttattcccttatttgtccccatccatgtcgtgctgattggtccattttacagagtgctgattgg

SEQ ID NO: 475379 - DNA, 1511 bp, Homo sapiens
acagtcaaatgctaaatgggagatgttactacgtaagaaagacacagacagatgcaaagctgacagctttgaaggtggaggaagaagatcacacaccaagaaatgtgggcagcttctggaagctgaaaagaggggcccaaaaagatcagcagctgatttaacattggaaaccataaaggccagaagacagtgggatgacacattcaaagtgctgaaacaacaacaacaacaacaacaacaacaacaaaaacaaaaacagatatgtgacccaaaattcttatatccagtaaagcaagttttcaaaaatgaaggcaaaataaagacctttccagataagcaagaaatgagagaatttgctgctagaagacctgtcttaccagaaatattgaaggagactcatcagacagaagcaagtaaacccaaatggaaatttgaatgtattcaagaaaacaaacaggattaggaaaggattgctttggttattcaggctcttttttggttccataagaattttagaatagttttttatagttctgtgaaaaatgatattgacattcgtagtttgatagaaatagcattggatttatagattgctttgggcagtatgtccattttaacaatattgattcttccaatccatgagtatgaaaaatttttctatttgcatgtgtcatatctgatttattttagcagtatattatagttctccttgaagaggtctttcacctccttggttagacgtattctgaggtattatattctatcatattgtatttttctgactattataagtgggatcgtgttcttgatttgactctcaacttgaatgttgttggtatatagaaatgctaattttggtacattgattttgtatcctgaagctttgatgaggtcattttcagttctaagagccctttagtggggtctttagggttttcaacgtacagaatcatattatccatgaagagagatagtttgccctcttttcctatttggatgtcttttatttctttttcttgccctagtgctctggctagcacttccagtagtatggcaaattgtctagttttctcctcagttctgttggctttttcttcatgtattttgagactctgttgtctattttatatatggttatgtatgattataatcattataacttgctgatggattgaccctttttattctaaaatatcatttatctttagtaacctttttaaaatttttataaatatttaacagtaacataaaggacgtgagtggaagcaagatattaacttatatatacaggataaaataagaaaattagaaatagtaaataagaaggcatagatagcatcaaaaatatatactgcactcctttcttttttcagcttttttaatagacatcaaattatataaagtaataattataataatttatgttgtttctgtaatacaattaaaaataatatgtttaataataatatcacaaaaagagaagaggaaatagagataggagtaatgttttc

SEQ ID NO: 475380 - DNA, 762 bp, Homo sapiens
agcagtggtaatgtaaagaaagcccacatcttccaactttcaatattgaccactgtttgcaatggaaataaaggcaactaggtttcctaagagagttaggagcgaaaagaagaggcaggaggaggatatgaagaaacatccctccccttcctgcctgggtggtgtcagagatgaccaagtggggactgaagactttcatccccctggtggagagcacatgggaagcctagacttccactcccactcagcagtaaaaatctgttcatcctcttccccattggattgggaatcggcaaagggaaaaggcccatgggatgaaggccagaagaaatcaagctacaagtttttctctccagtggagtcccatgaggatgcacacaactctcccagcagcaatgtgggacaacacatgcaaagtattggccatcagggaagctccccccagctttggtcaccagggttttttattggttgtcagtcatgcacacattcagtgcttctgtgactgacctcacccaccagactgtaacctcaagagcaaaatcaggtattcaccataaatcagactgttaggataaacttatatgctcaaattgccatagcatggcccaaggcctcaggcttatggaaatattatcaggcagggtattccaggagctcagaaattgtctccaggagacgaatgggacagggaaggtaggaggttgtagcaacttgctaaaatgggagacatttcacaagaaaaaatcagttgtagaaaat

SEQ ID NO: 475381 - DNA, 868 bp, Homo sapiens
gagttaatgggtgcagcacaccaacatggcacatgtatacatatgtaacaaacctgcacgttgtgcacatgtaccgcccttggacagctggagtggtgtgggtgatggcagtagtggtattggagcaactactgggacccaggtgttttgtgttggtgttgctggaggctgcgatgggcattatgaccgtcatgcacaactggcttttcactccctgaggattccctctggctgccagaaccttctctccctaggtcccttgaagggccagagagttaacatcttgtgggagcagcccccaggaagtgatctctcctgttggatggccctgagtcacatgtgccacagtagctcccagctttatcccagtgggaactactgcccctctaccagtgcctctgcatctgttaccacagaactgtcggaggagaacagggaaatgtcagcaagttcccctgaaacaaagcagtgtcagcctctgagcagagcccaggccctatccaaccagactggacttgggaaagtaggaacaccgaaggtcacatactcccagaagagaaaaattagaagtcagggcccccaaaatatgccatttcctggactctctgggaagtgacttgtgttaccacctgtgtaagagatattctgaaaattttattttattccattttatattaaagatttgaactggaaagccaaaatcaaatttgttaggaaacttgaaaatttagctcagaaccataaataccaaataaatgataattgacaacacatttgaaagggaaaataaagtacttcaaaatagaaggtaatgtaatcataaataatcttagctctttcataattgaagagccaattattctgtaat

SEQ ID NO: 475382 - DNA, 2256 bp, Homo sapiens
ctccaggtctgtgatgcgaggggcgccacaaactggattcacacattttattgatatgttggctataataatcattctccctaaagctatttcaatgaagggcatatccactggaaataataacatcactataaagaaggagaagaagaaagaggtagaaaagaaggaggaagaagaggaaaaatgtgggagaaaacagcgacaacatcagcttctgttgtatttgcagcaggcaattgagggtaaggtgatgtcatcctccaggacaaagtacgagcttgctataaaggtatatccccatatctgtctgttctttggctgtgttgtaaacctgctgtgtgtacaggatccacttagtccactgtgctttattccagtggaacttgtgggcaaagaaaaccaatgcatacatgaaatgcatattgcttgctgttatgtgaaaagtcctctgttaccgaccctgtagctttctgtgttcttccatcaaccatgacaccatacaaagctaacttacaagcttgcaaaggggtaaaggcccagattctggcaggagtgaaaaagaatgaaaacttgttatgttaataattgcaattcctttactatgctataatgtaggtaataacatgatttttctcatgaagaggagtttctcactcagttgaatagttgggagatttgttagataatgtgttaatattaatatgtaaagtactgacatgtataaattaatttcttctatcatataaactagagaagatctaaggttataatgataaaaaacctcaccccagattaatgacagtgatacaaaaggaattcattgaggacaaagaaggcgtcactgaattctgtaacccaggctttatttttcctttgacttccctgcataagttttaagattctattaaaatttagagtaatcactactcatttctacacgggaatattttagtgatggaaacatctattggtgttgggaaaggatgggttctgagtatgtgttttcatagcattttccatgaaaaattgtcacttgattagctcagagaaaagaagaacgcaaagaggctggtggagattactgggaggatgccggtggacaaagacagatctagggacaactgtaaggatatctcattcacaatcagattataagggatccctttattcttatttactctgtattacctggagaaaaatgtaaaaaacactgctttagtgagaaatgaatacattttggagataagcaaaacaggtttgagtttctgttaagacttcctgactgtatgaacttgcaaactacacagctctctgagtctttggtttatgtgtaaactggagagactactttttgtgaattctataatcttatttttgtaaagttaatcttttttgaattcttaaatgaaataattcataaaatttaataattcaaataatttatttcataaattatgaaataattcataatttaaaaattcccaccacaggcagacactttttgtgtacccccacatggtactgtgcagcatcaagcacattcttaggcatgctcataaatattaactcatttaaattcttcaataattccatgagatagataacattattctcccactttaagatagagaaaatgagatacagaaagattaaatgacttgcacaagatcatatgcaaaaagataagaccagggttggaccaatatattcatattattaaacactagctgtactatcctactgttcaacaaatagttcccaagctctaagccctcagtaagcttcacaccatgaaggagctatgtcaatatgaatctttgaagctttataattgattagtacaattttgaaatactttttcctctttagcgtacattgattttgtgtcacttctctgggagatatagttaaaaggaagttttattaggtcggtgcaaaagtaattgcagtttctgccattacttctaatggcaaaaaaaaaaaaaaaaaaaaaaaaccaattaattttgcaccaacttaaaattttgtaattgaaaataaagtagttaaaagttaatctcaccatcacagaaagactgaaataaatactgtaagacatgaatcatgccatttctctaggcctcatatccttgtccacagcatttcttcctatcaaaacctttatatcttcttttctttgcagcattatttaaagaagagctttacttcagaatttagaatttaaaatataaagtttagatcatgtccaaattttcc

SEQ ID NO: 475383 - DNA, 1263 bp, Homo sapiens
gaggcccgggacttatagtatgtctatctggctttataatccaagctctctatgccatgattctgcaaagagcattgtatattggagattccaaacaccaagaacatgatgtagcaaatggtaggtattcaacaaagaattatcaagtgaatgagaaaaagaaagtggatgtaaatatgactgcagaattgcccctaagctgctcctctgggcacactgcctatggggtaaccctggttcacaaagagcagtaccttgctgctgctgtacactgctgctttaaagaagacaggaaaaggtggaaaagtttggaacttcctagagacttgcagggctcagaatacaggaagatgtttgaaagtttggaacttcctagagacttgttgaatgcctttgaccaaaatgctgatagtgatatggacaatgaaggccaggctgaggcccgggggcctaggaggaaaaaatggttctgtgggccaggtccagggactttcatcctagccactctagctacagccgtggctaaaaggggccaaggtacacctcgggccatttctcctgagagtgtaagccccaaaccttggcagctctcacatggcattgggcctaagatgatgattttgactccagatcttaaatgctcttctaggattccaaaatgttacaactcatccattggtttcctaagatagaggttgaacatatggctttattacacttctcagaaggaaatattttagttctaaaactttttatagttttaaaatgataaatagtattatctgtatcaaccgggtatgaaaatagattacttaacatgattatatactgtgttacaatggcgcataactgaacttatacagtatgttgcttttacttacaagtatggaaataaataatgatacatttcaaattcatcccagaggctattttaaacttgtcatttaaaatacagtttctatattcaatatcttggtagaaacaaaattatatttaattttattgaagatgctttttgtttaatgatgctgttatacattaatgttctcttatgccatcattgaaaaagattatattatgtttgtataattgtcaacaattatacattgtaaaatgcaaatatactttctcacttttaccattgtatatattctgttgaagatatggtccaaaaaaaaacaacccattcaattcacttaatgacttatgttttaaactttttgcgtatgtcagaagccagtgtggcaactgataatatgatac

SEQ ID NO: 475384 - DNA, 488 bp, Homo sapiens
agcaaattctgagttgacagcaactctggaaggagagagagatgattcacacagattataacagtaataactgtttaccagatgaagatgagggacttgttgggaactggagtaaagatcactcttgctatgcaaagagactggcagcatttcgctcctgtcctagagatctgtggaactttgaacttgagagagatgatttagggtatctggcagaagaaatttctaagtggttaagcattcaagaggaagcagaccataaaagtttggaaaatttgcagcctggtgatgcaatagaaaagaaaaactctttttcagggcagaaattcaagctggcagcagaaatttgcataagtaacaaggagccaaaagctaattgccaggactacggggaaaatgtctccagggcatgttagagacctctgtggcagactctcccatcaaagacccataggcctataagggaaaaatggttacctgggccaggt

SEQ ID NO: 475385 - DNA, 588 bp, Homo sapiens
gagggctgccagcacgctgtcacctctcagttgcaacaccttggactaggctttggtccctggaacccatgagtaccgcaaatgttgcagatgttgcagaaagtttgcagaatgtggttaagagtctgctcccacatcatttctggcattcactctctctctctttgactggctggcattgggtcacatgtctccccttgaacccatctctggggcctggaggatgggatacagaaactgtagtggaaaattacagtcaaaggggttgttctctggcgggcaggggcggagttcacaaggtgctcggagaggagcttctgagactcattgtccaggagaaggaatttcacaagataatgtcatcagttaaggcaggaactgaccattttcacttcttttgtgattcttcagttgccttaggccatctggatgtgtacgtgcgggtttgggctcagaggcctgacatccctgtcttcttatattaataagaaaaataaaacaaaatagtggtgaagtgttggggcggcaaaaaattttgggggtggtatgaagagataatgggtgatgtttctcagggctgctttgagc

SEQ ID NO: 475386 - DNA, 1603 bp, Homo sapiens
gcaaaaggaagaggccagtttgaaggttattgccatagcccatgcaagagacaatgatggcctggacttggccaactggcattagtttagattgtatgacccgcccccggccaatggggaaagggtacaagggcaggacttgcgttgggaataaaggctcttgtacccctttgttcaggtgtgttctcatggcaaccggccaaggaggcacccctctgcgcaaaagcggcttaagcctgccctgtggagtgtccctgcaggggactccagccagcctgagaggcacgatccaaagagcgctcctgggtaggcaattgccctggtggaacgccttgccagagcagcacataacaggcccctgtggaggattaacacagcggctgaatacccggaaggaactgggacttggattaaaagaacagcagcataagcggctggcaaaggcaaggaaagaccagcagagagaaaaaaaggccatctataccaattctaagttaatttagactaaacaaggtcttattaatagcaaaggataattgaaatcccaaacttacaaggttttcaacaaaagtgaagtttgctaaaggttagcagtgtagcatgtattatggtaacttctaatcttgtggccttagacagtctagtccaaagacataaaaaaagttccctttaaaaaaaggaatggttatgttccaaaaaaaaaaaaaaaaaatgggaggcagaatttatgtaaaaggagtgttatatggtaaattcttgtcctgaaataaattaactggttgtttaaaaagaaaatgtttgtagtaagtcagaaagttgagacatgttgaagaactgttggccaaagtcatgaaaaaaaattataaaaaaatttatgcgaaaaatgttgtataatttaaaagtaataaggcctcccgagtactattaaaaaatagtttatgtgcaaggtgtataagaaaaataaaatatacctttggtaaaaagattataaaggggcataagaatgtagatttttacctacattaaaaggttaaaaaaattgttttaaaagtttaagcaagttttaaaatgttaattgtaaaaaaaaattctgtgtgtaaacatattaactaaagttaaaaaggtatcatccagtttttctgtgaactggacattaaagtaaaaatgcaacaggtttttctgaaagcatcaacctgctctttaacaaaagttacaaaaggttaaaaagagtctataaaatcttaccttatggtcaaacataaaaaaaattggataaatatgtctacaaggttttactaaaattgtttaactttaatagctcactaatataaaggtaaaatttagcttatctggtataaaaatcatacaagaagcattattaaatataaaatggtgtttagctctctttggtctaaaaactaataaaaattggtgctaaaggaaacattcattttactagaagatcataaaagttaaagactttaaaaaaactttggcaattaagacagcataccaagatgcaaatgcctggttgaaatggatcaaatattccatctgcacgttaaacaaaagcaattgttatgcttgtgcacatggcagtcca

SEQ ID NO: 475387 - DNA, 630 bp, Homo sapiens
gagagattgcaaaaacaattcactgccaacagactgtcccagcagggtcccagtgctatggtcgtggccctgattggcatgctgcccctcggatgcccaatcagatggaaccggaagaaatcgaatacagagaaatgtgggagagcacttgtgtccctgaaggaacagccagttgccatgcgcgaccatcactatagatctacaatttatgaaaataaagcaatatgtgcctgtttcggtgcctgccgtttgcctaccaatggtgcagtgttcaccattccagccctctcggcattcacatttgccatctttacaggtcccgtgctcaatgcagcgggggtggcacacgcgctggtcacacgctgcgcctgtccagccctcttcacagcggcaggctcccccgatgcagacgcctgtggcccctggaccaacagcatcagtatcacctgggaactcgttagaaatgtagactcttgtgccctcgttggaccaagtgaattagaagatctgggaatgggactcagagattttgttggaacaagtcctccaggtggttttgatactcgctagaatgtgagaaccactcttctagagattgagaccactccaaccagtttggcaaagctaacc

SEQ ID NO: 475388 - DNA, 629 bp, Homo sapiens
gaacaaagcttcggaagctagtccacttgcttctgtctagaagaggagggcggtgctgggaggaacctccctgactcctgctgcagacccactgagaggtgactcccacacggctgtcctggaacaagacagcagcttttcttaggttgttctaagttaagggctctcactgctgaagagagtaccaatcactccataacttgggtaatgcatgtcaatggtgatctgtgtggggccgcaaggttccagatggttgggacaactctacaatcagtcacatttgggttggttaaatcccccactcatctttacagctgtatcctgcaagttagtggctgcctgtctctgaacttcaccttccttatgactcagcatcatcaagactggagggacagagcatttgaatcatcagacgctgggccagacgtcaccccacgcgttttctcattttatcgtcctaagaagcccagaagatgttgcatttcagagaggctgagcgtgttgactaaggtcacacagctacaaacatcagggacctgcgaaaaagctctgttccctggtgacaggtgttctgtgatcctaacacagccggaggtggggacaacgtccttgcagtaacaaaggccctg

SEQ ID NO: 475389 - DNA, 948 bp, Homo sapiens
accaggaggaaattgtctgaggacctgacgctggccccttctgccccagcccagacaggctcacatcagtggcgtccaaggccgtgggctggcagctgactgagagctgggcctctgtccttcactggttcctgatgaggggctgagtctttggtttagcaagcacttcctaaatgatgggaaatgaggacgttcccatccttgaggacagatgaacgtttgggaatgtcaccaagcaccaagcaatgttaagtgctacactagccataccgggggcattggcttatcaaaaattggagaagacagtgttacaagaagaacctgagacagtaaatgtaaatcatgtggccccgaccataaatggaatgggggccttcagcatgcactggcatggtcagaggtttggggctggaaccatgaaaagcccctattgggtcctaccttccgcccaccacaccatccagaccaacagatgcttactgtccacaggcttaactgatgattcctgtcacctgattttccaagttgatgggtacaatatacgtcattgtggggacggataccctaaaagccctgacttcactactacaaaatctatgcatgtgacaaaactgcagatgtcccccataaatttgtacaacaagaatttgaaaaacaaaaagtgtcaggggaataaaaagcatttcagttgcttcacctacagtaaatcagacaatgctgacagcaattgccatttaccaagcacctgcaagctcaggcactgtgttaagcctctgtgtgcagactgccctccatgctcacagcgcccctagtgctagatgcggctgatagctccattttgcagactggtaaaactgagtcccagtggcaactaatctgcttagtgtcatgtagacagtaactgctggatctaggatttatccctgtgactttgtgactcaagccttc

SEQ ID NO: 475390 - DNA, 514 bp, Homo sapiens
gcttcatcgggttgattgcatgtctcacagcagaggggtgcaagaacaacatgcaggtgcccctgcactatgtctgcgatcccctgtgtgggggacccggtgcacccatgctgtgtctgcaataccctgcatgggggacccaggtgcacctgcactgtgtctgcgatctcctgagtgggggacctggtacaccttcactgtgtctgcgatctcctgagtgggggacctggtacaccttcactgtgtctgcgatcccctgtgtgggggacccaggtgcacccatgctatgtctgcaatcccctgagtgggggacccaggaggccctgcactgtgtctgtgatcccctgagtgggggactcaggaggccctgcacagggcaggctgatgagacgggatggctggcaggggctcacagcactctgatggctttgcccaggattcctgatagttacactggatcttagaacaaaatcatataaaactggaaaacactatggattcagatttggccttt

SEQ ID NO: 475391 - DNA, 1054 bp, Homo sapiens
ggaaaatgacctcacagcacatctcaagggcagcgactgcgggctatgagacgagcagggcagggacatctaacccaacaggaagaggagcatgtggcttcttgctagacatggcagctgagctgagcctggacgatgtgtgagaatcatccaggtcacgtccagggagctgaatggggctggcagggagaagacaatatgggaaagcgcacgagattcaccactcgcttcaccttctccaccaactaccagtccctaggctccgttcagcctcccagctatggtgtccagctggtcagcagcgcagccagcgtctatgcaggcgctgggggctcgggctcccggatctctatgtcccgctccaccaacttccaaggctgcttggggtctgggggcctggctgcggggctggccgggggtctggagagaatgggaggcatccacaaggagaaggagaccatgcaaagcctgaacgactgcctggcctcctacctggacagagtgaggagccaggagaccgagaaccagaagctggaaaacaaaatctgggagcacctggagaagaagggaccccaggtcagagactggggccattacttcaagaccatcgaggaactgaggactcagatctttgcaaatactgtggacaatgcccgcattgttctgcagatcaacaatgcccgtcttgctgctgatgactttagagtcaagtatgagacagggctggccatgcgccagtctgtggagagcgaaatccatgggctctgcaaagtcactgatgacacaaatgtcactcggctgcagctggagacagagatcgaagctctcaaggaggagctgctcttcatgaagaaaaaccacaaagaggaagtaaaaggcctacaagcccagattgccagctctgggttgaccatggaggtagatgcccccaaatctcagaacctcaccaagatcatggcagacatccgggcccaatacaaggagctggctcggaagaaccaagaggagctggacaagtactagtctcagtagattgaggagagcaccacagtgg

SEQ ID NO: 475392 - DNA, 3391 bp, Homo sapiens
tggggctcacagattggttccatgagccggggctgtcttgtctgctccttagtatacatgtggcagacagagagaagggaagacggagccgccatcttgaacatgattggcacaactgcagcatctatgtctgcagctcgattttacaggctgttcttttgctctaccatggtggacgtaagactggtgtttatccagcccttgctgtgcagcagtcatggtggaaggaatcatgggagtatcatctcattgagcccccaccacctccctgagactgaggtcaatgtccgcattctacagatgaggaaagtcggactcaagagaaccgaagagacccgcctaaggtcagaaccagcttgctggcaggagagtcaggattcgaacccaggtctgttgactcccacatctgactctttccacatactccctgggccagctctccacgccaggcccctctctgccaaagagaagacctttgcgatgttttgtgtccttgaaggcaaaccaaaagaattccctacaactcgctgctggcatttcaagtattggtttatgggtttcttgacctcttccctgaaacaatacgtgtgtacgtgtgtgcatgcagacacaaataccttgtgagtttatactgatatgtccaattcaaattcagcacttcagagatattacttaggcttctctatgttatatttgtatctgcttccacaccgagaaccctggttcttaaggacacagcagttggtaaaatctgaataaaccataattactcatttgctttgttccatttcatacatacaaccatcgcaaaataacaatattaaagttaccaccatggattaaaattgctgaaacggctcattttctttcatatagtagcttcactcttcttcattaaaaaaagaaaagaaaaaaaactgttgtactatatccacatagtcagatcaaagaaccattctctactatcatctttcccttttgactctcatttagccttagttctatgcatagttgtcccttctgtcatttttgttgtctgaagatcattctctagtagattccacaaaaggctcatgggaataatatttcttgagttgataacagtttgtaccctttatatttgaaggttagttttgctagatataaaatccttggctcaccttttctttcctgtgtcttctggtataaaatgttggtgtcaaaaagtctgatgactatcacattttctttatcttataagtcacatgtttttttatttccccatatgcctgaagggctttcttttttctttaatgttcagtgattttactagaatatatctggtttttgtcacgttgggtcaataaagtctcaggtacgtggtgtcatcattcaatacatagtttcaattctttttagtttaggaaatttttgaatcatggattctagcatttgttctgttactttagttttcttcctctgggaattcttttatccatatgttggatcttcttggtctatgttcagtgtttgcaacttcccctcaaattatttttagtctcttttttaacatctttattttaaaattatttctctttttcatattgtatttatcttaaggcattatttgctgtgttgtctgcactgtgcttcttccaagtttagtcttcatttataaaatcattcttttcctttatttctaattctgtcttgagttctgccatctcacttctgaggttttaaatttttgatatatgtgcttctatcattgtcttaaggtcttttatttatctcaaaatagtatattagaatttttatttctttttaaaggatttttctggtgtgttcttattaactgtagaattatttttcagttcttgaatctcttttttcttgcactaacactgtacagcatttgtccttaatgtctttaatgtttatcctttttatgttaatttaattttcctgaactcctagaaagttagttgttcttttataacttcttaggttcctcttctgttattttcatgtaaagtaaaaaattataggattttgctttttgaaacttcttggctatgttctcctctttcactttacctgtactttttcaatcctttatctgtttcccctgtcctatttaattttgattcttttcccagaagtttctcctcagtgttggatcctgtcccagaaaggagttctggtgggtccattctgagattgtgtaggaatgagactgcaccaatctctcccttgcttactggttctactcatcccttttggaagtcagcaaaggccctcctaggttcagctgctgtggccaagttggtctgtcacactttctcatgaatgcctcttggctattttagggtcctctggttcttggggccattagatgccttgttgcttccattactttctctttaatggaagccaataacatgtagctcttatggctattggtgctctggggtttgtgggcattcatttttacctagtttgttttaaagattgtacgtgggtttggggttttctacctggttgctctgtttttatacggggtttgggtacatccaaagctatatttccatcatcactgccctcaaccttttagaaaccatatctaccttatgtgataaatgcatcatcatacaacagtccaatgaaatagctattattttctctcttttgcagaggatgtaagcaagtcttccaaaagagggaaataatgtattcctaagtggcagagctatgatttgaatctgtggaaccctaaaatcgtctatagtgtaacaaattctttgaccttcattattcctgttttaagccacccaataaatatttaaatgcctgctttgttctgggcactgtagaataagcagtggacttaaaataggaataatagtagttataacaaacatatatatggaacaaaaatgttccaggctgtgcgctgagcacgttacacactttattccattccatcctcattaccaccagagctctagataattacagttgagcaaactggggttcaaagaggttaattaatgtaaagcagattgtgtcacattatcttgcttaatagttcacaatgactccctatcatactagaagtcagatttaaaatctttaatctactttaatcacactagaagtcagatttaaaacctacttgacctggcccctgtctacctttctgaccctatcctagaccactctcttccccatccccatgcgccaaccaccccgaccttcttcaagttttttggctgttccaagatcattctcatcccgttccaagatcattctcatcctagggctctcgtctcagctgttccagctgccacatgagctgtccctgaatgtcagaagcatggtgccttcctgtggcttcagagagacctttccc

SEQ ID NO: 475393 - DNA, 615 bp, Homo sapiens
ccacggtagcatcccgcagcagctgtctctgctggtgctcactgtgaccatgatgggtgggactgtgggggcctcagctctcatagaattcaaagacgcacagaacaatgagtcacagaaaagaaggaccccagtggccacaggtcttccatgcttggggttcacagaaccttttccttatagcatcgccctttatgggattcacctccaacaacaaccaggctcagtagttccagcaactaccagttcagttccaaatgtcagatccatggggaacaattggaattggcctggtgtgggtcacttgctcattgtatgccaaagagcaggttcaagagaagatggtgatgagcaaccaagccacagaaagcactggctggcagggggcaccctgattttgggtcaaagctcttccattgggaaaatccaggttgcctgccttccagggaaaccacttggcttagaggaatcaacaggggtttgggagtcggaattggatataaatccttgttccaccacttcctaggtgtgtgaccttgaagatatgacttcccctctctgagcctgtttcctcgggtatagaatggaagtaataatgcctcctttgtgaagggc

SEQ ID NO: 475394 - DNA, 873 bp, Homo sapiens
gacaaggttctggggtgattcgaatgcaccccaatgcatgagagaccagtctattggcttcttgtgataatgaaatcaacctgtccacacagctgtaggcccgttgcagacccatcatctatgggcagcccctatgagctgcactgttgatctcaatcagttcatcaaatcatcgtggcaaccagagagatggagttactctcattcccatttcgtggatgagaaaagtgagactgggagagatccaaacacttgtctcagccagatggataaccactggctgggacacagtaagagccagttcacttcctcttgccctccccaggagaagagagggctaagcagggaggccacggcagaagcggagccctgtgcaaccatgggcaaggacccagaggaccccctggggcaaattcaagcgctgaaggggaaaggccatgttccccacaggaaactgcagagaggggccacccaggaaagcctggcaaactcgtctgagcctaggcggccccaggagagaggcacaacttctgctgagctgtgaagcctcagcgatgctatatgaaatcagccgggctgggtaattcacattaaggcaccggaagctgtctaacagaggcctttttctccttcttttaaattaagcaatgggatttgctcatggactttagggtcctaaatactcttgactcctatggaaaaaatagaggcacgtattagagaagcagcatgactgtgggaatataggagtatatctgggaacttaggagccataagaaccagggagctgagcaccccaggactctctctcctcatttggaatgcctcttttcctctgatttctgactttaccttctcagacagttgtggctc

SEQ ID NO: 475395 - DNA, 617 bp, Homo sapiens
gatcatcatataataaagtgtggcgatgacatgcggcctttagcggtgctgcacacgaagcgctcagcttgggtgctgttaaaatgcagagttcagggccccagcccagacaaatggcacgggcatcttcagagacaaagccctggaatcagtaccttccctaactctctgggtattgatggagtgcatccaggtttgaggatccattactgccctcaccacaaaactgcacagctttttgaaatctgtgaaaaagctgtgcgagtagctattggagcggagtcagctgccgtgattcatggcgtcagtgcgctttggtgtcctgccacgtttccaggctttgtaggaaacaattttatggaaccagttgctgagtggatggaagggatatggtgtaaaggcatcatccacttcatctttcattgggtttgttacctgccccaggtgacaaataagaactctgtgattctcttggaaaaagggaatggtttgtctttgtggacaatagagagttagagaaatacctgccaagaagctcaggaacaagtttacagtaagagtgcagtcattgtggctcttcagacttcatgtcctgaatacctttcactttctcccac

SEQ ID NO: 475396 - DNA, 610 bp, Homo sapiens
tgagcggccagtaagggaagaaaatgatcaaaatttggcaaaatgggaagcaagacgcaatttgcaaacagggaaatcaaacagtgccacatcaaaataagagggaaggaaatccagcagctaagcaggccacacagttcccagatagaggtaaacttcttttctggccgaagccctggttacgggaaacagtgtcttctgaaacgaccaggcaaactgaagtggacagatggaacaattatttggaaagcacaaccaatggaaagcaaaacaaaaagacagagaaaggaaaccctgtacccaaccctgcagttgagaggaaagagtttattggtttaaattattcttattgcctgctggcatcgattgtattttctagttcgttcatttttcacaaatatggcgagaatctgattcaatgccagctgaacaatgagtgtagatttgctgtggaagtgacaggccctaattggatcttcaatgctgaaacagctgtctgggtagaggagctgggcagggggcacatgctttggccttccctcggtgccatcctgcctgagtttagggggctatgctgcataacttaaggtcatgtgaattgtgtttcaaa

SEQ ID NO: 475397 - DNA, 719 bp, Homo sapiens
ccaggtagatatgagtgtcctcacttttgatgaggggctaaagttcagagtgatgaaatgactcatccaggaacatagaactgggtaatgtgggggtctccggtctatatgacaccttttcttatctcagtccttgcatctaacatacattgcagatgttcatgtgtgagtcataaaactaatatcaaccacagctgccattgtctgagtccttaccttgactatgtgccagacccgtgaagagacagaccatccttctgtgcctgtgaacacgtctcctccacagcgccctggctgcacccctgtctcctatggcagctgcactgaaaccttgcggatgccaaactttcatggagatttcatggcaacaatggggagaatggccctctccctctttgagtcctacagcagggcttcctgggcccagtgtattacagaacttcccattctacccacacagcctgctgctagcttgttgctgaacccagatatgaagccacggacttgggctggggacaaatccaaggagtcatacctgtgcccttcttgggacctcccaggtcagccctctatgcccaactccttcttaagttcttattctctccaggaaactcctcatcgctcctgtacgtcatgtctggtgggtccgtacgcccagttcagcagacctgctcaaaggcatgtctgatttccatgcgtattgagtcagtcctacccct

SEQ ID NO: 475398 - DNA, 1920 bp, Homo sapiens
gcactggcagcaggcagaggcagcacaggggagtcggttctgggctctagtgcaggctcatggaaggggtccttagggaaatgattgcatgggctttaatttataagctcatcatttcgttgctctatgatgatttcttcagctgtgactaccacatttttgcacaaatgaattcacggcaggaaataaagggagacaaaatgtttttcataaacctccaaccagatgtcctgttggtcagaatttggttacatggtaaggacatcatcaacatggatgaactcagggctctgttagatggaggtaataactattcagtgggcaacgaacagtgtctgtcacatgcctattctacaaatgatgaaacaggctccaagggtgccgtgataacaggtgaagacgtatgccttgaagctcattttactcacattcctgaatcttccgctggccaattacacacttcctgctgggctccgcctggttacctcggtatgaatgatactccacactcactgactgatggccccataacaattgcaaccaactggacaagggcttctggttgctgtttgggggatacccggacacagctccactgctctcagtgtagtcattaacacccagctgttaaagggaatggctccctgtttgcactgagccaattttatgacatccagtgaacatgagagaactgcaaccagaaccatttatagacttcatcttagggcctgcaatgatataaatgtctaatgctttttccaggtgtgggctgggggaagctgtgtgcataaaccttgggttgaaaaaggactgacgtaggagggttggggtcacaggaaacatggctggaaactctggctggggaacaggacaccttcctctagtcctatcatgatcctgggcggaccatctcttctctctgagctgttctgctcaccctccttgttttttcccccaaatgccctggaagaaaagaactaattcttactcatcttcatttccttattaatggttaaggattggcacataatgggtactcagaaagtatttgaatgaatgaatgaatgagtgaataaacgaagcgaatggatgcctctcttccttgagggaggagtaacatctgatttcctcattcctatctgaaacagaggaggagctcaactgcaagtctgttgggtgaagacatgaatgaataaaatgtttcaaacctggggttgcatttactgagttgacttagctgttgtactcaatggtccctctgcccagaaccttcttcccctgactcactcaggtctcagctcaaatctcgccttctcagagctgctgtacccgatcaccctatccaagatttaccatcccctgttccagtgcctcctgaagcttcatcacactccttgttcattttccttcctgacacttttcttaatatgcaattattgcatttgtttatagtctgtctccccccactatgaaataagctccttgaaagtaggagctgtgtccgtctcagtcactgcagtacccccattaaaatgtctggcacacagtaaaagttcaataaatatcttttgaatgagtgaataagtgaatatgacttccaaccttttctctggctgccagtgtccccctctccagagctggaggctccttcccatttattcaaatattccagggccctttacaatataaagcatcttaaaagtctttccggccttggctttagtaaccctacaccaccttggccccctacccctctgaccacattccccatccttctcctgcccccacagtcctgaatcttctgaattactggtcatgcttaattatggtacaaccatacaatagaataaacactgaaaatgatgttaaagaagcatgtctattgacatggaaagtcattcacaatatattgctaattaa

SEQ ID NO: 475399 - DNA, 526 bp, Homo sapiens
gaggtttgacaaagattttctgtaatggaccagacatttgctggaggtccactccagaccctgttcacctgggtatcaccagtggaggctacagaacagcaaagattgctgcctgctccttcttctggaagcttcatcccagaggggcacaagcctgatgccagctggagctctcctgtatcagttgtcgacccctgttgggaggtctctccagttaggaggcacgggggaggtattcctgaagaaagcgttattgtaggagatgacagctccatatgggctactggccctgaagaccttctagtgggacaagatgcggaggaagaagacaagactttgcacacattattcaactgtcatctggaactgatcattgctctgaataagactgactcgagatatgcaaaggactcctttaacattcagctaattttctagttcatgtcctaggtactggtcattttctatccatttttttccaggaatatgatgtaccttcttaatatacaaagttatatcttcctct

SEQ ID NO: 475400 - DNA, 978 bp, Homo sapiens
ttgaatcttcacaatgatcttgagggcaggagcccaaccttagggttccatggagactagagctgcacacaaggcaggtcctcaacagtaaattcagtaattccttgagtgagcaagtatgtcagtgagggagactggaggagtagccagaggcaggagaaaaccgggaaggggaggagaagctttgaagaaggagggagcggtaacctccaatgctgctgggaggccacggatgccggagcagacatgcggccccagttttggtggcgaggctgtcattggcagcctcctggagagaggaaaggaacgatgcggcggccgtggtggagagagggaaaggaagccggctggggcccagggagaggctgccagcgatgcggatcacccagtgcgggccagggactgggagcacagaggccagctgcccctcaggggctgtcaatgggagatgcaagagacatgtccagtgggcctgggggccctttcgttcatctacatgtcattgggaaagtcttatgcaaggtgcttgggattgatgattgacatgacagatgggaaacctgctctcatggagccctgtgcctgggatggcagaggagtgaagaccagatgcacggagcggcaggggccagagcagacagacagcctcattcatgtgggtgctgacgactcccttttcgcagtcgaggaaactgagggctcagaagagttaaaccacctgcccaagggcaagttggcaagagatgaagctcagccttccccgagggctccttacggctctcctgagcagcaagacctccagcccggagccttcctcgccagcctggctccccactcctgccactcctctgcagcacaggagagccgtggggaccctctcaatgccctctgaggtgggaactattattgtccgcccttcacaggtgaggtatagagaggtggcatcgcgtgtccaaggtcacatggatagtaaatggt

SEQ ID NO: 475401 - DNA, 528 bp, Homo sapiens
cctcactatccgccccaccagccctataatggtgcaggctgcagtggcagccgaggggtggcttgggggatggacatgtgggtcccctaaatctccatcagtctttcccccaagccatagtaaacaagaggcccttttctcacctctgagtagtgtgcagtcccaaaccccctcctgggtaggatcctgggtcctggagcagactgtggtcatgctgcacagggttcggcaagaaagagtgcctgagatggattcaccctgtcaaggtgccgagcgcggggacagcgtccattcctgcctgtggacaactctacttccaaaggaacagaagttgtccttgctctcagagggtctgactgtgatcctcctcctctgggacccggtatccacgcccatcaacgggaaatgctgatagtgaaaaatgcaaacacattgtaaacattccaaagaagatgcagacttgcaaaaggtaggagacatctttaaaatttctcttcctttgatattagtcttagtcttatatctttg

SEQ ID NO: 475402 - DNA, 1608 bp, Homo sapiens
caccatagccatccagggccggagaaacgcagacggcgtaccacacaggaaaagatcgcaattgttcagcagagctttgaaccggggatgacggtctccctcgttgcccggcaacatggtgtagcagccagccagttatttctctggcgtaagcaataccaggaaggaagtcttactgctgtcgccgccggagaacaggttgttcctgcctctgaacttgctgccgccatgaagcagattaaagaactccagcgcctgctcggcaagaaaacgatggaaaatgaactcctcaaagaagccgttgaatatggacgggcaaaaaagtggatagcgcacgcgcccttattgcccggggatggggagtaagcttagtcagccgttgtctccgggtgtcgcgtgcgcagttgcacgtcattctcagacgaaccgatgactggatggatggccgccgcagtcgtcacactgatgatacggatgtgcttctccgtatacaccatgttatcggagagctgccaacgtatggttatcgtcgggtatgggcgctgcttcgcagacaggcagaacttgatggtatgcctgcgatcaatgccaaacgtgtttaccggatcatgcgccagaatgcgctgttgcttgagcgaaaacctgctgtaccgccatcgaaacgggcacatacaggcagagtggccgtgaaagaaagcaatcagcgatggtgctctgacgggttcgagttctgctgtgataacggagagagactgcgtgtcacgttcgcgctggactgctgtgatcgtgaggcactgcactgggcggtcactaccggcggcttcaacagtgaaacagtacaggacgtcatgctgggagcggtggaacgccgcttcggcaacgatcttccgtcgtctccagtggagtggctgacggataatggttcatgctaccgggctaatgaaacacgccagttcgcccggatgttgggacttgaaccgaagaacacggcggtgcggagtccggagagtaacggaatagcagagagcttcgtgaaaacgataaagcgtgactacatcagtatcatgcccaaaccagacgggttaacggcagcaaagaaccttgcagaggcgttcgagcattataacgaatggcatccgcatagtgcgctgggttatcgctcgccacgggaatatctgcggcagcgggcttatgatagtgacaaggatgatgatgatagcactgaagcagtcagctaaaactttttgattgtttgccatatgtcaggaatatatgaggtgatatattcacacacatgaaaaggaaaatgttactgagtgaaaaatacttctatttttaactaatttaaaacattttagtgttcattgtttgaataatgaaaggcctgtgtatatctacatttttaataaaattatctgaaccaagagattaattcagattatagaataaatcaaacttttttaaaaaaatgtattattctgctaatttgcaaatatcacaaattcatgaatggctgttagagacagaaaaagtaacaggtcagctcccctatcagaggagactcatgcaaagcttatgttatatttttattactaagttgttgcattt

SEQ ID NO: 475403 - DNA, 690 bp, Homo sapiens
aggagcacctggcacccagaagtccctgtcccctgacagtgcagcttcagtttttatcactttttaaacgctgacagcaatatggtctatacctcgccctgctgttataagaagccatcaaggaagactagtctgggaaaccagagatgggtctacacaaaacttaggcagaaacccacctttggcaccctccagccacggctctttgttttctatagcatccctggggatgtgaagtatgatgattttattactgctgaaattgtcctcaggaaatggcatttggaatgtggaaggagagaaggaggaaaaggaggatgggtaagaaatgagaagaaaaaaggaggaggtgagaagtatcaaaaaatgggggagacagagattagcagtatccagtactgcgagcacaaatctcagaaggaattttgcatgaagaaaagcccccatctcctctctaaagggagtaatgagccctttgagtcttctcagatgtgttcagaaagtaccttgagtaaggcttggtgccagtgccgaggtgagaggctgagttgtgtatcaggaactaaaaaggatgaatctttaggttaaccctttgtataacagtctctggctttcctcagatgaaaacagagaaggtgaactccttctgcaacagtatttgccaaaatgttttctcagaacactagtgcc

SEQ ID NO: 475404 - DNA, 734 bp, Homo sapiens
tacaaggaatccaggatggttatcttggagacaagcctttatacaatccccattctacagatgaagggaccaaggttaatagacacactttcccaagatcatacagtcagcagcaagtggcagaattgggatgcaaatccaggtctatctgacttcaaaacatccttcagtgcatatcagtatttgctgagctttgcaaataattggcagctcaagagtgaattgaaggatcattcatataagcaattgcatgttcttgttttgttcaaaccaacaaactatacacacaactgcagaccgttgaggacagcaattgtgtctgaattactcaccattgtatcaacagcaccttgcaaagtgactgacccagaagaggtcaatccttcaacatggcctcttactgacaatactaacagtgggttttgtacacttaggggccatgatgaacaaaacaacatgagattaaatcaagatcaagagaaaattaagcaattaagagacatgtaaaataagacgttttttggtttttcttgttgttatgtcaaacaatattgcaatgaacatcctttatgtatattctttatgtatttgtgtgcatgcacctgaaagagaaattcctagcattggaattgttgagtcaaagggtatgtgcactacaaattttgatggaacactaataaggtctaccagtgtctgtttccaactttaagtttttataagatattaaatttgcc

SEQ ID NO: 475405 - DNA, 647 bp, Homo sapiens
ggttttcccattttagagccatggagcaggttgggagaggtttaataacccaagatgatgatcatgatgatggtggtggtggtggtgatggtaatggtgatgatggtggtggtgatggtggtgatggtgatgatgatgatggtagtggtggtagtggtggtggtggtggtgatgatggtgatggtggtggtgatggtggtggtggtgatggtgatggtggtggtggtggtgatgatgatagtggtggtgatggtgttgtgaaagaagattatccctattttaacactactggaggagatctttgggattctgtgggttttaaatccttattctgtgatagcagacccttggcagcagtggaagtggcaggatctgaaaaggatgattgggttaagtggtgcaaagactctttaaggataggcactgggaatctgtggagaagcccgatgctgctcagctgttcccaaaaggaaggctctcttaaatcaagaggcgtacggccattaggtgccaacaaaaaccagttaagccagaaactgtgaattttgttttgtttcaccaataatgtgccttttatttttatatagtgacctcacagccaaagttccaataaaaaagagataacatttatggagcatgcaacaatc

SEQ ID NO: 475406 - DNA, 683 bp, Homo sapiens
atctacaaagaaactgggacctacagggatgtgtagtggatatgtgatgctgttgctgccaaatgcccctttacccagctgccaaatgcccctttacccttctccaagttcagtgcagaggaagagtatggggaccatctccgagcccatctggaggaccaatgatgcccagcagtatcacgttctgggaacaacagaaatgacagtgatgagcatcttcagctttcatcaggaccctagccttccccatcgtccataccctttaagctccaaagaagtgaatgcttcaagcatgacagatttcacttactatcaactttcatatatggaggctgagaactttagtatgccaaaatcatggagcagatctgtacctgttgtgtttacatatgtatatcagtgtatgggcatgaaaactttctgggagaacatgcaagaaactgctgaaggtggttgcctcaagcaaggtggtcactttgcctcattcaattcagccttcctaatatgggcatctgctctattttaacgctattatctctcttttatctatttgttgatagatgcctttgtgtaccatttggttgtgcaaaaaaaaatttcccagttatttttgaaaaggtacgtctcatgtgtcagaaataaagtcactggcattaaatgttcttataaatatttattgagca

SEQ ID NO: 475407 - DNA, 1842 bp, Homo sapiens
catagagcctcagggagtcggttccttggggctggctgggcgtggagtgaaggctgggcctggcctcagttctgggacacaggaccccggctgcacagcaggtgagctggcgagcaagcattaccgcctgagctccgctcctgtcagatcagccgccgcattaggttctcataggagcatgaaccctattgcgaactgcgcatgcgaaggatctaggttgctcactccttatgagaatctaactaatgctaatgcctgatgatcagaggcggaacagtttcatcctgaaaccatctcccaccccacacaccctgtccgtggaaaaattgtcttccactgaaccaaaaccggtttctggtgccaaaaggtgcttcggtggaggggaaccagagcagcagaagaaggaaacagtggatgctgcattcatcatgaggttctgcaaagaacaagtgagagtgggcctgggacactgcagggacggctgtgagcgtggccgtgtggacatagactggtgggagggcagagagcctggggcggtgtcatttgacccagactcagcccagtcctccggcaccatctcggtctctggcagcatctgtcccctgctgcctgctccattccccattgccagggccaaggcccaggagacagccatgaatgacatgctccagggagaagatgacaaggcagtcatcagtttcaatgtaatgtgagaagtgtggtgtgagggtctgtccagggtgggtgaggtagagaggaggtccatcacactcccgtgctcattccacagtcctgagcatcatggaatctcggggtgggagggcacctctgagctccacttgtctacttccttctcctccaccagaaaggctctacttgattgtctccaatgatgggagactcattccttgatacacagggtatgtaccttgtccggggcacacagagaatgggttggccagaaaatggtagttaaagaatttgaacccaggctatccaactccagggaccacagccaggtgtccagctcaaggtgggcattcaccaaacatggactcagatgacccttttcagtgccttctctctgacctgccacctcctttcctggttcctgctggtctggactcccactggtgatctatcagagagggagggctggcaattcctgcctcctcccagcttcccttggctgccagagaagcaggtggcttcccctcatctcccattcaaagggtgtcgagctggtggaaggcagatgaatgagctcctcagccagggaagattctgttgctaaaatacacggtctgattaggagtgattgaagggctagagacagcgactgcagttggctgtgatttgttccgatctgaagtagttctaaacaagtcaccgggaggcaggagtgggggccacagagttcagtagcacagggcttggcagggatacatttcctgtggatgctggggccctttccagcaattccggacagagttttcaaacagcttttgaaatcggattcggtgcatttattttgtcttgtttccacttggcatgaaagcttcccctttgtgtctttctctctctctcttttctttctttctttcatatatatatatatatatatatttatctctctctccagcatcagaagtgagctgtaaatcaagtggaggtggcttgggaaaccgaaaccagcctggtatggaataatgatgttatctgtggctctagatcagccatgacactgcctcccgtgttgtctgacaaggagaatctgcctgagggaattcatcctgtcaggattgaaggcagtaattggggccagtgattcatgaccccttt

SEQ ID NO: 475408 - DNA, 576 bp, Homo sapiens
cagcccacatagatgagaaggaaccagcacaagaactctggcaattcaaaaagtcagagtggtttcttacctccaaatgaccacactagttccccagcaagtgtccttaccaaggctgaaatggctaaaatgacagacatagagttcaaaatatggacaggaatgaatgttactgagattcaggagaaagtcaaaacccaatccaaggattctaaggattacagtaaaatgatacaggagctgaaagacaaaatggccattataagaaagaatgaaaatgatctgatagagctgaaaaacacactacaagaatttcataatgcaattgcaattataaacagcagaatacaccaagctgtagaaagaatctcagagcttgaagactgggatgccaagttggataaagaagcaaagcctactggtatgctatcttcaagagacccatctcacattcaatgagacccataggctcaaagtaaagagatgaaaaaaaatctaccaagcaaacagaaaacagaaaaaaaaagcatggtttgctattttaatttccgacaaaacagactttaaaccaacaac

SEQ ID NO: 475409 - DNA, 583 bp, Homo sapiens
acttcgcacatgctaaagcctctgcctggaatgctcttctttccagggagcctatggctagcaaatctgaatctgcagagctttattcacttggatttcacaattgaacttgtgattgctggacctggctttgcccactggggagaaggccttactaaatgtacagataagtctaggcttggacaaaatgcagatggatttttacctaatatgcttaaattatcaaagtctaagtttaatcaaaaccttgctcttcctttcaactggaaagatggccactcattggttttacgaaagctgcccataaatgatcatttagcctggtttatcttcttggatagcgaagccaaaattgagttttatcaattctatgcaattgtaaaaacagctaaagagtatagttccttgaagtcagatcatgctgactttaaatcctggccctgccatttactggctgtgtgagtttagtacccagtctcaggtatcctttgtagtaatgcaagaatggactagtacagtacttttgtcacaaaaaagaagaaggaggaggaggaggtgcaggaggaggaggaggatggtgact

SEQ ID NO: 475410 - DNA, 759 bp, Homo sapiens
gacctggctcggaagaactgagaagacctggacaagtgtcggtctcagcagattgaggagaacaccacagtggtcaccatgcagtccgccaaggttggagctactgagatgacgctcatggagctgagatgtacagtccagtccttggagattgacctggactccataagaaatctgaaggccagcttggagaacagcctgagggaggtgaaggcccgctacaccctgcagatggagaaggtcaatgggattttgctgcacctggagttagagctggcacagacccaggcagagggacagtgccagggccaggagtaccaggccctgctgaatgtcaaggtcaagctggaggctgagatcactacctaccgccgcctgctggaaaatggtgaggacttcaatcttggtgatgccctggacagcagcaaatccatggaaaccatccaaataccactacccgctggatagtggatagcaaagtggtgtctgagaccaacgacaccaaagttctgagacattaagccagcagaagcagggtaccctttggggagcaggaggccaataaaaagttcagaggtcaaaaaagtatactatgatgttagatatatgtcattgttcatttgtccaaagactgtccttagaatgtgcaacaccaagagtgaactgtaatgtgaactatggattttgggtgataatgatgtgtcaattctccatgcgacaaaaggatggctgtgtctttctcttccactgtaaaatggg

SEQ ID NO: 475411 - DNA, 1219 bp, Homo sapiens
gcagccatcaacaatttgtttgccactgaaatattaaggatgaagttcttttgttggttttggggtttctggagttggctgcttaatattattagacccgaaaatgctaaggactctaattctaatagtatggagaatattgatgatctttggcatgaactatttaaagagttatacaaaataaatgcatttgacactcctgattcacctctcatgagagacaaggagtttagtgactctatatatgataccgttgaccatatgtggagaaccaaggaatataatgaagctggttggttgctcctaagttcagtggacaaagtgatgaaagaaaatgatgaactcagggattctgtctcctggcttcagaagcagatactgaacctcaaatctgccaagattgccatgagtcaccatcttatctcctgtagagaaagagctaaaattgtggaaattcagacacaagctcttatcatgagagtggttgacctgcaatgaaaggttcagtcacagccttaccaggtgtctactgttaaagattctctcttgtcctgaacctttgagaacatgattattatataccttgggattgtcttgtttgggtatctgtttggtgttctctgactttgctgtacctgaattttttatctttctcaagttgaaaatttttttgttattatttatttaaataaactttctaccccatctcttaatcaattccctcttgaccatcaataattcttagatttaattctttgaggtaattttctgtatcttgcaggaggtcttcattcatttttactttttttctctctctcttctgactgtgtgtttccaagtagcctgtgttcaattttactgattcttttctctgcttgattcctttgctgatgaaagcctctagtgaatttttcagcacagcaaatgtgtttctcagttccgaggatttctgtttgattttttacattattttaatatctttgttgagtttctctgataaatttctgaactgcttttttgtgttattttggaggtcactgaatttccttaaaactactactttgaattcatggtcagagagctcacatatagccatatcaacagggtcagttactggttttttgctttgcccatttggagagattatggtttcctgtttgctgttgtttcttgtgcatgtatgtctatgtctttgtattaaagaatttattctagtctt

SEQ ID NO: 475412 - DNA, 1249 bp, Homo sapiens
tgtagacagactgggtgcagatggctggtgtagacagacggtgcagatggctggtgtagacagactgggtgcagatggctggtgtagacagactgggtgcagatggctgggtgtagacagactgggtgcagatggctggtgtagacagactgggtgcagatggctggtgtagacagactgggtgcagatggctgggtgtagacagactgggtgcagatggctggtgtagactgagtgcagatggctggtgtagacagactgggtgcagatggctgggtgtagacagactgggtgcagatggctggtgtagacagactgggtgcagatggctggtgtagacagaccgacctgcacaccaagccctgtttgggacgaggcttcctagacaggttttgattcaatggtggtttctgactgcacagacaggaaaccagagatgggcacggtgtcggcatttcagctcctgcagaatacgtctctcccggggatggcccagtgtcggcatttcatctcctgcagaacaggcctcttccggagatggcccagtgtcgacatttcagctcgtgcagaacaggccattcgagatgcctctcctagatcatgttcctcttccttcctgcccatttctcctgtgtcaattgagcatttgccccaaatcctaaagcacagccatcctggtgcaggggatgaaacttaccctaaatctaggcttggttgtgcctcagtgacagggccacgggtctgcctaatgcacctgcccctctgctgtgtgacagcacaaggagaaccaccaggagctcgccctgcaccatggattcgcctgcacattttgtctttctcagttaactcacatcatgccagacacaggacaagggacttccgtgtggatccttcagatctggaatctcttgatgcctgtatccagaggacgctctctgccttgtacccaccgtttgaagccacggcagccacggtgctctggcagctgttcagcgtggccgagaggtgccacggtggggacgggctgcactgcctcaccagcttcctcctcccagccaagagggccctgcagcacctgcagcaggaagcctgttacgtgaaaaatgcattatctgcagagctcaatcagctggaacacagtaaaacaagatatgtctgtacatacagataagtcccacttaatgaatttattgtatgtttagtctgtttcttgggatatttatgctgtagttgttcttgaggccggggt

SEQ ID NO: 475413 - DNA, 959 bp, Homo sapiens
gctgatgccatctgtgggaacgagggacccaccaggcgtcacttcaggtcccctctcacagggcgcatcaggagatgacagtgccccaaccacagataccagggcacactcagcaaagcctgtggtcacgtggtgtcaacagcagccgcctagagcgatgtcactctgtggtaggagacgccgtgccgggcaccagggcttttcccagcactcccctgctcagtggccccgtggtctggccacagcctggcaggcaaacaccgctgctggccattgtgtgggcacaggaaatgaggctcagagccatcaaggtcgctgctgggacagcagagctgtgtctccaccctgcactgcgttcccaacagggcagtggcctggacaccccttggcagccatgtccactgcacggtgttccctctccctgcacacagccatgtccccctgcgtcctccaccagggccagcccaggcgtgctgacgagctgcaccttcacgtggatgctgggggagaggccatcccaaggaggcatccagtgtgcagacacagccacggtgcagaaaacaagctcactgcaatgggcccggcagtcacgtggtccttgcagttcacagggagactggccttgggctcaggggcaggagattgaacttagaggcggactagaggagttttttttgcagaatcaccagcaaggcagcagcaatttcagctgtgggaaaaaattcaaaagcccagctcttatggaaattggataaaactgtgcagcctcagggcctgtgcagacgtgaattctaatgacttgtcagggactagtgtgggcgagcggggtgatcctgggggtcctcgccgtgcaatgggagaaatcttaattctacaaccagcatctgattttccatgagggaccccagctcctccccagacaaaaaaaacagctccgttgctcccctcctggccttgag

SEQ ID NO: 475414 - DNA, 727 bp, Homo sapiens
cagcccgcgcagctgcggtcttcatgtggtcgctgcacgcaagggtttgccgttatctgttgcttctgaaggcaaggatgaacgccgtgggtgtgggggccatgtggacggtggtgggtgaggccgggggtccccacagcgagggcttgtgggtcttggtgctgcttccatgtggaggggaactgaggtctaagcaacgccttggcgggaacacccagtccctccagaaccgccgaagctcccccggcgcctgctcccggcctgcgggctcccagcgccacatcctcccccaggcacggctgttgccaggcatctgcacggccctagtcctgaaccaaaccgcaacggcagagctgagcacgtacctgcgtctgtttgatgaggaagccagggtgcagaatggagccggatgtgcaaggtgcttcgtaaacggtgccttccgggcgggctcagcggtgaacacggacaggcccgccttcctggagctcacgctagcaaagtcaggaagaaaaccgcgtggccaccttagcaaatgcagaacagcatctgggaacattcaacagccagtcatgaaaaggttctcagcaggctaagcatagaaaggcatttccttaactggacaaagggtcttcaaaaaaccttcagcaaatacagtacggcactaaatggcgagacagagaaactgtccccgtcagaccagaacacagtagacaggccttctaacaac

SEQ ID NO: 475415 - DNA, 505 bp, Homo sapiens
agttggttccggtcctcaggcccatgcctggggacctgggggctggccctgccttagagccccccagcacccccttctcctgcccctcctcagggcacacccatctccttctcaagggcagccgctctggactccttctggaactgcctggacatccccaggccactctggcagggccttccttaaggaccatgacctcagcagctgtgtccctgaggtctgaggacgtgacctcatccctgaccagtgaccacagggcacagtgggaaaggggagatgtcctagagcctctggagtatcacacagaaaccctcgccctggtcctggagtgttggtttggagtccccctctgccagcacgtggacacgaagtctctgagtgtcaaccatcctgaaagtgcatggggcctcaccagtgaggtttgggacatcaaccaaggagcagaggacccctgaccccatggtgaaatgccaccaagagcaggcgagttgggcagaggtggcgt

SEQ ID NO: 475416 - DNA, 1708 bp, Homo sapiens
tagcaacagctccagtctacagctcccagcatgagtgacacagaagacaggtgatttctgcatttccatctgaaatactgggttcatctcactagggagtgccagacagtgggtgcagatcagtgggtgcatgcaccaagtgtgagtcaaagcagtgcaaggcattgcctcacacaggaagtgcaaggggtcagggagttctctttcctagtcaaagaaaggggtgacagatggcacctggaaaattgggtcatgcccacctgaatactgcacttttgccacgggcttaaaaaatggcacaccaggagattatatcctacacctggctcagagggtcctgtgcccatggagtctcacagattgctagcacagcagtctgagatctaactgcaaggtggcaacgaggctgggggaggggcacccaccattgcccaggcttgcttaggtaaacaaagcagctgggaagctcgaactaggtgaagcccaccacagctcaaggagtcctgcctgcctctgtaggctccacttctgggtgcatggcacagaaaaacaaaaagacagtagtaacctctgcagacttaaatgccccagtctgacagctttgaagagagcagtgtttctcccagcacagacctggagatctgagaacgagcagactgcctcctcaaagtgggtccgtgacccctgaaaaccaagcagcctaattgggaggcaaccccctgtaggggcagactgacacctcacacggccgggtactcctctgagacaaaacttccagaggaacaatcagatggcagcattcgtggttcaagaaaaaccactgttctgcagacaccgctgctgatacccaggcaaacagggtctggagtggacgtctagcaaactccaacagacctgcagctgagggtccagtctgttagaatgaaaactaacaaacacaaaggacatccacacaaaaaatccctctgtacataaccatcatcaaagaccaaaagaagataaaaccacgaagatggggaaaaaacagagcagaacaactggaaactctaaaaagtggagtgcctctcctcctaaaaaggagcacagatcctcaccagcaaaagaacaaagctggatggagaatgactttgatgagttgagagaagaaggcttcagacaatcaaactactccgagctgcaggaggaaattcaaaccaaaggcaaagaagttgaaaactttgaaaaacatgagacgaatagaagaccaaatctacgtctgattggtgtacctgaaagtgatgggcagaatggaaccgagctggaaaacactctgcaggatattatccaggagaacttccccaatctagcaaggcaggacaacattcagattcaggaaatacagagaatgccacaaagatgctcctcgagaagagcaactccaagaaacgtaattgtcagatttaccaaagttgaaaagaaggaaaaaatgttaaggcagccagagagaaagatcaggttacccacaaagggaagcccatcagactaacagcagatctcttggcagaaactctacaagccagaagagagtggaggctaatattcaacattcttaaagaaaagaattttcaagccagaatttcatatccagccaaagtaagcttcataagtgaaggagaaataaaatactttacagacaagcaaatgctgagagattttgtcaccaccagga

SEQ ID NO: 475417 - DNA, 1470 bp, Homo sapiens
tttgtggttcagagaggacagaaaatgaagcaggccaatcacctgaggcaatcactggaaggtgaactgccccagaggacgaaggttccctgggtcagaagcccccaaccagatgatccaacaacaggactgatggtgcctgggcaagcgccagctcatgtcatcaacctcactgagccccgggtatgtttaattattgagggccaggaaattgacttcctcctggacactggtgcggccttctcagtgttaatctcctgtcctggacgactgtcctcaaggtccattaccatccgaggaatcctgggacagcctgtaaccaggcctgaagctcataaaggattacagaatatagttaaacatttgaaagctcaaggcttattaagggaatgcagcagtccctgcaacaccccaattctaggagtacaaaaactgaatggtcagtggagactagtgcaggatcttagacgcactaatgaggcagtaattccactatatccagttgtacccaacccttataccctgctctctcaaataccagaggaagcagaatggttcatggttctggacctcaaggatgccttcttctgtattcccctgcactctgattcccagtttctctttgcttttgaggatcccacagaacacacatcccaacttatgtggacggtcttgccccaagggtttagggatagccctcatctgtttggtcaggcacaggcccaagatctaggccacttctcaagtccacgcactctgatccttcaatatgtggataatttacttttggctaccagtttggaagcctcgtgccagcaggctattctaaatctcttgaactttctagctaatcaagggtacaaggtgtctaggtcaaaggcccagctttgcctacagcaggaaacccagagggcaaatactcatctagtcaaatgcgaaccagaggcagaaacagccttcaaaaccttaaagcaggccctagtacaagctccagctttaagccttcccacaggacagaacttctctgtatacatcacagagagagctgggatagctcttggagtccttactcagactcaggggactaccccacaaccagtggcatacataagtaaggaaactgatgtagtagcaaaaggctggcatcactgtttaagggtagttgcagcagtggccatcttagtgtcagagtctatcaaaataatacaaggaaaggatctcactgtctggactactcatgatgtaaatgacatagtaggtgccaaaggaattttatggctatcagacaaccacctacttagataccaggcactactccttgaggatggtgcttcaaatatgaacgtgcatggccctcaaccctgccacttttctcccagaggatggggaactcatcgagcatgactgccaacaaattgtagtccagacttatgccacccaagatgatctcttagaagttccattaactaa

SEQ ID NO: 475418 - DNA, 2354 bp, Homo sapiens
ttctgctaagggggagatagttggattgggtgatggactgtagaaggacaggtcccaggtgcagggacttcaattgacaagtctacatgtggtctccagtcatccggtgtctccacaagtcaacgctggcgaaaatcaaatctatccacatctgcgaacatgtcactcattgggaaccccttttctcccatggggggccctctgtggaatgcactccagaggagtacagcccgaagataacctgttacccatctagaaagagaagtgagaaaaaggtatcccttttgccttcttccttttggtatgacccagagttgggaggaagacagtgtgggtgtcccccagctgtttcccctccgtggttcctgggtcctggcaccttgttgaatgtgccacccatggttgcagaggggacttccgagcagaaggaaagagaaagaaaaacagctctctctattgagagaagacttccgagcagaaaaaaccagctggcggtggacacaccagtttttatatcccggcttgaggaggcagtgtctgatttacacagcgttcacagattggttagatcagaattgactaacatgatcacaagttggagttccaaaataggccatctgcaagttgaggagcaaggaagccagtggtggatcagttcaagtccagaaacctcaacagttgggaagctgacagtgcagcctttggtctgtggccaaaggcccaagaaatggtaaatcactggttcctataagaaatctatgtcctctaaattaactgcatgagtcaggatgaaagaaaaaagagggagtagaagccctgtcaaggaagtttcaaaattaaagttattctttatagaaaattatgttttctctcctagataatacaatcaagtggaaatttctattatgaccataaaaaaaatctgctatccaaagcctctaaagtcagccatagaaggggttttctagtatgtcctacaagtacttggatgaaattaaataacttgtacgagagaaaatacttagtattaatatttctctgtccatgcagaatattgatataaaatatgcagacacaatacatttgacttactcaatctgttatgcataatggatgctccctatatgtcctcctcatttgctcaatcggaatatctcaagtttttttatgaagtaaatatatctgactatactatttgatgactatacaagcagtattatgtgggcaatttcatctctgtgtaaaagttagatgcttccttaaaatagaaggttgtaacattttccatagacttggatacatagaaattaaatgcttgctccaagttttctgtacatttgtagatttccttccagtccattgctatttcttaatcagaaggccatggtaacatactgaccaatttggcatagcctatcaggaaaacaacaccatcaaaacatggtaatttagtgggtattgcctctgattaaattttttactatgtaagcaaactgcgatatattaagttaaaaaaagagaatactattataaatacatgccatggggattgatggaataagatttaattgggtttagaatgttaactgagttttaaaataggcaaaataattctctcaatatttattaggaaatcttacgtattcaaagaaattatgtgggatgggacatattaaataaagattaataattttgaagctctgtgcatttgcaaaatgaattcagtttataatataatcaaagaaaatacaactaataggagtaatgtttaaatgtgctttcatcacagggaaattttgggacaaaaagggtgaaagttccaagtcacggtgtctttttttgtttcaaaggtagatttcctccttcatgaaaagagcctgtttcatattttatgcccacagactagagaaagtatgcttgtggtaaagccatggcagtggaaagtagtttatgttctgcacttatatgggaataacaaatcaaaaccagacatatgtttgctttcaaaagtaaggttttgttatagatttacttaatgtttgaaatactgaagtgctattagcctggggtttggataggaatagagaaaagttaacaggttacatttttgccaaagtattgatttacattccactgaaagcctcttgttgttttatatttattttatattcatggaaacagaaatatgtgttcagtataaatatcaagttataggacaaatgatgaatatatggtattgagaagctgaacttgcaagaaaatttgaatttagttcagttgtaaaaccaagatacttctaaaatatgttctgtaggttcattataggcataattcaaattttcaataactagctt

SEQ ID NO: 475419 - DNA, 765 bp, Homo sapiens
ctaaaaccagacaagccctacagcctagccctcatgtctgcgtgcagcggctgccgctgctttaatacttttagaggccctcaaaatcacaaactatactcaactcactctctacagttctcataacttccaaaatctattttcttcctcacacctgacgcatatgctttctgcttcccggctccttcagctgtactcactctttgttgagtctcccacaatcaccgttgttcctggcccagacttcaatccggcctcccacattattctggataccacacctgaccctcatgactgcatctctctgatccacctgatgttcatcccatttccccacatttccttcttccctgtttctcaccctgatcacacttggtttattgatggcagttccaccaggcctaatcgccactcaccagcaaaggcaggctatgctatagtatcttccacatcattcattgaggctaccgctctgcccccctccactacctctcagcaagccgaactagttgccttaactcaagccctcactcttgcaaaaggactatgcattgatatctatactgattctaaatatgtctttcatattctgcaccaccatgcggtcatatgggctgaaagaggttttctcactacacaagggtcctccatcattaatgtctctttaataaaaactctactcaaggccgctttacttccaaaggaagctggggtcattcactgcaaggggcatcaaaaggcgtaagatcccattgctctaggcaa

SEQ ID NO: 475420 - DNA, 663 bp, Homo sapiens
tatctgcttaggcgtttgtctgcctcctgctgctatcacatagataaatgccctgatgtactcctgttaccctcgtacttttgccttgggtggctgcttttgcatccacgtcagcttcaggtttcctctagggcctacctacacagactttccttgttgggcacccaacattctaacagaaggcattttggaaagatcccatttaataaatacctgcattctcactgggttttgcacaactcatctctggaggtattgcactttcctccaccattgccaggttaatctcttgctccctaatgcatcagtagctccctctacactgtggcctcgggctgttccatcctttggatacttcatacatgcacagataaccctaccaacatttttccacaattcctggggcaccagccaagctttcagaattgtcttcttgaagggagtgcacacaagaattgacattagaagtgaacacctcaacctgtcccttaaagaggaatgactacatcactctggatcctgtgttgagagtaagcaataggaggaaaagagaaggtgaagggaactagttagaaagtgtctcagaaaactgccttttagctttccagaagcaccttccacccttttcaccctttctctgccctaggaagcaaacctgtatgc

SEQ ID NO: 475421 - DNA, 756 bp, Homo sapiens
aagtccagtgcatccagcaatacttgcagggaggtgtggagggagaggcgccagcgagaaccaaggctgcgcacggcgcttgcgggccagctggagttccgggtgggcgtgggcttggcaggcccccactcggagcagctggccagccctgccagcctgggccatgaggggcttagcacccaggccagcagctgcggagggtgtactgggtcccccagcagtgccagcccagcagcgctgcgctcgatttctcgcggggccttagctgccttcccacagggcagggctcgggacctgcagcccgccatgcctgagcctcccaccccctccgtgggctcctgtgctaccaggagcctccccgatgagcgcccccacccgctccacggcgcccagtcccatcaccacccaagggctgaagagtgtgggtgcacggcgcgggactggcaggcagctccacctgcagccccagtgcgagatccactgggtgaagccagctgggctcctgagtctagtgggaacttggagaacctttatctcagggattgtaaacacaccaatcagtgccctgtcaaaacagaccactcggctctaccaatcagcaggatgtgggtggggccagataagagagtaaaagcaggctgcccaatccagcagtggcaagctgctcgggtccccttccacactgtggaagctttgttcttttgctctttgcaataaatcctgctgctgctcactctttgggtccacactgccttt

SEQ ID NO: 475422 - DNA, 617 bp, Homo sapiens
gtattgtttacttgaaatttgatgagagcagattttctttacctccatcccccacaggcaaaatgctgccagaccaacaaactctattttatagagggcagggacatcaagctgggccacaacctaagtggactaacaactcgggtggaccaacaactccaaagaatattcaacttctgctctggaaggactccacagggtgagcacaccttacccaccctccagacgcttctgctcaggctccagctggtgacccaggatagcagcagtctctgggaaggagaggggagggagagaccaagaatatgtccagaggaagtggagggagatggaactgctagtgagcagaggttccaaatacctgaaaatttacaggaatacaaaaatattcattacttaacaaggtgaaatttataatatctgtcatataattttaaaaaactgtaagataatggttattcttacagatgtgaggtgatatctctttgtgattttgatttgcatttcctgatgattagtgatgttgagaattttcccatgtactattggctatttgtatttcttctttgtaaaactgtctatccaagtctttggcccctcccctatatttgtttttc

SEQ ID NO: 475423 - DNA, 659 bp, Homo sapiens
agcagaataaatgctatgtgatgcagaccttgttggagaggcacagctgtggtttactgaatgtcattgcactgctatgctggcagaccttactagaatctgtcctctagaacttgttagaaatctatttatgacggtgctagagaaagatgttcgctatgaagtgcttcttcaaaaggccattaacaacaaaaccctcgtgggacaggtgactagggaagctgctgactggcccctgggtgtagctgaatcccatacacagcaggagtcaggtgtgttggaatcttctgtgctgtggaaaagcagtcggagcagcggcaccttttctccaactcaaacattcttttccaggccctctgtggagcagtctgctccagaaagagaaaacagattcagactaaagcacgtgcctgacaatgtgtctgctgcattgcatgaggcagccttgctgcagccaaccatagtgggtctgatagcttcatagaaactctcatagctcttgtctcctttgtagtggggggattgtgataaatttccatatcccatcttagagtagaagctttctgagggcaatgaatgtgtctttttagctcactgttgtatcctccagtatctttcaatatttagacaaaaaaaaaaatgcttattttggaaatatg

SEQ ID NO: 475424 - DNA, 665 bp, Homo sapiens
agcagtctttttctcatccgaagccttcaaccttgaaaaagtactcatctctatgcaaagcaattaggaaaaaaagtgtgccttgcacaagtaacgaggagctgaatgttcatcaccaagacaatggggaaaatgtctccagggcatgtcagagaccttcctggcacccattttcatcacaggcctggaggcctaggagggaaaaatggtttcatggggtgggcccagggcacccctgctctgtgcagcctcaggacatggtgccccgtgtctcagctgcttcagctacagccatggataaaaggcgccaagaatggtagatccaccaatagcttgcaccatgtgcctggacaagccacaggcactcaacgtcagaccgtgaaaacagccaggagcacggctgtaccctgcaaagccactggggtgaagctgcccaaggctgtgagaacccatctcttgaatcagtgtgacctggatgtgagacatggagtcaaaggagatcattttggatctttaagttttaatgactgccctattggattttggacttacctggggcctgtagcccctttgtttcggacaatttctccatttgtaatgggtgtatttgcccaatgcctgcactcccattatgactaggaagtaactaacttgctttctatttt

SEQ ID NO: 475425 - DNA, 807 bp, Homo sapiens
attccaaccctaatggatgactttgagtggttcaagacttcagtggaggaagtaactgcagatgtggtggtagtagcaaggggcaggcatgaagctgaattccaggtgactgctgaagataaagcaggttttcaacaactgtttcagggactatttggtgagtttttcatcatcattttcagctgcaagagggtcctgaccaagaagagatcactattggtaccacctatgtcagttcagatcctccgagaagcagacatcaagacagtattatatgtgcaagagatttattgggtaggccctaaatccaatgatgagcgacatagcagacagacaaaagaggaagaggcaacacgtcaaccctggtgcctaacaaattatgacccttctcaggtcaatcttccctatccacagccattgttgaagaatccaacctgtgcagatgatgaagttctagcccccttgatttagctgattgaccctaggaaggtactggtagcataagcaaagcctggtgtggaaagtctttgctccctcattattttcttaatttaaaacatctttaatcttgttacctccaaacctttcatccctgcaacctgtaaagtaaacaggttgccaaaattttcactattaccaacattatggattcaaaattaacaaccattgtgtctgcataattatgtactctaattttaagccactatttatttagcattgccacctttgtgcctactgaaatcctctctttaaattcgctgacaaaatcctatttgccaaattcaacaatttttttctctgtttata

SEQ ID NO: 475426 - DNA, 1739 bp, Homo sapiens
tttgacaaagcctaaccatattgccaaggcatctataccacgtgtgtctgctcaaagagagagcttacttaattagtggtttgccaccattagtgagattcaggaagcacggatgggcagtgaaaactgaagacccacaactccccaaaatgatgaggaaaagaagaaaaggctgtaaaaaatgggaaatcttgaataccacagtatcatgccaagaaaatataaaagttcttgaaaaggaagtcaaaggagacaccttggagcctgtgtttcatcagactgggacattagggaaatctaaggaaaatggagatgagggtatgtctgcttctgtgaatgaaaagcagaattcttcttttcttcctaaagataagaaacagcatccatgtgacagcaaaatacataggaagaagggaaatgatgatcctcctttggctgtctctcatcaactggagaaagtcttacctatgatcacatttaatgactatggagaatcattatcagaaaacattacattacagaatctcctaggcacagtagaagactttaagccagcaaaaggcaaatttattacagaagtgaaacgtggggatttcaatgtgcaaatagaaatcaagaaaaactttgtctgtaaaccaggaatacagagctgctttcctaaacataagaatatattggtggaagaactaaaacctgaggtgctgtctaaacatgaaggagaaattgccagaaccgacagacccttgctgaaagattctaaggatgtggaaaaagagagaaaaatcaactttgatatcccaggaaatatcacatcagactcacatgtacagcaaagcacagaaggaataaattatttgccaagtaccattactgacatctttccactcaagatggcaaaaacttcacctttagttcttcatcttctctctctggaaaatgttgaaaaagacaaatgccagataatacccgtggtgaataatgcataccacagagattttgaagacctgtcaaatgagaatcgtgacaaagtctgttttcaaatgcatttttcagcaaacactgctgagtccaactgtgcagtgtgtgcttcagataatctgtttcttattgaaaaaacactgaccaatgatgtggacctacatggtaaccaagataaagaaaaccttggactaactagttttaaacaggagccagcacagtgccaaaggattgcatcaacagggccaaatactgaagaggatgagaacaaaaatgactcaaaggaaaattactgttaccaaatacacacgttgatgccacctcagaagcaagctttgaaagttggaaagaaaggcccttcagagaaagagccttttaaaaagaggacaaatagcagggtactccatttgggaccctccctcaatgagactgttgttgtctgtctactcacagacagtgccgccaagaaagccgggctccagattggagatgcggtactggctgtcaatggcactgaggtcaccagtgtcgagcttgcagaagctgtgaaccttgcaatgaaaggtaggtgggccagttacagaatccagagttcatctgaaggagcagaaagctgccatacagagttccaatgtgggaggggacacctacaggtttttgagagttaacagcctcaggattttaatgtaaaaaaaaaaaagagagagagagaaatgaagaaatcacagatctaaagcttctacagattttcccaggccctt

SEQ ID NO: 475427 - DNA, 814 bp, Homo sapiens
tgttatgattcactcaacgatctgcatctgagcccaagtgccctgggcccccgataggacctgtttataagtataaaaccactattcccgacagctgtttagaagccagcaagtccccatgcatcgggatcatccactgaactattccaaatgcatgcctctaggtacagacatcttgaccctggtggtaggatctgatatcagccgctgtcccagtaccccttggcccacctgccacggctacctatataagaggactcactccgggatcgtgaagggttggagaaagaggtggtttgtgctgaagtatgatggatgcctctactattacaaacataacaaggctgggaattcagatctcatgggagagctgtccttgaatccactggatggcagggcagcagattttccaggccaggaaaaagtcaatgtggctaaagccagagtacaagggggacgccagagaaggaaaaagattaggctaaagaggaattctgatcatcgcagcatatttactctgctatgctgggtgaggagtccaggggatggcatggcacacaatagtgacaggagacttcattttgaacaaagaataaaatttggagcatgaaataagattaaatattttatgcatgtatcctgaatgtcttttgtagctaaggcctgttaatctttatttccttttatcaaagaaaaatgagcgatattcccttccaaaattgccaagaggctaacaattcacttttaaaagctgtaaagctctaaaagtaaatggagatagggtggagaagtggaatagagtgtgagctttgaa

SEQ ID NO: 475428 - DNA, 2430 bp, Homo sapiens
gcagctcctctcaggactcatggcccggagctttgatactctgacccatggatcccctgggtgcagccaagccacaatggccatggcgccgctgtctggccgcactgctatttcagctgctggtggctgtgtgtttcttctcctacctgcgtgtgtcccgagacgatgccactggatcccctagggctcccagtggagatggtgcccggcacagcgactgccacatcactgccgaccgcaaggtgtacccacaggcagacatggtcatcgtgcaccactgggatatcatgtccaaccctaagtcacgcctcccaccttccccgaggccgcaggggcagcgctggatctggttcaacttggagccaccccctaactgccagcacctggaagccctggacagatacttcaatctcaccatgtcctaccgcagcgactccgacatcttcacgccctacggctggctggagccgtggtccggccagcctgcccacccaccgctcaacctctcggccaagaccgagctggtggcctgggcggtgtccaactggaagccggactcagccagggtgcgctactaccagagcctgcaggctcatctcaaggtggacgtgtacggacgctcccacaagcccctgcccaaggggaccatgatggagacgctgtcccggtacaagttctacctggccttcgagaactccttgcaccccgactacatcaccgagaagctgtggaggaacgccctggaggcctgggccgtgcccgtggtgctgggccccagcagaagcaactacgagaggttcctgccacccgacgccttcatccacgtggacgacttccagagccccaaggacctggcccggtacctgcaggagctggacaaggaccacgcccgctacctgagctactttcgctggcgggagacgctgcggcctcgctccttcagctgggcactggatttctgcaaggcctgctggaaactgcagcaggaatccaggtaccagacggtgcgcagcatagcggcttggttcacctgagaggccggcatggtgcctgggctgccgggaacctcatctgcctggggcctcacctgctggagtcctttgtggccaaccctctctcttacctgggacctcacacgctgggcttcacggctgccaggagcctctcccctccagaagacttgcctgctagggacctcgcctgctggggacctcgcctgttggggacctcacctgctggggacctcacctgctggggaccttggctgctggaggctgcacctactgaggatgtcggcggtcggggactttacctgctgggacctgctcccagagaccttgccacactgaatctcacctgctggggacctcaccctggagggccctgggccctggggaactggcttacttggggccccacccgggagtgatggttctggctgatttgtttgtgatgttgttagccgcctgaagtttgcatagctccctggacttctgctttgcactgccctgcaggagtgggtggggaaaggaagtggctttgaggcacacagaggggcttgttgaggccaccggaggaagcttctgccaccaatatgggacctgtgcccagcctaccagaagagagcatctgaaaacatgtatcgacatgtggtgaagacccagcctgctgagactcctcctgcagttcctcaacatgcctgcatttctgctgcctcagggcctttgcgaaggttgttccttgtaactggaatgcccttccatcccttttttattcaaaaggctgcaattttaattgaagaaagttcccttccaaggttcatgagttgcctgacttgcccaccggtttcctgcaagatcccttggcctggcacttagtgctcaggaaatatttggtgatgggccaactgagtgagaagaatccagctgttactccgtccgcggcctctcagctctagggccctctgcacactggcccccccagagctctgcggtagaatcccgtgccccccgaccccatcagcagcctacaccccttcatccttcctggccccggattttctctgcctctgccactcccggtggtaaaagagggcttagaatgcggtttgctttctggctttgtttttttgcatcctgatctttgtggcgtggatcgatcattttccagggaaagtaccttgggtgagatctctctcctggactcccgttccccgtttcccccaatctcccctcctgaaggtcaccggcaaagacttcactgtctcctaggaagaggtcgccataaacccaggggccacatgataatatattaatattaaatgtatctctaaacattaacctttcactggcagcccaagagcccgacagcacaaaggaatacttggttaaaattcaacctccctcccagtccgggctctgagtgtccctc

SEQ ID NO: 475429 - DNA, 1659 bp, Homo sapiens
cggctgtgtcttctctccagattgaggaagagtctggggacacaccagaaaaggacaggatcaagatactctgacccatggatcccctgggcccggccaagccacagtggtcgtggcgctgctgtctgaccacgctgctgtttcagctgctgatggctgtgtgtttcttctcctatctgcgtgtgtctcaagacgatcccactgtgtaccctaatgggtcccgcttcccagacagcacagggacccccgcccactccatccccctgatcctgctgtggacgtggccttttaacaaacccatagctctgccccgctgctcagagatggtgcctggcacggctgactgcaacatcactgccgaccgcaaggtgtatccacaggcagacgcggtcatcgtgcaccaccgagaggtcatgtacaaccccagtgcccagctcccacgctccccgaggcggcaggggcagcgatggatctggttcagcatggagtccccaagccactgctggcagctgaaagccatggacggatacttcaatctcaccatgtcctaccgcagcgactccgacatcttcacgccctacggctggctggagccgtggtccggccagcctgcccacccaccgctcaacctctcggccaagaccgagctggtggcctgggcagtgtccaactgggggccaaactccgccagggtgcgctactaccagagcctgcaggcccatctcaaggtggacgtgtacggacgctcccacaagcccctgccccagggaaccatgatggagacgctgtcccggtacaagttctatctggccttcgagaactccttgcaccccgactacatcaccgagaagctgtggaggaacgccctggaggcctgggccgtgcccgtggtgctgggccccagcagaagcaactacgagaggttcctgccacccgacgccttcatccacgtggacgacttccagagccccaaggacctggcccggtacctgcaggagctggacaaggaccacgcccgctacctgagctactttcgctggcgggagacgctgcggcctcgctccttcagctgggcactcgctttctgcaaggcctgctggaaactgcaggaggaatccaggtaccagacacgcggcatagcggcttggttcacctgagaggctggtgtggggcctgggctgccaggaacctcattttcctggggcctcacctgagtgggggcctcatctacctaaggactcgtttgcctgaagcttcacctgcctgaggactcacctgcctgggacggtcacctgttgcagcttcacctgcctggggattcacctacctgggtcctcactttcctggggcctcacctgctggagtcttcggtggccaggtatgtcccttacctgggatttcacatgctggcttccaggagcgtcccctgcggaagcctggcctgctggggatgtctcctggggactttgcctactggggacctcggctgttggggactttacctgctgggacctgctcccagagaccttccacactgaatctcacctgctaggagcctcacctgctggggacctcaccctggagggcactgggccctgggaactggcacccatggggccccacccatgagtgatggttctggctgatttgtttgtgatg

SEQ ID NO: 475430 - DNA, 700 bp, Homo sapiens
aggggtgtgagtgtgtacgtgccccccagtgccgcccagagagggtgcatgagcagctcagcaagagggtggggaaatttgggacctgggaaccgtgcactcctgcagggggccccggatgcgatggagctgcgcgagctgacgccctgggctgggcggcccccaggtccgcgccgtcgggcggggccccggcggcggcgcgcgcgtgcgcggttgggggcgcggccttgcgggctgcgcgagctggaggtgcgcgtgagcgagctgggcctgggctacgcgtccgacgagacggtgctgttccgctactgcgcaggcgcctgcgaggctgccgcgcgcgtctacgacctcgggctgcgacgactgcgccagcggcggcgcctgcggcgggagcgggtgcgcgcgcagccctgctgccgcccgacggcctacgaggacgaggtgtccttcctggacgcgcacagccgctaccacacggtgcacgagctgtcggcgcgcgagtgcgcctgcgtgtgaccctacctcactcggccggcgcggcggccactccccccgcctcgacggcaccactggccggccccgcgaaagactgcgcgtgcgtagagcacgccggcgcggccccgggactctcgcgataactgtactgagataaagtgtggcaactcgagctggctggtgattcatcctcggcgaggggctc

SEQ ID NO: 475431 - DNA, 804 bp, Homo sapiens
aggggtggagctgccgaagaccatgacctggagagcgactcccacagcgtccttagcaaccagccttggttcccagcggctcagagcgcagcgaagagggaggaagcaaatctgtacccagaattgctacaatatattccctaaaataaccaatttccaacaaaaaattttaagacatctaaagaagcgagaaagtgtgactcatatacaggagggggaaaaaagctgcaaaaactgcctggaaagaggagcagatgtcagatttattaaagactttgaaatagccattacaaatacgtccagagaactaaatgaaaccatgtttaaagagccaatttcaaggattaatagcctgggaaacacaaacttaccccaaactgagaatatgtcctcgagtgggctatacaaggcacagttctattacacagaaaataggagaaggggagcagtgaaacaaaggtgacattctttctattttgattggtgttcagagactttatacaaaagataaagcaaatatgtagttaccactgtatatagggttaatgagcatataggtgtcctagtctctggagggagatgattgattatatcctgttttatctgatggacaaggttgtaatcaaagtaacttccctatgaagccagtattacaccaaatagccgtttaatttaaatcaaatattatctgattgcaagcaagatctgaagcagttatagtctcattccttttcccttcccaacagaagcatccttttcctatatagcatatattattttggaggggggttgaaattagggtcc

SEQ ID NO: 475432 - DNA, 803 bp, Homo sapiens
tggagccttgctcattgctagcacagcagtctgagatcaaactgcaagctggcagtgaggctgagggaggggtgcccgccattgccatggcttgagtaggtaaacaaagtggccaggaagctcgaactgagtggagcccaccgcagctcaaggaggcccgcctgcctctgtagacttcacctctgggggcatggcatagccaaacaaaaggcagcagaaaccgatgcagacttaaatgtccctgtctgacagctttgaagagagtagaggttctcccagcaagcagcttgagatctgagaatggacagactgccacctcaagtgggtccctgacccctgagtagcctaactgggaggcacccccacagcaggggcagactgacacctcacatggccgggtactcctctgagacaaaacttccagaggaacgatcaggcagcaacatctgctgttcaccaatatctgctgttctgcagcctccactgctgatacccaggcaaacagggtctgcgttggatctccggcaaactccaacagacctgcagctaagggtcctgactgttagaaggaaaactaacaaacagaaaggacatgcacaccaaaataatatctgtatgtcaccatcatcaaagaccaaagcaacggaacaaagctggatggagaatgactttgatgaattgagagaagaaggcttcagactatcaaactactccgagctaaaggaggaaaataaccaatgcagagaagtgcttaaaggacctgatggagctgaaaaccatggcacgagaactacgtgatgaac

SEQ ID NO: 475433 - DNA, 3405 bp, Homo sapiens
ggttacccttgctctctctactttctccttccatttcactgtaacatggagcttccaccccactgccacatggtagctaagatgaagcaagtaaccatcggtagtcctgacatcaacatgagcttcaatcattgtctgccattttttgaccatggaacacattttatcacgggtaagatccatgccatggaagttgctcaggcagtttttgccctgaacatcttcagtaatcagcttgaattttctaaatgcaacttcatcattctgcaaatcagcaagactcacttcaaacacacgacccttgagaccatcagatgcaattttggttccttgggtcctggtgacgagcgtctttccaatatttcttatactgaacatagcagatgctttcacatcataccaatctttcttagaaaattgatcaaccactttcttcttggctccctttttgccgcctttcgtaaggcacttgttcttgccaactgccatggtgctggtcagagagccaaaaaggtgatatatttttatttattgatgaggagatattcaaaaggaagtaaaaaggcatgggattttcgaaacttgcatctcatccattaacaatactaaaggagaaaggaggttgtggattagtacttagctgacattctggtttaactttggtatataaccctgaggtaatcataaccattgccatggttatttaccacaatcataaccacaatcacaatcatacccatattcactgaatctttgtgaaataacagatctgtggctcttaactctatcaaactagacaccccattcactgttctttgattaaatttaggaatattaaaacctgaaaatgacatacctttaaaatcaatataatgccctaactttattaaaaatagaaaatagttcataaaattatatatagatatgtaaatattaaataagattacaacagaaaacatactgagcaagctagatatatgcactttttcaaaatgaacaaatatggattaagataaattaatctgacactttcagtacaagaacacagaagaatcatacagcagaggtacagaagacataaaaataaaaaccagcattgggatatataataacaggacttatttgtgttcaataaaagtgagcctacctcaaatgatatggggataacaacagataattatagacgattacctctgtctctgacactgagaaacaggggatagaggatggactgaaacaaacagaaacatcaagggccatagagaggttgtgtggttgattctgggcacaggaaaatagtaagagtaacaggtaactccaaaagaaatagttttaagatataattttctaacctagatttattctgagctataatttataattacataggaggtcaataaaatgaaaattaaataaaacttttaaaatagattcagtaaaatttctaaatgatatttgcccctgctaatttaaaaatatttgttctaagtctgtcagaaggagtctcaatgtcttctgttacatatttgcacatgaactaagcattagaaggcaggccaatagtagtgtagtgtatgggcaactcaaaatccactagcagtgttgctctccataatgcgatttcctaaaataatggtcaatatttcagttgtgtttttgaaaagtattcaaaccatgagaaatattttgtggttatattttaaagattttgtgtgtttatatgtcaagtgttttaaactcagctaattataaaccattctttcaattgcataaacatctgtcaaggtgttggaaagttgtgtttatgtgagacaattcttcaacgtgcacaactgttccttgcattgcaggacccctaacatttctcactctgtccactaaatgaaagtagcaaccactgttgttttctctgcttttatgagtttgacagctataggtatctcaaatacttcatgatttcattcatttttatgaggtatccataatcattaaactcatgaagcagagaatacagcagtggttgccagatctgggggttggggaagtggagagttgttcaatgggtataaagtttcagttacactagctaaatatcatgcctaaagggagtgcagccaggtgatgatgacaaaagcaacaagaaagaggactgagtgggaatgcaggagattaggcccctcttagcaccgtggaactgcactggatggcctgcttccagactcctgttatgtgagaaacacaagcccctttttagtcagatttcttgttttgtgtagctgaagctgcactgcctttgtcccagtgcctaaaggtgacaatgcttgttgccaaaaccacttgtatatgaaggcttctatttatcaggggagataagagagaagttcttggctggttttgtaccccctcacagtagctaccattctcctccagttgagttttgataagaagtaatggtacattttgtatatttaattcctgtttcatctattttaatatttattaatttttatctatgtctcaaatgaaagtaagctgcatggattatacaaaatatcctgtttttaaacttcaattaatagcatttttacaaaagtcaattatgaaaagcatagatgtcaaatgactaaaattatgctgaatataaaatgaattctataatcacctctgtaccatgaaatggctttcttgcaccattgttacctaaagtagcaggagaaaaaaggcttaccatctcctttaatgtaacatgcttgctttgggcttatgttgtaaaagaattgctaagaacagacaagcatttacatgcagtgctgctgctgctggacttgcctcaaagaagtgagaataaaaatggcctagcaactatttcatgcccatttgtccactggtcagtgcaagccaagggaaacttactgagtcaaagctagaatttagagagctttattatcttgctttgcttgtgaacttgatttttcaacacgattagtgaatctattctctgaaaagtaacatcacgtgggcattttcagtctttcaccaaacaagctagtatgtaagtgaatttgtatgaatttgcatatacttgttatttgttagagcatttgtacattgagtttgtgctcatcattataaaattatcatgaggaatagtttttgtacagtcatgtgtcacacaacattttggtcaacaatgggctgcatgtgtaacggtggtcccacaagactaatagagttgaaaaatttctgtcacctagtgacatcatagcctaatcttacagtgtaatacattactcatgtgtttatggtgatgccactgtaaacaaacctactgtgctgccagtcatataaaagtatagtgtatacaattatgtatagtacattatactttataatggtaataaatga

SEQ ID NO: 475434 - DNA, 823 bp, Homo sapiens
gcacaggatgtgaatggatgagccaggactttcttctaccagggcgccctcttgtggggatcttattaattatcttgcaaggaaagggaccttatacccggttgccttcacaaggcacaattgtgaagattcacttgtcctataaagcctcagtcatcaggcttcaaatagatatgctctctcctctcttctcactgtggttgaactggtctacttctctgttttcttgtgaccaaggtatgggcagcaacatgccgcatgaagagtgccctccttctggttcgggggtacatgtgcaagtctgttacataggtaaactcgggtcacaggggtttgttgtacagattatttcatcagccagaagaatttcagacagcaggaacttgacttcaaaggttggtgtgacgtgggcagacacagagggggaagcacagcccaagtacgagcggacggcaggatgggtggaggcagcaatgcaatggagtgaggagaggaagtgtgggtggaagctgatgtcattgacttgagacttcttcttttttaatttagatatttagagcaaaaatttccttatgattactgccttagtcgtaaacaatagattttcatatgtcttttttattttcattcagtttttaaaaatcttaattttttgtttatttcttttttgactcatgggttatttagcagtgtgtaattttctttctaaatatttgagttttgtccagattactttactgatttctaatttaattctattgtggtcagataatatactttgaatgtcttttgtcaggcttcttgattggaaatggaaatttaa

SEQ ID NO: 475435 - DNA, 2597 bp, Homo sapiens
ccgcgatgacttttcccctactgtccccaccagactcaggagcccagctggcttcacccactggatcccgcaccagggctgcaggtggagctgcctgccagttccgtgcggtgtgcccgcactcctcagcccttgggtggtcaatgggaccaggtgccatggagcagggggtggcgctactcagggagctcaggccccgcaggatcccacggggtggaggaggggcgggggcggggtgggcgcgggcatggcgggctacaggtccacagccctgccccgcgggaaggcagctaaggccctgcgagaaattgagcacagcgccggtgggccggcactgctgggggacccagcacaccctccgcagctgctggccccagtgctaagcccctcactgcccggggctggccggcccgccactccaagtgtggggtgccaagcccatgcccatccggaattctagctggcctgcaagcgccacgcgcagccccggttctcgcccgtgcctctccctccacacctcctcgcgagctgagggagccggctctggccctggccatcccaggaaggggctcccacagtgcagtggtggctgaagggctcctcaagtgcagccagagtgggtgccgaggccctctaggaggcgccaagagcgagcgagggctgcgagggctgccagcacgctgtcacctctcaatttcaaagaaagtgggtgctccagatgcctggagatctgcctcggtatggagcaaagagggctctgttgacccatgttttatgcacaggaaggctggggtcgctcaggctgctgatccaggtctccaagctggctctggatgcaagtctcattgcctatgagaaactacagctgcagcagctctcctaccaccccagacctgcaacagggggaagcacaattccactgcctactgctgggatgctttccatactcaccactcaattctggtttcctgggtctggaaaaatgcctgcaacttttcctagtgtttttccctctcagcgtctccaagcctctccaccagttagctcaaagttctcttccttggtctgggttgcatggatccccagtggaaggaggaaaaaccgtaaagctctctttgggtttcacagctggagttacctcaacaaaatgagaaccaatttggcatcagatattccactgacacagtacatcctacaaaataataaagcagatatgagaaaaaagatataattatgagtaaaattttagtattacaggaaactaccatatgaaaaaatccatatgaaatgaatattttataggaaagcagcacctaaacttgctaaaagtggaaaaaaaaaaagaaaaaaaaaagaaaaggtacccaaagatctacaccataaaaggcagcctatcctgatcaccaaacttttcaagaacagataatttctgttttgtaaactattaaaaagatagaataaagaaagttttggtaacttgaattgtgaggttagcataaccttttcacctacccaaatcaaaaaaaaaaaaaaatggcatggaaaagggaaactgtagataaatataacttatgaatgaagctgcaaaactcttaaataattgttaataaattaatctcaaaaatgtgtaaaatgaataatgactcatatcattttatcattccgtttcttcccctttattaatttggaagttacagcctcttttcattcttttacattctttagtttgttagtcatttggtgtttttaataacgaatttttatcttttcctctagcttttcaattattttcagcagaaagggtagttcaaattatgtcgtccaccattactagaaacataggctctggaactttcattttgggaaaaaataaatcagtgcccaatttcacatcaacgtaaattctaaatgaaatgcaggattaggaaaaaatgaagactttttaatatggttatccttaccaaaggaggtggttaaaatgaaaggaggaggattttttttctaagacacaaaacccaaatgctataaggtaaaaaaggtgagtaaactggaccacatacaaatttaaatttgtctaaatttaaattaaactcattacaaatttataattacaaatttaaatttacttgactgaagacatcttaaataatgttaagagataaaagacagcttgagagaatatatttggagtccacataacaaaaataatatccgtaatatgaagggggatttatatataaataagaaaatgaaaaggaactggggcccctcccaaatgaaccaaaattatcagcaagcaattcacagaacaaaaaatgcaaatgacaagtaaagttaggaaaatcatcaacttcaccaataattagtgatttgaaaccagactgtagataaactagcactggtatatgctgctggcaatagcaaaacttgtatttacctttagccagcattttacctctgattatctatctaaacaacattcacacaggtttacacaatgcttatttggaaatctttgatgccattctgtaagcaagtgataaataaagggaaatatatccaaagtgtgaaatgctgtgtagtagtttaaaatatgt

SEQ ID NO: 475436 - DNA, 474 bp, Homo sapiens
tgaggaaaacctaagtcacaattttgcttcaaactttggctctgctgctgcatgactctcagggtcattcaacattttgagcctcagtttcttcatgtcagtaaccccatcgacttgtcctgtggaaatttcctggcacagctccctggccttcctctgtccttaaatgtgcactgccttctcaattctgactcaccagcagcttccatggctttctcatgccccacacgagtgggaggtggttttggctctaatttcaacatctcattatcctggggcacagtcactcagtcacacagtaccagacccaaatccatccagacatctcctaccctcacaaacaggacccccacctgcaatgacttgcagagacttcaagcagcagcacattgtatggggctgggagggtcaaggtggagacagaagttgatgaagatactagtccatattactgtgcaatagaaacgtcatact

SEQ ID NO: 475437 - DNA, 624 bp, Homo sapiens
gagcgagcgctgtgacgccgactgggttaccatcttcactccaccagttggtaccggcttctattaccatctctctgcaactcagtcactacctccagcccctaccccctctacggcatgggcatggccaccccaccgacaaccctgcactaccactcagggcaatggcaagctcttactctcttcaaccaccacccgtggagcctggggcctgtggtggttggagtcagggcttggagagggctcagcactgaccaatggcctggcttgggagaagtgaagaaaagctttcaagaagaggttgcaattgaatgtggcggccttgaggacaagcaggcaggtcgtgaaagaatctggatcaataaatttgaccttgaagaaagaggggctcagtggggatccaggcctgaaaatcacagaagagcctgttcagcttgcccaatgaccctcaggggactgtttttccgtctggatgtgaagtttaagggagaagatatatttgaagtcatctggcaaggatctgccaggaccaaatgacccatgtctgtgggtttcctttttagttgttcctttggacactgagctctgcctgggcttcagcaatcattttcatggatgaatttt

SEQ ID NO: 475438 - DNA, 631 bp, Homo sapiens
tttgtttccccaaatggaaataatgtattcaaaagataggaaatcagtatgtcaaagagatgcctgcactcccaagttcgtaagagccaaggtaaggaatcaacgtcagtgtccattgacggataagaaaatgtgtacagacataatggaatatgattcagcattaaaaatgaagaaaatcctgtcatttgtgaccacctggatgagcctggaggacatcatgttaagagaaattagccaggcacagaaagacaaatactgcatcatctcatttatatgtggaatcaaaataaaagccaacctcacagaagcagagggtggaatggaggttaccaggggctggggtggggttgcggactggggagatgttggtcaaaggacaaaaatgtcagttaggcaggaggaataagtaccagagatctatcgtggaatatggtgatgttgttaataacaatatattgaatgcctgaaaatagctaagaaagtagatttttaagtgttctcaccacaaaaaagtgtatgagttccttctcattctcattgatgaaatgactatatgtaaacaatgaaaagtgatggttcatttcattgagtggaggtgggttgatgtccctcaggaaggtttgcaaat

SEQ ID NO: 475439 - DNA, 535 bp, Homo sapiens
gaggagttggagaacgatgcaggatttagaatcaaggaggcccagggcctattgacgatgaatcccccggtgggatggtgcacagagaacaccccatacgggatgccagggaagccgcccacagggctgcctctagaagcacttgctggaaaagagccctttgttttttcagtgcccttccagtgtcatctgccaatgaagcttaatgtcttctgcatttgtggccacttgaatctccaggacttcaaaaggcagcttagaattcttccccacaacaatactgatggagacccagatctagccacagagcctgggggaactggctcagcctctgaacctgtgactggttccactgactttcctaaaccccaaacatcagaccttcaagaggtttgcataggaataattgattgtctggaacaagatgccgcagatggatatttaatttggcacactttctgaagggctagatggacctagagtctagaaaatcgtcatatccctttaactctacccacttctgtaaatagagtct

SEQ ID NO: 475440 - DNA, 536 bp, Homo sapiens
aagccattaccatttctgcagtgttatgaaagcagaggcatggaccttgtcatttacagaaaaacaggagtggaaaattcccttgaaaactcgccagatatcgaagggcagtcagagagagggggaatcagattgggtttcatggaatctgaaccctgagattctcagtgcccttacgctaagggcttcctgcagacaaggatatgggctgtttgaaaactatttcattttcctcgtcatcatcattcatttcagacactcacattttcatctccccaaaaatgttgatgtacaaaccggtgtggggccctgggtatccacagtcttttcaggagtgtcaggagtgcctaaaacctttttcttcttaagtaaaacctggccttttgtagacgtccgaaaatttgattttgaagtactttccattttctgtaaaatcaaagaaggaaaatcataattctattttaagctaatttcttctggagtaatctttctttctttttaaatggcccctccatccgcagcttttgcgaaatgcc

SEQ ID NO: 475441 - DNA, 1404 bp, Homo sapiens
caaagatagtcctatcagctgaacggggtgcaccacctctgcctcgccatacgccagccctacccgggtctccaggaaggctggagcggaaccctcggctcccgcgctgctctagtgccacctgcaggttatgtgggggaactgcttctcctcatcccgaccctggacagacttggccttggccaaaagacattcagaagcctgggctggggagtgggctggagagtgggctggacccgacagtgaagcccacgaggagaagtagatcagcgtcctgctttaaaaagcagtctgccacacctccccaaaacagtcgcctctgcccctgctggcttggagtctccagagcccacagtctggaacagccgagtcatccaatcaacccaggtggtggccctctcctctcccagagagagagcagagctctgtccctaataagtgtgggcagaagcggctggaggtcctgcccgggaggtcctgcccagtgaggagaaatggatcaggggctctgcttaaagaagcagtctggtcacaatctgggaaagccactgtgatgcactgctggggggacccttcctcctccagactgtttggactctccaaagcccacaggctggaacagctgagtcaacctagcagtagaaatggtgcctgcccctccccagaggggctccggcccatctcaggcaggcttcaccctgttgccattggctgggtggaattccaagtcaatgggtcttgtagcagacaccagagcagacaccacctcagtgcctgctgaagctctgctcttccaaggagcttcttcccgctggtgggttcatcgtctcgctggcttcaggtgtgaagctgcagaccttcgcggagagaaactgcagaccttcgccgtcagtgttacagctcataaaagcagtgtggacccaaagcatgagcagcagcaagatttactgcaaagagtgaaagaactaaacttccacactgtggaaagggactcaggattgccactgctggccacgcaggagcccacggaggcggggggaggctcgggcatggcaggccgcaggtcccgagccctgccctgtggggaggcagctgaggcccggcaagaattcgagtgcagcgctggtgggccagcactgctgggggatccggcgcaccctccgcagctgctggcccgggtgctaagcccctcactgcccagggccagcggcgccggctggctgctcccagtgcagggcccgctgagcctacagccacccggaaccctagctggcttgcaagcgctgcgcagcctggttcctgcccgtgcctctccctccacacctccccacaggctgagggagctggctccagcctcggccatcccaggaaggggctcccacagtacagtggcaggctgaaggg

SEQ ID NO: 475442 - DNA, 1070 bp, Homo sapiens
gcggcagcgggctgaagggctcctcaagtacagccagaatgggcgccgaggccgaggaggcaccgagagcgagcgagggctgcgagggctgccagcacgctgtcacctctcactatcatgaatcatcagttcaacccaggtcctgctgacgggaggaaagggagatttgacactgagaagcagatacaggtgcaggtagggcatctgctcacagccattaaggctggtccattcacagatgtgagcactctggaagctccacgcaggagaggaaacacagcaaacatcactgaagacttagcagtaaagacagaaaacactacataccccacggaagactttgcccaacccccactctcacacctccttcccaaacgccagaaggagcagtgggggctggcaggggctctcccttgcccacctgccaccggcccagcagactcagggcttctctgtcctcataatgtctccctgctccgacatagcccctcccaacctgccagcccacacccaccagcgaaggtcactgtagctacctcaccctccctccttaaaatgcatgagggggagggactgcaattatataatatatattttattttcttgtcctgcgtgctctgaaaggtactgcttaattgtcatgacctgtgtttgtcaaatggctctttaggaatctttgtctaacctttgttcttcaagaatcattagatcagtaaagttgtgacaatttgtttttagttctaagggaagacaaaaggtatctttggtatatgatgagtatattcaagtatgtatgtgtgtgtgtgtgtgtgtgtgtgtgtgtagcaggataaagagggggaatctatgatgatgaggatgaaggtggaatttttactgaaatgggaaaaggcttctggctgaatgactccaagttattatgacttcatctcatacaaaaagggataagtttctattcagagtctaaaataagcttgaaaaaacaccaggcaagcccaatgcctgtcattctttctctggagaagggtaattgctcctaatctcttacagttaccttttctctgaaccca

SEQ ID NO: 475443 - DNA, 529 bp, Homo sapiens
ggaaccccctccacccttaccctcaccctaataccctgccttagttaggtcccaatcctctcagcttggctgggcccttcccatggccacgcaatggtctcccagcccccacccctctccttccatgcaccctcttctgccaccctgcgcctgcctccaaggcgcatccaaaatgcagacttcaccatgtcactccctgcccagagccctctaaaggcctacaggaaggcgcctgcctataggataacatccagattgtccaaatggccctgtgtgatgtggcctcaacctactgatcagacccacacccacctctgtgctccaagtgccccagtccccatctataccatcttcttggtgtttgcatattctgtccccgacaccaagaataccaatcatacagccctccctccaggaacctacgtgctgaaggaggagataatggagaaacagaacagctgcccaccacagcatgagcagtgccaccggtgaacttgggatcgtgctgcaggctccctggaggggttta

SEQ ID NO: 475444 - DNA, 1444 bp, Homo sapiens
gaagctgtgcccactgtgaccaggactaagtccacgcagggcctagagggcatggataggcccttgggagaggagaggcccgggagggaacccctgctggcggagctggaccgtggggtcctggagtcatttagccacatctttgtgttatcagaactgcaaactctggaggccagtggtactgatgagtcctggccttgtcacttcctaactgtgtcctggagcaaagctcctgaaatcctcgtggacaggggtgataggaggatctttggttctgatatttggtctttgatcccagttcctgacacagagctcctaatcccttggaattttctgggtaataggagcatcttttgttctattgaggcaactcttggtgggctcctggacagcctcaggatgagggctggtttccagggaaccaacgctgtcagtagagggtgggaactttcagcctcacctttgacctctaaggaggagaggggaactgaaagctgaatcgatcaccaatggccaatgatttaatcagccatgcctatgtcaagaagcttccataaaaacttcaaaggacaaggttcagagagcctctggattgctgcttgtacaatgcagaggtgccaggagggtggcatggtggagagggcatggaagcctcgcaccccttccataccttgccccatgcatctcttccatctggctgttcagctgtaacctttctaataccctttatgataaatgggccaatgtatataaagtgtttccttgagttctgcaagctgccctggcaaattaattgaacccaaggagggggttgagggaaccttgatttattaattgaacccagggagggggttgtgggaactttgatttatagccagttggtcagaagtatagatgacaacttactacttttgattgatgtctgaaggtaggggcagtctcatgggactgagccctcatcctgcagaatctgacactaattccaggtagttagtgttagaaatgagttaaattgtaggacagccagtcagtgtctgctggagaattacatgtcagtgggaagaaaactcacacaccttttggtgactagaggcgaagtgtttctgtgctgagtgttgtattgagtttgagtagacggaaaaaaacagtttgttttttacctttactgtgaatatatatataaaggacttggcattgtgcccaataagcagtgagcactcaagggatttcagctgttattcatgtttgcaaaagcagggtctgtgcatccctccaccaatccatccacccatccatctattctttattcattcatctgcttatttgttgagctctgcccatgttctgggtcccatccatgttggcccctggggttgctgagattcaaaacagaacaaaacagcaacatgcagctctcgtacgcacgtttgctcaagttgcttgc

SEQ ID NO: 475445 - DNA, 1174 bp, Homo sapiens
tgtttctctagaggggagcatgggctcactcagggctttgatggaaatgagttttgatggcttggatgctttcagagccgcccactcttcctcctcccaccccgctgagctgacaatttcacatgacatcaattcctctgacagccgtgtaaacagatggtggtccctgccgcccggggtgctggggagcggtaccatggtaacctgctaaacggtgacaggtgccaggacggtgggaaatccgggaccttcagacgcacatgcacctggctcaagcggcaggccttgggctgtgggttcttcccagatacagtgggccagggctggtggcatcacagcaaggagaagaaggtgagaagccccactctggctttgggggccctgttgagaacagggcacagcaacttctggggaggcccaatcatgcttgtcttccctggatctcagatggcagctgttgactctcccacaggtcagcatctggttctgacagagccatggaaggtctcgttcctggggctgcaagtgaccagagaagacgagcagcccattacccaagaggtgaaagacaggggggctgtgaggggcaccctgggccaggcagccaccctgagaggctgggaccctaaggtagggccaggccaacctggaaacgggagaatccgagccagcgatggcttccttaggaaggtggcgttgagcacagccttgaaggatggggagaagctgggtgggcgggcggtggggagagaagagacacagcaggcagcctcaaaacctgagaccagtgccgggggctggattcgtcaatacttatgcggttgcaacagctagaaatgggattaagctgatttcttcttctttttttggttcacataattgagaaatctagagttggctttctgcatagctagatgcagttttccaaacgctgtcatcatctcttttcatcactcaagtccgctctccccctgtagaatctcagaggggctctctcaaagcagcccccagcaccaatgtcttccccaatagctccagagtaagttccaagaaaggtctctctgccctggcttgggccacgcccacccctgagggatgggggatgaaaggctctggttggctttgatggggtcacgggctgatccttgggttaagaatgttcagaagtatttcc

SEQ ID NO: 475446 - DNA, 803 bp, Homo sapiens
atatgtgcaggccccagggtgagaaccagtaacagcgatgaatcagccatcatctgtatccaatgagttcactgcctaatggagagaccagagaaacatgtgattccaccccagcgggactggacagaaaagggtgctcagaaggtgttgaaggggcacgtgcccaacttctcaggggagatggcattggagctgagaggtgtgggagttgtccccgtggaggaggaaggtggagggtaggtcccagacagtggcaggtcagccagcaggtggagtggggttattggaggggagacctgaatccagccgacagctgcgagccgggagaggtggctccatctgtgggtgacaaagcaggggccagtgtgaagcaagatctccagaaagtaagatgtcaggacgtgaacatcttccggggccattcttcagcctgccacagctggtcgttcatgccagcagtcaccaagagagagctcagagaagatgaggagcatctgtgcagagagccagaggacagggacagggaagcccagagctctcacgtctgaaggaaaggtgggctgggcgtgctggctctggcctgtaatgccagtgatccgggagtactgggaaaggagggtgtggtccctggtagggctccacccccacggagctaggtaaggacaggcacttctgcctttgcacacaagtgttgcatttgtcaagaccaccctggcccaccacgcccccattctgggcctataaaaacctgagaccctagcaaggcagagacacaagtggctagacatcgtgaggaacacatc

SEQ ID NO: 475447 - DNA, 578 bp, Homo sapiens
tggctcggcaaagactccagtatgaatggagtttgcaatttgaaagatgatgtgtctggagccctgcggcgtgctttattccggcatacattttattgttatcttcattttcatgcaatagcattaaggcctagagaggttgggttcttgcttcaaataatacagctaataaatgaactgtctgccaaaaaggcggtaccaattttcaccctagccacagggccatttccccaacaggatatcattgtctttggactagggatgggcatgaccctgaagcaattgcttccatgtgataattccaggatcctgctagtctttggtagctgtgagagtgtatgtcacacttctggctctgtgatgggcctgtttctcattcccaaatgctgcaggtactgtgagggcagccttgcaaatacgcagcagccaggaaacatgtcttttgcccctggtggacttaaattgtaaggtttcagagaattatcttttcaccttggaaggtgttttatgggtacatgtgtattaactattactgagtaataaacccctccaaacacagtgccttaaaatgacaaggc

SEQ ID NO: 475448 - DNA, 880 bp, Homo sapiens
cgatggcacacgtatacctatattccttctctctgggcaggacatctctgaaagaaaggcagcagccccaatcaggggcttatagatcaaatttccatctccctgggacagagcacctgggggaaggggtggctgtgggcacagcttcagcaaacttaaacattcctgcctgctggctccgaagagagcagctgatcccccagcacatcactcgagctctgctaagggatagactgcctccttatgtgggtccctgacccccgtgcctcctgactgggagaacacctcctagcaggggccaacagaccccttatacaggagaactccggctgttatctggtgggtgcctctctgggacgaagcttccagaggaagaaacaggcagcaatgtttgctgttctgcagtctctgttggtagtcaaatccatgaagatgaggaaagacaaatgcaaaaaggctgaaaattttaaaaaccagaatggcacttctcctccaaaggattacaactcctcgccagcaagggaacaaaactggacggagaatgagtttgacgaactgacagaagtaggcttcagagggtggataataacaaactcttgcaagataaaggagcatgttctaacccaatgcaaggaagctaagaaccttgaaaaaaggtctgcatgcccactctggaaatgtactggttccaactgtggtggtatgtggaacaccagctgtcaaagtccatgggttgtctggctactggggtctccacatgctggtcagctggcccaacaggccacagacagattagctgatatagttgtgcagattccctcagtgttctgggtgaggtaagaggcagccttcttggcaacatctcaaaaggatagggaag

SEQ ID NO: 475449 - DNA, 682 bp, Homo sapiens
gtggagtatttagtaccgacttgcaacaggggtgagcgtttactctgcccacggccctcaaccccatgcagaaaggagcacgtgagcgagtgagtgcgagacccggacggccactctgggcgctgcaccagcagaagcaaactctgggtgtgaactgtgccggtgcccaggtgggggtgcttgcaactctgaagccccacagggcgtgttacagtgctctcttagctccactgtctgtggatgcttgtgtgttaacaactcagttgggctcttgcctcctcacgtggggcaactgccctccaccagtgagggcacagtgccagtgtgacagcctttctgagtacctgcacttggtgggccccgagctgttgtcagaatacaagaagaatgaggttgtcttctccctgaagtctggctgccttgtccccaaagataagccatctctcttccccagaattcggcagtctctcttctctgctgactgagtctgggatctttaaagacacaggatcagggtggggcgggccataggtagttttggaaaaggcaacattcagttgactctttctgaataatgcctttttactgatcaggagagagtgggcaaacaggaatagaagttctcactttgggctgcaggtttcagacttttcagcttgaaggattgctttgactatttggg

SEQ ID NO: 475450 - DNA, 1113 bp, Homo sapiens
tgttgctgtctccagtcagatgatgccagcaggggctataggattacttctagctctggacaaaattcagactactactccttactcctacttggggaccttagcaaataacactacaattgtgccacagaaagtaaccatatgtagggatcaattgaaaacattaaatgacttccaaaaattactaggggatattaattggatacgacctgccctaggcattcctacctatgccatgagtaatccatttgctatccttagaggagatcctagtctcagttgccctcaacaattaacaaaggaggctgagacagtgttacagctaattgagaagcaagtgcataagactcaaatagataaaatagatccagagaatactctagatttgctaattttttcaactcagcattcacctactggtgttattgttcaagagcaggatcttgtagagtggctttttcttccacatactaattcatggactttgactccttatttggatcaaatcactactgtgataggaaatgggagaactcggattgttaaattacatggatatgatcctggaaaaattattgtccctctcatgaaggcacaaatacagcaagcttttatagtcttacttggcaaacccatttagctgactttgtgggtattcttgataaccattttcctaaaatgaaactgtttcaatttttgaaattaactaattgggttctccctaaaataactaaatttataccaattgaaggtgctgaaaatgtcttcacagatgggtctagtaatggtaaagcttcttattctggctcaaaatgtaaagttttccagacgccctatactttagctccaaaagtggagctcgtagctgtaattgaggtattgactgcttttgatatgcatattaatgtgatttctgattcttcatatgtggttcattccacacaattaactgaaaatgctcagttacgatttcatacagatgagcaactgataactttgtttacccaattgcaaacagcagttaggagtagaatgtacccttttacatcactcatattagggctcatacacctcttccaggacttttgactgcagggaatcaaatggctgatc

SEQ ID NO: 475451 - DNA, 684 bp, Homo sapiens
tcagggaaggatggaggccacggtcaccctcctgggaggaggcgaagttgtacaagggaaacttttacttcagagacgagagcgtgaggaagcgggaagccacccttcctcgcgcggctccctcaagtgtggtctcaaccaggagggaaaaggaggcttctggggctcagaagaagactgggcgctggttatcctcgctgtgtttactcagaaacagcggccggcaggcaaaagaagggcaatttgcacttggatagtccctgacttcctgaaacagagagagggggcgttgacagagcccctttctgaaatagagcggcaccctttcttgaccttgactgcaagtctatttcaaaaatctttttcacgtcctccagctcgggaagaaggacaggaaagctgtcagcaggaaaactccgctttggagaattaaaattaagacgttttctgatcttactttctatgaatgctcatttgggtttattatgtacatattgtggttgtggcctttctttatatgtaacagaacaatgacacggttgttgcctaatatagaagtatcaaggggtagcttatgagaatttatgcccaaacaaatgtttttgtaatcttatgtgaagtatgaataaatatctttaggacacattgctatgtttcattgactagtaatttaaactctaagca

SEQ ID NO: 475452 - DNA, 701 bp, Homo sapiens
tcggatggttgccatgtctgtgtagaaagagcactttaaatatgtcatgccactctctcctgatctgtaaagtttccactgaaaagtctgttgctagacaccaagttagacttccaagtagaacattttggagcttcattgccctggtgggtccagaagtatcatccaagagtgagatactagagtcaaaaaccttagatgtctacttggtgttctattgtactgtgacttggctgccactcaaaccacaagacacagtcattcccagtctttcctcccctttccaaaggacagcactgagttcaatgccttacagtttctctggtctccctcccgcagcacccagagacactctcagcaccacagagctgctgctgggggttggggaggggtggcatcagagattccggactgtttttcttcttcagtgcctctttcagcaatacaaagttaacaccaggtcacacagtcagagaaaggcagagctgggggattgatggttgactgatggattgatttaggaatagctacttttttcaacatagtaattcaatctgctgaccttgaaaccatggattcaaatgccagctctattccttactatcagatcattttaaaccaagtttctcatagttaaaataataaattatagcatctaacctcatagaaagaaattttaacaggaatgttttgaaataaag

SEQ ID NO: 475453 - DNA, 744 bp, Homo sapiens
tgaggtagaccatcatctgtgctttcatcataaatccaaaatgcagaagcacctgaagggagtcacaactccctggattttcaaaggcgttagaacaatgatagctggtgcggctctcacctcagtctccccagtagctgtggccacaggtgtgcaccactatgactgtgtgtgggatatatatgctgtccctgcgatcagcctgactcacggaggggatgccttgctcaaacggacaatggatgacgggcttgggcttgtgttcctcttatcttctagtctatggtcccaggatttgggaggctccagatcccctggataccccgagaatgggtcaggatacaaatcccctgatgtgctcaccggggcagttgtgattgagaaactgcaagaagacaaatctcattggatggacatgatggaagaagagggtgacaggagacaggttggagagggggctgtgctggctgctgtggagacagcggatgtcactagggggcaaggacactggctagcagactattgcagttgtccaggcaggcagacagatgaccacagctgcgtggggagtggaagaccatagggagggtgggcacctgttctgtttggcctgggggctccggtttacaggtgttgtaatgattagtgtgctccttttcactctcacgtgggctccggtttggatgataagttatatgagcttcctagtccagtggtctcactgtgtggcctccgaaccaggag

SEQ ID NO: 475454 - DNA, 1599 bp, Homo sapiens
tctagggagggacctggtgggagatgattggatcattggggtggtttctcccatgctgttctcctgataacaacaagatgtgcgaactcgatattttacacgactctctttaccaattctgccccgaattacacttaaaacgactcaacagcttaacgttggcttgccacgcattacttgactgtaaaactctcactcttaccgaacttggccgtaacctgccaaccaaagcgagaacaaaacataacatcaaacgaatcgaccgattgttaggtaatcgtcacctccacaaagagcgactcgctgtataccgttggcatgctagctttatctgttcgggcaatacgatgcccattgtacttgttgactggtctgatattcgtgagcaaaaacgacttatggtattgcgagcttcagtcgcactacacggtcgttctgttactctttatgagaaagcgttcccgctttcagagcaatgttcaaagaaagctcatgaccaatttctagccgaccttgcgagcattctaccgagtaacaccacaccgctcattgtcagtgatgctggctttaaagtgccatggtataaatccgttgagaagctgggttggtactggttaagtcgagtaagaggaaaagtacaatatgcagacctaggagcggaaaactggaaacctatcagcaacttacatgatatgtcatctagtcactcaaagactttaggctataagaggctgactaaaagcaatccaatctcatgccaaattctattgtataaatctcgctctaaaggccgaaaaaatcagcgctcgacacggactcattgtcaccacccgtcacctaaaatctactcagcgtcggcaaaggagccatgggttctagcaactaacttacctgttgaaattcgaacacccaaacaacttgttaatatctattcgaagcgaatgcagattgaagaaaccttccgagacttgaaaagtcctgcctacggactaggcctacgccatagccgaacgagcagctcagagcgttttgatatcatgctgctaatcgccctgatgcttcaactaacatgttggcttgcgggcgttcatgctcagaaacaaggttgggacaagcacttccaggctaacacagtcagaaatcgaaacgtactctcaacagttcgcttaggcatggaagttttgcggcattctggctacacaataacaagggaagacttactcgtggctgcaaccctactagctcaaaatttattcacacatggaccaagtggatggacttggaccatcagtggcagactaggggagtgtagcagacaggacatgttcagctgtgagtgggaaaaaaaacccaatgagaagtggtgtcaacagtctagacatcattatgtcaaattcaatgcccagaaccagaccagaggatatctctcttggacatcatacagtgactattcaacttcaaacaccacacaatgatgagtttttccaggacattccacccactttttaaaataaaacatattagtgttataaatcaatcgaatatggttcgtaatagcaataatgcccttgaaatctgttaatcttgccattgaaaaac

SEQ ID NO: 475455 - DNA, 509 bp, Homo sapiens
cctgtaaaatccagggcaaggacttctaattctatgttgaatagaagtgggctgctacggtatggttggggcccactccagtccctaggcaccttggattttccagaacctgaaggagtcttcagtgaaggctgcaaaacagcacagattgcagcctgtccttcctgggagctttgtcctgggaaggatatctggcagaagaaatttctaagtagcaaagcattcaagagggcagtgcagaagggagatgtggggttggagcccccacacagagtgcctactggggcaccgcctagtggagctgtgacaaggccaccgtcctccagaaccgagagtgatagatccacctacggtttgcagtgtgtgcccggaaaagccacagacaatgccagcccacaaaagcagcctcatgggtatgtctttttcagcagtatgaaaatggactaacacaaacatcttaaaaatggtgagtcagaattaaatatatatgattttactttaaaaattac

SEQ ID NO: 475456 - DNA, 877 bp, Homo sapiens
cacaggtcatgttggaggcagcatcggttcaggaactagccctgaaaactgtgaccgtgactcgcgcgcttgtccacaccacctccacgccactcccatggcttcccacacccctgaagatcgaaggtccaggggaggatggcaccgccttggagatggggttgggatggggaattgcacccagggaagttaggcttgaggatcctaggacacatggccggtggcagagggtgaagaaaaggcaaaaggcccaggatgacacgtctggctgtgtgctctgctgggtggatgctggttcctacccgctgcccactgctgactcagacgctttcctgtgcgtggcccgcgtagtcccatcaatctgcaaccggctccctgtcagaccccatgaaacaggctgcggggcatcgcatttgtccttgagacatcctccagccggtgaccccttcaagaggttcttacagggtcaccctggctgccatgcggaagacaggatgcagggcaaggtggtgcctggaggcagtcggtagggtttggagaatccaggggagagatgtccgttttaggaccttttcatcccctgcggaagaaagcccatgccctgtagctattatcccccacctcccctcctctcccccagcccctgccaaccacgagtctactttctgtccctgtggatttgttcattctggacatttcctagaaatggactcctgcagcgtgtgaccttctgtggttcatgtcacttcccatcatgttttcaaggttcgtccatgttgtggcaggtagcatgttgcagctttcgatggcagagtgatattctggtgttcagatcaaccacattgtcttcatccgttcatcagctgacggtgatttc

SEQ ID NO: 475457 - DNA, 1016 bp, Homo sapiens
gaagcttgctttgagctggccatccagcgtctgtccctcctggtccgctaccgtgagctcttgactccacctggctccacgccccctgccccatgtcttcccttagccaggagccagtgtccttgggcaagcacagtgcccataagccgagcagacccctggaaacccaccgccaattagaactgttcctcactggaaagactgcctagacaaaccacctaaaacccaggacgtgaggactcccagctccccacccagaccccagccagaagccacggcaagccgtcagtgtcgagcagagggcccctgcaggaagactgggaaggtctaaatctaagctcattaacaggccagagggtgagagagaacacagaggtgcaagacagggaggggatggaagccagcacgtgggtcaaagacgaggccatgggggaaacacccgctcatacgacacaagcatcctgcctgctgggctggaaatcccgaaatttccccagtattcctggaagcatcaaggctcccacagaatacagtggcacttcccataagacactggacccagatacctcctgtctcaaggagcccaccgcctccagggccccactgagcggcccccagagcccactggaattatttgaactggccaatccgaaccctgctcagcttgcctcgcccctcccttcccacagtccatgccccagctccttccaccccctgactgactccggtgcttccccatatggtcctgttgtgctgtcgaatcgtcagaaagctgacgtcatcaagagaactgagggtgttcgcagcaaggaacacggagttactctgaaacattctccagagcaagagttcttaacctgggctacaggaaatcttcacaacccttaaattacacgtgtgacttcccatcaatgcgcagctctgtccaagtccttggctttcatcagactctcaaaggagcctcagaaagccagaattttgtctcagtttctctcatcattgattttaagggttat

SEQ ID NO: 475458 - DNA, 771 bp, Homo sapiens
ccaggcacctcccttgccccgcagatagggcctgacctcagggccacatggcgggatgcccaccctctcacagccctctccacgatggggctggggactctggctcaggacagacagatggaaaaggccaaggctcttcacatagaaagtcaggaggctgcagggacggtgtggaaacatctagaccccggctccttcaccccagcacagaagggagagctctcagggcgaggtgcttctggcctaggccgtgctttgcctgtggatacattttacctgatcttcatttttcatgttaatgaagtttttcctatgagccttggacacattatctttttccattttgcactgagtgttttagataaagccttcgggtcctggggtctgcgcgctgtcctggctgatacaccagagaccctcccgtatgacacagaaccagtgtccccgcagacgctcattcctgtggaggtttgtatttttgaagtccttgtcagagatcatgaaaaggaagggtcgtagataggagaggtctcaggaaatagtggttgcagtcgtttccaaatttcatttcataaaccgaaaacacgttttaggtctcaaggggcaaaagacaccttcatccagttaactcggaaagtttttaatgtttatatggcacaaagttctttctttttttagacagactggaagaatccttcctttgctaagaccttattctttttctggtttgtttgaaatttttttgttgttgtggtaaaaaatacataacat

SEQ ID NO: 475459 - DNA, 882 bp, Homo sapiens
attttaagtgtagagttagatggatgttgacaaatatatgcgcccatgaccagcatctccaataagtacagaatatttttaacatctcagaaaattccctatgcccctttcttgtctccacccagagccagcggcagcaacctgcgtgggtccctcaccttgtgggatctttgttcttttgctcttcacaataaatctccttgctgctcactgtttgtgtcagtgtcatctttaagagctgtaacactcaccaggaagatggagtctcgctctggcatccaggctggagtgcggtgtcgcgatctcggctcactgcaacctccgcctctcgcgttaaagcagttctccagcctcagtctcccaagcagctgggattataggcgcctgccaccacgctgtggcttcctttttgaagtcagcgagaccacgaacccaccggcaggaaccaactccagacacactttgaccgtgaagttggacggactagcgaagatccggactgctcgggaagctccatccgaatgtgtctgccccccaggtaagtgaaggttgagctcccttctggctcctgcgttcggccgccgtttgcttgggattgctgagaacagcatggtccggaaggtggactggggtgtcaggctgtcgtcttcgtgcactggcctggggcctttctttcccacattgaccctggcaggctctctggtcggtttccagcaaagtaaacggactcggtttgctgggtggtattggtggaggagctaagacattgtcggagatgacttagctgcctgaagatttagatggtagggaagtagcagctggcccatttcaaagatggagaaaggggtgtgaactgatgggaggtgacagcctggaacccca

SEQ ID NO: 475460 - DNA, 675 bp, Homo sapiens
ctgccggttaagatgacctttagcacttggactagtaccctgcatgaaagttcatttcaaggcaaacagaacaatattcttggaatgggaggaaaaagcttcgagtttgaacagcctggccagaggctcttgatccccaagagaggccaggagatggcagagctgctggccgtgatgggatcctgtgggccgggacatcaggccgactggatgtggagtccaattactccccgctccctcctcccacctccctgtgctgtgttgctggtagatgctgcttctttgaagaccatgccatgtgtttccattttcttcatggggcttaactcagtgaagggcatcagaggtgatcagcaaacatgggttgattctctggttgttgacataggaatttgctttcctgtggaaggagcctggcctctctgccctggatctgccggacattgtctggctgagagcagagggtggttagagctgtgctctcttcagcgctatgctccttctcctccaccttttctgctgcccgcccaggcttgggaggaacagctggtcaccttcaagctgtctgtgtgtcctccctatggttttggtctttcaggctctgtgaagggtgaccgggtcctggaactcagtgtgccccagtcacgctttacagtgtgacatgctttacagtgc

SEQ ID NO: 475461 - DNA, 581 bp, Homo sapiens
gaaatggtgttcacataggaacacgtgagcagttcaggaggtgttgctcagctcctgtgttggtgatctgtataggatggtgttcagtacaggatggctctcggagaagtttgatcatctgaagccttcttctctcaacttatcaaagtcattctccgtccagctttgttccgttgctggaccctcagctgcaggtctgttggagtttgctgtaggtccaccccagaccctgtttgcctgggtatcagcagcagaagctgcagaacagcgaatattgctgaacagcaaatgttgctgcctgattgttcctctggaagtttcgtctcagaggggtacccagccgtcctcactgccaccctgcagttggatctcagactgctgtgctagcaatgagtgggaccctccgagccaggaaagggaattccctgaccccttgggcttcccgggtgaggtgatgcctcaccctgcttcggctcatgctcggtgggctgtacccactgtcctgcatccactgtctgacaagccccagtgagaggaacccagtacctcagttggaaatgcagaaatcacccatcttctgc

SEQ ID NO: 475462 - DNA, 661 bp, Homo sapiens
tggctttacagaactgactttacccgatgggaggacatggcgtagggtgggccgccatctgtgttgttttgcagccttagccattgttgcttttggcctctagggcgtctgagatgactagggactggagctgttcctcggcacagtccagcagctctaaggtgaagcagtcagactggtttttcatgcagatgctgaatcccatttctattcactgggtggaatctcccaaccggggtctccagtcatttccactggtgcctgagtctccagccaacccacactggggcaagccagtagaagctctgaaactccctgagacagagctcccagtgggaggcatgggttgccatctttgttgtcttgcagccctcacccttgctgtctccagactctggagagtctgtgaggaccaggggctggtctggacccccagcagagagcaaccacctcacagaaaactgtccacattgttctccatgcaggtcctggtcctcacttctccccactgggcagggccacccacctgggactccagtacaaccaccttgcccctgcctgatcactgcagtcagaggcagcccagcatttctccaaggaggaaattccagagtcaacccacaacctcttcaccactacagttgtagtggtactgacctaa

SEQ ID NO: 475463 - DNA, 580 bp, Homo sapiens
tttctcctccttttcctcctcctcctcagcctattcaatgtggagagaatgaggataaagacctttatgaacatctacttccacttaattataattatatcctaccttgaggcagaacagctcctgaatagcaacatcactggaaccacattgatatcccccatctgcagctgccaccactgctggccactgccactgggaccaaagcataagccactggcagtgaccccaatacctccagcaccaggatggtcatacatttgcatattccctgaggacaggctcccctgctcacagctgctgctgactgctgccaccagtggtggagtggaagccactgacagcaaccccactgctcccagccctccacagcaggacagccacagagcacttgccctgagtgtaggctccctgactccacgcctaccactgctgccctcacttgagcactctgccaaggccctgggggtcacccagtccctgctcaccacagcccagtgcttgtatgcaccaccaggtgcttgaggacaggcctgcccagctgagcttcacactccatagcacctaagcatgccatttc

SEQ ID NO: 475464 - DNA, 1760 bp, Homo sapiens
gaggtccctcacacggtgacatttgtcacatcgtcttcagagcaacttttggatcatgaggaggaaagggtaccttcccattgttgcagagcgaaaccgaggccgggcctggctggcaccggcatggagctgggctggctcagggcatcacagaggcctcacctgcatctaagtcaatgcggcccacctgaaaactctaagtgtgcggcttcactgcccttagagaaggcttccagctccaccactgcaagtacagctcctaaaagaggacagcgaatgaagaaacgcccagggacacgtataggcaaaagcacaaatcctccttccatcctggactgctcagcagctatcctcaagaagatgcgctcagccgggggcctcgaagctgagcccctcccgggcttccctgatgcctgccccgcaaccagctcccctctctggcctcgcctttcctacctcggccttcttaaggcctcagtgcaaacgctggacctgaccctctgtgactggaaccgcacagctccgctctgtttggagcgtggccatgtgcgtgctcggcttgtgttgagcgcagtgtgaacacagaggctcctccacccgtggctccaaatggccctgttttgtcccctaatcacaccctgatatcttctgaggtctgcaaaatttcagaagacagagaccccggacactctagagaattccctcccgggaccacggaatagtgttatatttgcaaatagctataaatgaatattatctgctcagtttccttatttgcagactgaagttcaaaaaataggtagttatgacaggtgctaatttggaagtgtgtcggatactcaatacattcttatttgattgaaaagtattcgcttgaaaattaaaaaaaaaaccttgggagaattatatatccattgttgttgattctgaaaaacttagattgttctaagagtttagtaactctagggaacaagtaagatgtgccagcatcgcagaaacatctatcagatcaaccagagttctccagagaagtaaatccaatagaatgtgtgtgtgtgtgtgtctgtgtatatgtttgtgtgtgtgtatacatatacacacacacacacacacgtctgttacacaccacataacaaggtcttggtgagcaacagtccatatatatgacagtagtcccataagattatactactatatttttacatattttttctatgtttaaatatatttagtttaatatatatattccatgtttaaatatatttgtataaatatatatttatacaaatacctaccattgtgttacaattgcctgcagcactcaggacagtcacatgctacactggattgtagcctaggagtcctagattaaattatacagcctagaggtgtagtaggctgtaccatttaggttgtctaagtgcactctctgatgttggcataaagataaaatcgcaatgcacatttctcagaaaacattccagtcatttatatttatatatataattatacatatatgtatatatgtatatatgtttatatatttatatatacatttttatatatgtttacctatagtatatattatatgtgtacatgtatatgtagtatatatatctgtgtgtatgtgtgggtgcatttagtttgctctaaactaaatcttagaaatgtaacaaattaggcttaatctctgccttcaaaggtgaaaatcacctgaacccaaaggcagtggagtgaggtcatgctggaggggtggggac

SEQ ID NO: 475465 - DNA, 889 bp, Homo sapiens
catgtgaatgtgtgagtgtatgagtgtgtgtttgtaagtgtgagagagaaagagtgtgtgtgtatatgtgtgtgtgtgttttgtgctggcctgcaccagccatgctgctccacgagaagggagtggtcccagctctgtgccccccactcaccgcccaatccaaaggtgtctgcagcatcacacgctctcccaccccagctcccggttccaggagggcagtgacccacagaccttgcctggagaagggtacctgcctggtgaggctgagcacaggctcctgtggcccctgagctgcacttggtgctgatgcaggaattgctacagctctgggcaatgcaggtgcgatgctttcacagagcactgtggcctctcacccaaggcctggaagtgccacggcagattccagggtcatcactgaggtggagctgtatgatatcagacagacccaagacctggccaagccagggaacagcaccaggtgcttccctcctacccctaaagatgccaactggtccacgaagaaggggacagccaaagccaggcgggctctgtctgagcgctgccaccacctcgtcccagggagtgcatcatgttctatgccagggaccaacagctcagctgtcgaggcggacaacatgaacacctccccacgccaagggcggcggtgggtgattgtgctaccctgcctgggaaaccacactttttccacggatcagtgcaaacgtggatctggagatcccccttgtgagcccacgacaccagggccttgggtctcaggcacagagctgtgcagattctaggcagccactcagctgaagattgcctaagactaccaagttcccagggggaggagcagccgccatcactggggatggctgctgcctaagac

SEQ ID NO: 475466 - DNA, 2514 bp, Homo sapiens
gaatatttgggggagaagcaaaagaagaaaaagatgaaggggaagaaggagaagaaggagaagaaaaaggagaaggagaaggagaagaagaagaagaaaagaagaagaagaagaagaaaaaggaggaggaggaggagaaggaggagaagaaggagggagaagaagagggaagaagaagaaaagaaggaggaggaggagaagaggaagagggaggaggaggaggagtggaggaagagggggaggaggaaggagaaaagaagaagaagaagaagaagaagaagaggaggaggaggaggacaaggaggagaagaaggagggagaagaagagggaagaagaagaagaaaagaaggaggaggaggagaagaggaagagggaggaggaggagtggaggaagagggggaggagaagaagaaaagaagaagaaggaggaggaggagaaggaggagaagaaggagaagaaaaaggagaatgagaagaagaagaagaaaaaggagaggaggaggagaaggaagagaagaaggagggagaagaagagggaagaagaagaaaacaaggaggaggaggagaaaagaaggatgaggagaagaggaagaggaagagggaggaggaggagaagaagaaaagaaggaggaggaggagaaggagaagaagagggaagaagaagaaaagaaggaggaggaggagaaaagaagaaggaggaggagaagaggaagagggaggaggaggagtggaggaaggggggaggaggagaagaaaagaagaagaaggaggaggaggagaaacagaacattttactagcagcatcgtttcaaaactattatcagaatatatataaggtaaaatttctcagtttaattattcttaaccacgtacaattctgtgacattaagtactttcccatttctgtactttcgccatcaccacgacccacctctagaacttctttcatcctctccacctaaaaccctgcacccattaagcattatctccccctcccctacccctgcctttgctacccacccttccactttgtctctgaattgacttctctggggacctcatacaagtggaatcaggcagtatttatctttttatgcctatcttatttcactggacacagtatcttcaaagttcatccatgttgtggcatgtgtcagaacttccttactgttgaaggctgactacagttccatcacatggacgtgccacgtttgttgatctgttcgtgcatcgccacatgcttgggttgcctccctgtcttagcccctgggaataacgctgttggaatgtggataaacacctgtttggggccctctttcaatcctttcaattatttgtgggtatacccacaattagaatggtaatttcatcttgaatgttctaagaatctcccatactgtattcgacaggggctgtgccatcttacattcccaccatccgagccattaccatcgatttaaaatacatgtgcaaatggcaacaggacgggccttcataagatcacacagcaatagaaaggtggctcctcacccactgcaaggctctggagttgaggggatgcagcaggaaatgggaatataaggggtaatataactaaatcaacaaggggtggagggcttcccccgacaagtgaaaatgatgggtcaaaagctgacgagtttgagtaatggaacactctgcactgccagaaattcaaaaccagaattgactcttttcatttcagaaatgttaatacctctgtctccctcttcttcatagcaaaagtaatcattagttaacaaattattttgcttggatacgtttctattttctcgttaggtttctggatttttttgaaatttgattcagctaacctaggcagatgcagaagagtccaaggaggaagacactgtcccccctgcagagcgctcagagccagcagtgtccccacgaggagctaccatcccaagtcgtccgcagtacccacacttttcatctgcgcaaaaagagacttggagagctcgtcctctgaaaaactatacagtcaagtgattcattattggcacaagaataaacgagttctctagaaaaatatttaaacagttatttctacctttggacattttcaaattgtctctgtacatattgtcaggtgaaaaaagcatgatggcagctaggaaaaaaaaatggtagaaagcaaccaatcaccaataaagtttcaaattaagcaacttacttggcagtattccttcctttccaaatcctaaactgttccctgcttcatacagctatggcttttggaggaggcctggaaagcattcatgaggaaggctggtaaaacaataatttgtttatgtggacattttctccagaacggtgcactggggaaacatctccaaaattaaatagtagaaaagcaacggcagctcatttgtttctttttctcctgcagatgcatgtccagcacaaatcgctaccatttatgatttatgtggcagttctggagctgacaggccagtggactgactccagaa

SEQ ID NO: 475467 - DNA, 756 bp, Homo sapiens
ctctttcctgatgcatgagcttcctgtggctgctggaactaaccatgctctgggcggacaaaaacaacagaagtgcatcccctcgcacttctgcaggctggaagtccagagccaaggtgtccactgggttgggcctccttccaaaggctccagaaagggcgctttcttgcctcttccagcctctggtggcccccgtgatcctgggcttgcagccagttctatccctgcctccctcttcaccctgccttctctgctgccttacacccaagaatctgatctgcaggtctgtgatgtggcccaggaatctgcattgtcaagatttccccagctgattctgtctcaagattctcagtggcagctggagcagcagggagaggtcacttttatcatctggctgggggcagaagcttccaggctagagacctcggatgctggctatgcctcccggagcagaaggagagcaatggcatgaaagaggaggaaacagcagcaggagggcatcaaattgcgaacatcaaattgcagaagccagctcttgacagaaaggggcttgttaatacttaatttgctttgcactaaaacataggcatccttataaatgttaactggatactgtaagtacaatgcgttaacctgttacagaaacagacttgtggaaggaaactattttctccgctacttgccaaacacatttaactgggccatagagccctctaaaagcacgtacgagtcagagaatgattctgccattgggac

SEQ ID NO: 475468 - DNA, 4880 bp, Homo sapiens
gaagccacgtgctcgtggtcagtgtcagtgggtgtgctgctgaagctcccagagctaaggggatgaggagtaccggtcccagaatgtaggggaacaaaccagcaccttctccctgattttgagaatgcccactcacatgcatgagtcaaacttggaaacttagacaggcccatctccaggagtgaaggaaggaatcttgaggatttctaattgatatcatcgtccccaaaatatcccaaatgaaaatcaagttctcgccctggatgaaaatcaagttctcgccctggatgaaaatcaagttctcgccatggataaaaatcaagttctcgccatggataaaaatcaagttctcgccctggatgaaaatcaagttctcgccatggataaaaatcaagttctcgccctggatgaaaatcaagttcttgccctggatgaaaatcaagttcttgccatggataaaaatcaagttctcgccatggatgaaaatcaagttctcgccatggataaaaatcaagttctcgccatggatagaaatcaagttctcaccctggatgaaaatcaagttctcgccatggttggagacacagcttccagacacattctctaatcttctgcccgcagccccagcacagagatttcagaaatggtgcttgttatccaccagctcaatccgagactgaccacccaactcctcacaggagcaaaaggcatgcagacctagggaaaggttctcccatcgcccctctgaggaccaaggtgccctcaccagcagggaaatgtgagctccgattttcactgattcatctgctgcgtacttcacattgaaaaccttgtttttgctatagctcttggtatgtatgttttgtttatgccaagaccataatgataaactgcaacaattatccatttgtagttacaaagaccctattttatattatttgtttagctggctattaatactgggcttttcattagaaaaaaaactaaacaaattctggttgactgtagtggacacaagtatgtgaagctttctaatcttaaagaagtctgttatcaatgcaacaatgacattttcgattgaaaaatcaattttttcctttcactccttttaacctctgtgccatcttcattccttcccagcatccagataacataactcaccatgaaagccagacagaaacagccctgggcgtgtctatgggaaactcacatgcatctcctctgcagaaggactcatttccctccagctactgggctttccccaatcatacgtttcaactccccttataagtccttacaattcctgggggaaaaaaagtcgagttgtttctgttaataatgcaagaaggcgtgaatgccaaccgggcagttctggaaaagaagtgttatggctcaattaaccagacgccgtactcagcctgaatacaagctgacgggtgcagcccagggtgctggaagcccactctggccccgcgagtgaagcctgcatcatcagagccttctgtgcttcgcaaagctccagaccctcatttcctttcctgagactgacctagaaggaatttgtgtggtcagtaaaggggttaagaccgaaggccctggagccgctgggtggatgccagtgagcacagaagagatgctccccgaggactgaagatactttccatgcattactgggtgctctgcccacagacggcacagcctcaacctctctgggaatctcctggtttgagaatgcctcccccaagatcacacatccactgcggcagcccacagccaatcccaggttagtgtgtgggtaacaaagccccctcaccagccccacgagcacagcccaggctcccgtgaggctggcggcatcccgcgtggagactgcatcccagcaaggtgcctgccctccacccttcctcccacaggcgttcctgcacggagctctcctgctgagcttcctgcatgctcacctccttcccagcatctgcttcccgggaacaggttgagcttaactttaccctctgcaaacgcatggcctgggcacgtcttgtaacttcacctcggtttcctcacctgtaaagctgtaaagccaggatcgtcacagtgcccacctcttaagactgcggtcctgatgcaggccaggtgcttgtagctcttcccaggacgcaggtctttgtagctacaagtggataattgttgcagtttatcattatggtcttggcataaacaaaacatacataccaagagctatagcaaaagcaaagttttcaatgtgaagaaggcaccagctgaatcagtgcaaatcagaactcacgccttcccctgatcccattcagaatctattagcgttgattcaggctcctatcacaaaactaccataaactgggtggcttcaacaataatcatttatttcctcacattcccggaggctgggggcggctctcaggtccaggccccggtagtgtctggtgagggccgcttgctggttcatggaccacacctcaggccgcagtctcacctggctctaccctaatggccgtgtcacctcccaaagatgctacctcctaaaccatcgcttatattatttcagcagaggaatttggggggagacacaaacattccatgaataataatcagttattactcatatgattgtagcatggcttgagcaggtaatttcagtaaagggctgatttttctcccatttgtgaaatggatacttcatgctcttctttgtaaaccacagtgaaaagtttatgtgttttgttttgttttgttttatggcaagaagcagccgtcaacggaagctcataatcacagcaataaagtgatatggtttatacttttaaaagccttccctggctgccttccccatccagtaaaagttcggtggcttttccaattatccaggtaagagaaggtggtgggttgggccagggcagtggttgcagaaatggtcaggagtggtggattcaagagagaccccggaggtggcgcacacaggacttgctgatggacaggccagggaatgagaggagaagaatgaggaatggccccaggtcttcagtctgagcacctggaagcagaggtcctgttcatttgaagagtaggaggggtgtgggacaggcttgtggtggaggtcaggacacctttggcctagagggcccttggacgccctgcgtggagccctgcacagggcagctggcaaggccagtgtctggctctggagccatctgaacgtggatgctgctcagagtcacctaggggatgagtcacccgggagagagtaaggagcggtgagaaggtgaaccttgcaccctacagaattagagggcaggaggagccaggagaggcagctggaggtagatggccagtgagcgggaaggacagctagggtgtaggcaagcccagaagccacatctaaatcatgctttcccgctacggggccagagaggccaagtgtgccagatgcgatggagaagctgagtcaggagaagaggcgccacacaccgtcggatctgcagaaatgaaggtctcggtgagcatggcggctgcaggtccaggtccggcggacaggccaggagtgcagcacccgaaagggagtggaggagaggtggagagatgagaccttggggtcctggataactttccagagatagttttaatgaagagtccattgaaaggggacacaggatcatgacaggggcgttgctgtgctggtttgttttagaggagagatactagaatgggtaaaaatgatcccagagagagaaatacataaataaacctgagaaagcagaaaagaaaggctgcacagaacaaagccaagtcttaggggatagaagggcataagacccgccgcaggaaggcagggtcctgacttagcacagagacacttcctctgctgtgatattaacaggagcaggtcaggaatatgggctggctcttgtctggctctggtggtcagctgggcatgaggagcttgcagccttcgagagggaggggaagaggaaagtggttatattgataagagagggaatccgggaggcactaacacagtggaccatccttcagtctcagcaatgccaccactagctggccatggttttgaaggttccaggaggagctgagtcctaagtgtgtcctttcttactctgcatatgtctgtagggaggacggctagattcccaggtgtaggtgggtccctagtaggtttgagccttgttgagcattccgaagatgtttacccagcctcatcaaatctcagagatggaaggggacggtcagcagacaccgtggtcagtgcctccctcatcctctctggctgtccccacccagccctgctccagtgacactcaccgcttcctgtaggcaaagccctcggaccatcccagaatctaacgtaagatgctaccatccctggcttccatgacaaattcaacatggaatgggatctagtctgggtcactgggacccaagaaaagaactgctgtgaggcttgtgggaaaggttctcttgcatctaagaaacaaagaggtcaggactctcttccttgaaggtgagatcacaggcatatggtccctggaactaatgagtcttcctgtgaccttgatgtgttcttgaggggacacatgtctcctcccacctggagaaagatggcacatccgaactctggcagccgcatggagatgttcaccaggccaggacactcctgccttagaggacggcctcgtgggagggtgaatgcagacagcatttcagagattccagactggcatctccttactgtagcacaggacacactgatggctggggtcactgctcagaacttgttctcatctcattgtacatattgtaagagtccttcttgtaaagtatatgcattggtgttt

SEQ ID NO: 475469 - DNA, 467 bp, Homo sapiens
gcttgatataactcctctttggaagatctgatggtttcatattccaatgaacggttatgaaaccatcgacgaggtgtgcatcactgggccagttccaggttccgttgcatggctccccttggtaagcagcagtgtttccacataccccctttctctgcagcatgctgtgccatctgtgcttttaacagaatgtatcccaccgacccccacacctataggtatttcctgggcccgtgtgagaggtgggcccggacagatggtgagaggcagtggccgtgtgcatcctgaggtcacgttgcacaaagctgagccccacctggcaccagggtgccatccaattggacctctcttcctgctattctggagactccaaataaagcagaaaataatatttatggaaaatgtttcctcagaaatgttggcctctctggcaggttggtttctctcctgatgctagtgggagaatc

SEQ ID NO: 475470 - DNA, 816 bp, Homo sapiens
gaacacgtaacaggacactgttcactcatgttaccagcactcacgagcagtcggctcatgagcaccgactcattaggtcggtggtgcaactgctgtcgtgacagcaaaattcattccgcatttgctctgtggagggaccgtgcttgttgttttgaaaatgtgcggtctccacatggcccacgtttgcagggtctgggagtggcttttgtggctctgagcactggaagcctcaggctcattctgctgaaactgccacggagagctggaattgaagctgatagagacggtcccggacttgagatgagccccaggcaccgagtcaactttggatccctgcccttgcatcctctttgggacaggcacctctttgatctcagcaaagacatgctcacagggaaaaagtcatgtgagcaggagaaaagagataaggagaacgagctgacaagcccaggaactccaggatcctggtatcagcaaggcacccaaaggccagccacagtgctcagaaccatcaaccctgctgacaccttggccacagacttctggcttccagaactgacacattcttgttggattcaggcctcctctactccactgtggtcccatcgtcactgattacatcttcaaggcccttatttccagaagatgtaaaataatttcatacacagttttgtcattctcctagaacatgctttccagaggcttgtccattgagtcttggaggatgatatacgatgtttgttgagctcacattatatgccaattactgtgctgagtagttcagggagattatgtcaaatggtgcaataaaagaac

SEQ ID NO: 475471 - DNA, 905 bp, Homo sapiens
ggcggctagcgttaccaggcaccatgttcggaacaacccttagagcccttcgcctgagtcccccaggagtctggggacccctgcattgacatgcagctcctaacatctgcagtgattgcccatcctttgttccatggactctttgcttttcctctcctgctgatccccatggatgacacagcctcacgttgtccaagtgctacaggcaagatccagtctagcctttcagatttgtttcattaccgagtcacagtaccctctcagagaggactgccacaaagtgcttctaaattcgcactcccccgtgaatctatatctccctgtggccctagtttgatctgtccacgttggaaacgccaagggtacccggtcagaaccctctgcctcaaggcaattgtgcttcgactcagcagaggggagccttctgtctccaggacacctggagtcctgctcctcctcaccatacctggaccagctgactctgctcaccgcctggctctcaccttctccgtagaaagtaccgaggggacagaagaacctactccttccatgattgacccaggtatccatggtgaggagacagagccatgtgcagcttctccacagcaaatcttcatttcactccacctaggaagcacagccttgggagaagtaaaacctccaaaatcctgtcaaggagaggtggactggtggctgaaaggccctgctctacatattaagaggctatgggatgtagcggtgcaggtggcagctcctgaggccatggaggggcctccgatgccaggccggcccgtgggcaatagccctgctctgctgacctcggctcccaagctcctgaaagcgagagggtaaaacccacaggagtattgacacccagtcaggttaataggaagggatgtaaatga

SEQ ID NO: 475472 - DNA, 1032 bp, Homo sapiens
tgaatagataaacttatgtcatgggggtttgttatacacattatttcatcacccaggagagtgcctcccagcaacaggacgctgcttggaggatgatgagagcatcggggagctctcctgaagaaagagcttttgagtccaggcaacattcatttgcacaacgagcgcactttgaaagactccagcgcaggcctgtgttcctggccgcaacaaaacacctgcttgaagcggagacaaaatgccaagctggagagagttcaaaagaacagggtgacaatcacacagtgttgaacaacagcaacggcaacccatcactacagccttttgtccgtggctgcttgattgggaaaggccctggctcggcacggctcggtgacgtttctagcagtgcattgaccttttctgttgaatcaagaccaaatcatgatgggttgaaaagacgtgtcaggtccaattcagacatactgaaccacacattcagagccagaaaacataaagagttccattgcccggggacaatccaattgacctattttttgtggcttttctttgcttctgcccatgcctggaggcacctagacagcccttatacactgaatgatggtccactgtttggatgtaccagagtttatatatccactcacctactgaaggacattgtgattgcttccagttttggcaaccataaacaaaactccatgtacaggttttgtttatcccggcatcatttgttgaaaagactgtttgcttgcttgtattgtcttggctcccctgtcaaagattaattgattataattatgtgggttgacttctaggttctctattgcattcccttgatctatttatttattctttcaccaatatgacactatcctgattactgtagttttataagtggaacatctattgtcaaatgcataatatagcattagaaatgcaaacttgctgtagccaatggtaatgtgttatttaaaacttatgaacccaaatgagggcttattttctccaaattgaaatttatagtttcatttt

SEQ ID NO: 475473 - DNA, 551 bp, Homo sapiens
gtttgtttaagtatctgttttggctaagatgaataatgctgctgtgatcattgatggacacgtttctgtgtggacagaagatcagaagcagcagattaaagctgccccagaccatcactatggaaagaagcaaggaggctgcttaatactgatgaaagggcagaaagaaaataaagtagcgtatgaatttggggaaaaaaaatatcaaagggcaagtagagtcatggatataggtccatccacatacctcttcgtcaaatttctttgtcaccaattttctaatcatacttcttccaagtccctgaccatccagccaaaccattggctacagcccatgaatcagtgtataattgtacatctggccatttctccttccatgcaaagggcacaacctgttgcactgctggaagttctgcccactgggaagatttggcttcatcactatccttcagttatgtcctggaaagggaccgtagtgctgcagctgtccactttcaggtggtgcctgcatatcctgcagaaccatttgtgaaccaggcctcagtcttctc

SEQ ID NO: 475474 - DNA, 1482 bp, Homo sapiens
gcagctcgtgctgttacaagaaaggcactggtctcccgggttcccacctccaacagctagaagagggggtgatggtaagaactgagctctcgttgcgcaaaagcatgatttgaatttctgcgttggtaggtggaaacctttgataaaatgccatgtgcgaacacgacagtgaaccttgcttgagaaatggaacaactcatcctaagcacccatcgttgcaggattcgggggtacctgaatctcagtttgccacactcgtcgacggcaggcgccaagctgatgaagacgagctgcacaactctgccaaattatgtctgatattcaatgtggaacaatttggggagtgttctgtgaccagtgtgctagtgagtgatgtctgtgaggggcaccttcctgcagatgagtggaaaaggtctgtgtgcatgggcaagaaagtttctccggagagccacgcagctgagcttggactacaagaagcatctatttctacaatcacaagaagcagcccaaaggagcttgttcaccctctactgcatgaagacacagttacaaggtgtcatctaagaggaatgaccccttgccagacactgaatctgatgatgccttgatcttggacttcgcagcctccagaattatgaaaacaaatgcttgttgtttacaagacactcaattttgtgattgcaacttgaaaggactaagacagtattgggaagttcaaaaatgtccatctgactctttttatgtactttattttttaacattctccatattttcattcatttttgttcttttctccaacatctttaacttagcatatttattttgaagactttttctgactaatctagtatctggattatgctgagtctgcttctgttgattattttgtcccttcatggtcaaacatttttttctgcttctctgtgtaatgatttctgactatgtaaactttcaaattctaaaataaaatataagtataaaattctacaaattttgatggagaaaattaaaaatatctttctgtttgatagcaaatatcttttaaacctttcttccatatgttattctattggttaattcttcttttgctgctaaaggaagtggctgtggatcaaagtactaatgcaagtgttcattgagctatttcaataataaatgaacaaattaattcattttttaatttggcaaattatttttatattcgtgttttaggtttgtaatatcacttgttattcagctaagcttttattaaatttgccaaatgtaaaatcttttaaagcttgatgataaaatttttttttagttttacagttctctaaatgttttgtcctactgaaaacaagtcacttaaatctgacccatttccactcctgatggtatttttctaatccttgctttactgcctaggtataaatttaaacagtagcttaagttcaggccaccaaggattgggataaatgcacattccactgcatgatatac

SEQ ID NO: 475475 - DNA, 1510 bp, Homo sapiens
cacccatctttggtgttctccagtgtgggagggaccgagatgaatagggcctgaaatgaacccccagcaaactgcagcagccctacaggagagggacctgactgttgaaagaaaaacaaacagaaagcaacaacaacagcatcaacaaaaagtccccacaaaaacctcatccaaaggtcagcatcctcaaagatcaaaactagacaaagtcatggagatgagaaagaatcaacgaaaaaatgctgaaaattcaaaaggccagagtgcctcttttcctctaaatgatcacaacacctcaccagcaagggcacagaactggatagaggatgagatggaaaaattgacagaagtaggcctcagaaagtgggtaataacaaacttggctgagctaaaggagcatgctctaacccaatgcaaagaagctaagaaacatgataaaaggttacaggagctgctaactaaaatgtctcatttaaaggggaacataaatgacctgatggtgctgaaaaacacagcacaagaaattttgatgcaaacgcaataaaacagtggactttttatattgacctgtatccccaaacatgctatactgtcttatcaattctagattttctttctgtagattcttttctacacaaacactcacagaacctgtgaaaaaagatagctttatttcacctatccaatctgtgtagattttatctattttttccttgttttactacactaaccaggacatctggttgatgttaactaggattagatagtgtgtctttagtggcatgacatttttaatcatttaagtacagctttttccaaaataactattaatttggaaataaatccttatgtattataaaaaattgtgtctatattcaaattagggttaaagtcaaagaaattttaaatattgatcttttactgtgctaagaaatgaaataagattatggtctttatcatttattttatatagcctacttacaagtattagaataaatgtcttttttttaaattttactattgtaaaattacacccattcacttatgctaaggcagagatagatttctgatagctatgtgatttaaatcttatttgttaaaaataccccttatgagttatatccagtgaaatttgtccttatgtgctgtatttatgctggcataagctgtggtatatttttatgaagtttaaaataatttcatcttcttagttttcttttcctacatgaattataaaatagaaataaaaaagtagaaaaggaaagatttactggggaaaaaatgcaattcaagtatgattgctctaaatatacaaattttctttgaccagtaaatgttggcaacataatttttttaacattatactctaaaagaaatcaattcttgcaatttaaaaataaggttatttctatgaattttaaaaattaaactgttttctgtgtttttgtctcctctgtgttgtcagtctttaatgacaaaaacagtcttattttgtaacatctctgctttt

SEQ ID NO: 475476 - DNA, 537 bp, Homo sapiens
agtacacagaatgagcccagcagacccaagcaaaactcaggcaaaggagtttctggccacaggtttccagccagaaaagcgacattccaaagattccataacattatggttagctctgatcaattatattaaatctctcttcaattccataaaggctcagagaggtgaggaaactgcagaaggaaagtttgaagctagtggaggttggttcatgaggtttaaggaaagaagccgtctttatagcataaaggcacaaattgaagcagcaagtgttgatggagaagctgtggcaagttatccagaatatatagctaagatcattgatgaaggtggctacactaaacagcgcatcttcaacgaagatgaaatagccttctcttggaagaaaatgacaagtaggactttcatagctagagaggaggttaatgccggtcctttgaagtttcaaaacttcaaaggacaggctgactatcttgttagaggcttatgcagttggtggttaagttgaagccaatgctcacttaccatttcagaaat

SEQ ID NO: 475477 - DNA, 1631 bp, Homo sapiens
gcaggggctgtttgcccacattctcctccccagggcaaaaagaggtaaatattcgctgatgttatgaatattctggcagtgcaaataaagagggtccttcaaaatgtgctgggattccaaggagaaattggcctaaacaaagggctacaagccctgtgcaagtccaaaatccagcaggacagtcaaatcttaagccccaaaatgatctccttagacttcatgtctcacatcaaggtcacactgatgcaagacttgggttcccatggtcttgggaagctccacccctgtggctttgtagggtatagcacccctcctggctaccttcgtggcctggcattgagtctccaggtgaggtcaaatccatctcctgcgacctggacctttagctttcccagtgaggatgtgcgtttcgaggcggcagatgatctccctttcacaccttcacactttgggcactcacagttttttggctgtctccttgagcctgcagcagcaattcacttccttcaaagcgtccatggattttctcagctttcctgggatgttcctgcagtaggtcatggacctaaagttcatgatgtgcctccaccacaggctgctctgtctatccaagtaggggcttcaaattaattctgtctcctatccatcattttctcccctaattccctcaaaaagtgtatatttttctatagcagaatgttgtaagcatttagcacatgtaaatcaagtacattttcataatgagttttttcttgatttatctatttacatgatttaagatgaagcaaccgccatctaggaaggtcactcagcacttataatcttatagtatggtaatataagtttaattttttaaaaacttgagctttcaatgactgttctgtttccttttaaagttaagagtgccaaattatttgatccaggtatcatacatgcacaattactcttagtggattaggctaagatatattcatgtagataaggattagggccaataatgggcaaaagaaagtctacatattggtagtggtcaaaacaagttggagccaaacctgggtctttccagaataaaatatcagattggatttattgattcacattgataaagtcagagactgctgtaagcaccatgtgtagttccagacagagataattgtttaaacatcccttagagaaatagtaaattactaacactatatggaaagccctaagaggtacatcccagagtgttgtggcaagaggaagcttttaaagacaaaaaggaggaatccatgcaagctgttttgaaagaaagatcatttgttacaagagcttattgcaggaggtaaaatctgttcattgatggtactgattgttacttgaagagggtcttcatagaagtggtttaactaaaaattccagttagaaaagttctccttggcagcttctgtgacacacatgtatgtatgagggcgtttccttcattggctctcagctacattttgttagggtttaagttaagtgactccattttggtactggcaattttaacagtatctcattgggaggtgcaggctgcaggcatttttcataccacaccctctgtcctcaatttcaagttgcaaaggctatacaagagctagtgtggctac

SEQ ID NO: 475478 - DNA, 558 bp, Homo sapiens
gggcggtgcaagatgtgctttgttaaacagatgcttgaaggcagcatgctcgttaagagtcatcaccactccctaacctcaagtacccagggacacaaacactgcggaaggccgcaggataaaattgatagatcattagcagcattaacccagaaaataagaaagaagatccaaataagctcaattataattgaaatgggagatattacaactgataccacggaaatacaaaagatcattgaaggctactatgaacacctttacgtacctaaattagaaaacctagagaaaacggacaaattcctggaaataaaggaccctcctagattaaaccaagaagaaacagaaactctgagcagatcagtaataagcagtgagattgaaatggtaataaaaacttgccaacaaaaaagtccaggaccagatggattcacagctgaattctatcagacattcaaagaagaattggtaccaatcctagtgacactattctccaagataaagagaaaatactccctaaatcattctatgaagccaatatcatcctaatatcaaaat

SEQ ID NO: 475479 - DNA, 533 bp, Homo sapiens
gttcaccctccacttttctgcatgcctcattcttcctggatgcaggacaagaactcaggcaaagatgccactggcaacagaggtttctggccagaaaatttacaccccaaagatcccataacacttatattttattgtcataaaatattgctttttaagaatataccaaatgtatttatccattctactcttgatagatgtctagtctatttgtgttgctatgccaaaatgcctaagacaggtgttcttcctggtattgaatctgtcagacagttaagaatggccagggtggttgtgctatgctttattccttgtaaacacccactgatgtttcacaaactggcatctgaaatactttctaagagagatttactgggagccaaaaacagcaagccagtgaacccaggaaggctgtcacaaggagagcagaggatactgtatgatttctgcatcccagatttcataaaatgtccaggaaaaaattaacttgaagcaacttatatggttaagatatagcattggcagtatttacc

SEQ ID NO: 475480 - DNA, 733 bp, Homo sapiens
cctgcagctgactgttagaaagaaaactaacagaaaggacatccacaccaaaacctcatctgtacatcaccatcatcaaagaccaaaggtatataaaaccacaaagatggggagaaaccagagcagaaaagctgaaaattctaaaaatcagagcacctcttctcctccaaaagaacgcagctcctcgccagcaacggaacaaagctggatggagaatgactttgatgagttgagagaagaaggcttcagacaatcggtaataacaaacttctctgagctaaaggaggatgttcgaatccattgcaaagaagctaaaaaccttgaaaaaagattagatgaatggctaactagaataaatagggtagagaagaccttagatgacatgaatgaaacgaagcgagaagagaagtttagagaaaaaagagtaagaagaaacaaacaaagcctccaagaaatacaggactatgtgaaaagaccaaatctacgtctgattggtgtacctgaaagtgacggggagaatggaacctagttggaaaacactcttcaggatattatccaggagaacttccacaacacagtaaaggcaggccaacattcaaattcaggaaatcaagagaatgccacaaagacactcctcgagaagagcaactccaagacacatagttctcagattcaccaaagttgaaatgaaggaaaaaatgttaagggctgtcagagagaaaggtcgggttac

SEQ ID NO: 475481 - DNA, 529 bp, Homo sapiens
aagaagagaaattttggtatgcagggtatgcagaagaggcatggaggtggtggtttatgtgactttcttggggactcatctcaattaataggtcatctggtagtcgggctggcaccactgcagacagattcggcctgtagtttcctggtgggggagaattctggagggtgcttggtttgtttcaagacttggtccctggatcttctaagcaaacatacagctaacaatgcttgtaggcactctggccagaggaaaggaagcaacctggatgagattggagattatactctaagtgaagtaattcagaaatggaaaaccaaacatcatatgttctcagtgatacgtggaagctcagctatgaggacacaaaggcataagaatgatacaatggactttggggacttggtggggaaaggggcctttatggtttatgtctagaattcatggctctaagaaaaacattgaaaaagatggaaaatgaatgtttctccttggggttttaacagttttaatttaaatagagtgtcac

SEQ ID NO: 475482 - DNA, 475 bp, Homo sapiens
ggagtttgagctcacttccaacaggaaagattagtgttttgttttgtttcctgcttctaagatggtagagagcagataccaaaatcatcataccagagacatgaatctccctcatttggcatcccaggaggcctggatcagtttcactgtgaatgctccgccgctcaaccacacaagcacccttcctccaggcccaggggatactgcagaagagaacagctggaatacctctgcaggaaactgttatcctctctttggaaaggtgtcaccaaagattcacttaaagtcagcctttgcccagctcccatttctactttgttgctatgcgaatgacccagtgaccccaactcctgacattcttctccaagcccagcatcctttacagcttgtacttatatttacagagaagaagatgagggtcccaacttgcctaaatttcgtctatcttgtgatggaattaagtgttgaataaaag

SEQ ID NO: 475483 - DNA, 558 bp, Homo sapiens
gaagccttgtgagatcctgagcagagcttcagttaagtcagctaagtcagttaaggctgactcttaatgaataaaaactgagatttacatgttatggctagttttgtcaacctaggtaccatggtaccttgtgggaaacttggggaaaagctcatgtatatggatgcagaggactttgaaattcaggtcatgagagtcgagcctcatgactggcatcagtgcttttatccacgaggcctcccccacagctccctctggccctctgcccctcgcggcacaggagaagggacaagaggcctcccaaacagctccctctgcccctctgcctctgaggacacaggagaaggtaccaggagctgtaagactgtgagtcttaaaagagcaaagggtctgagagttaaaaatgatcaagttctaaacctcccagcagttccaaacgacccagcaatttcactcctgggtattgatcccagagaaatgaaaacttatgttcacacagagacctctacacaaatgttgatagcagagttatttgttataacctggatctgaaaataa

SEQ ID NO: 475484 - DNA, 595 bp, Homo sapiens
tttttcctctgggcctgcctacacagggtcaggattatcaagatgtctctaggcactaggaatttttcagatctgatcctctggattttgacagtgtctcagaatttcatttttgatcgccttgacagtttggaggattattggtcagaagttttgaagaatgtctctcaactgacttttgtctgttgtttttctcatgacaagactatggtcgtggattttggggatgaatatgacagagctgttggctataaaagctttgggtatgtgtctgtcagtacagctaatgcccactgtgacaatgccagggtcagtgtcagaacccagattctgacacttgaaaaacttagattcagagtggtgagtgctacagtccaatgccgagtatttagtcgaactggagagaacgttgattttttgcaaagactagcaccaaggctcataagccataaattatatttgccctcagtcgcattcaccacttggctcagattccagtctggaataggctaagactttgtgtatctacttctcataaagatcagctcaggctacaaaactatctgcttgttcattttcttctgcagatttcaga

SEQ ID NO: 475485 - DNA, 720 bp, Homo sapiens
gaactgctaacattcttaactgtactacttccgccttaatgcatgtctaatgaggtttgctgtcagaacacagatgtcatgaaaaccacccctaaaaccaaagtgggaaacaaaaagactcatatcaatatcgttgtcattggacatgtagatttgggcaagtacaccgctactggccatctgacctacaaatgtggtggaatcaacgaaagaaccattgaaaatattgagaatgaggccactgagatgagaaagaactccttcaagtatgcctggtgtgaatatagtaaactgtcgagtgtgaatgtagtatcatcattggtatcgctctgtggaaatttgaaatcagcagtcaatgttacaactgaagtaaagtctgttggaaggtaccatgaagctttgagtgaagctcttcctaagaacaacgtgggcttcagttttaataatgtgcctgtcaagcatgttcgttgtggcaatgttgctggtgacagcaaatatgacccaccaatggaagcatctggcttcactgctcagatgattattcggaaacttccaggctaaatcagtgttagctacacccctgtactgaattgtcacactgctcacattgctggaaagtttgctgcactgaaggaaaagattgagcactgttctggtaagaagctggaaaatgaccctgaattcttgaaatttggtgatgcttccatcattgataagatt

SEQ ID NO: 475486 - DNA, 542 bp, Homo sapiens
agtctgagtaggtgagattgccatggttggtagtgtagaagagaatgacaaactgcatagctttgccgaaaaggtctcacacattcaaactccaacttatttctgtgggcagacattaacattcagagttgaaactgtgggacagaagatacagtatggggtgtttgcagaaaaacagaatggatatgactctctgcagcaggatcaagctatatgtatgagtacaaatggtgaagtttttgttaatggaaaagaaatgactaatgagttaacttcagttacttctgtgtgcactgtcacatttgacactgaagctgtcactctaggaaccaccaataataatgaaggcaggaacttcaagcttcgaaatatactactctactccttaagaaagtgtaatccaaatacaaataatggatatcatgttgtgttgatttcgtaatagaacaaatactttagagtttggtgtatgaagattatttccagtaccgacacttgctaatgagagaaattttcatacttacacttaaaaatgttatgtg

SEQ ID NO: 475487 - DNA, 2288 bp, Homo sapiens
agcacagcagtaggctgaagggctccccaagtgtggccagagtggacgccaagccaaggaggcaccgagagacttccagtactatgttgaatagaagtggtgagagagttactctggcagccctcctcaaggacccctgtgaaacaagtcagaaatgccttccctggggacccagagagcccacagggcttttcctgctgcttcttcgacccctgtattttgcttggctctctaaattgtctcagctccaggaaataagctgttacctaaattcaactatttggaacaggtaccaacccaacagagaaaattgcattctatatagaacactggtgtattcagtttgctacagcttaaaaagtcttggtgtggaagagccaagttcaaacaatctgatcacagaaggatcagagaaaggaggagtgatggaggaagactgcgagggcctttatattggtgattactgggaaagtacgggaaatcctgttagctttcgctcttcatgtccaatggtgaaatgtactgatttctagggttctcttgtaaggtactacggtagagaattccatctagatgctatttttcttgtgttaaaagagcattccaaaatttatcagcctttaccggattcaatcaggtactccagtcaatagtaggtttggtctttttacatagtcctgtatttgtcagaggttttatttgttccttttcattctttttttctcttatcttgtcttcctgccttatatcagtaagatgttattcaaactgatattctttcttctgcttgatcaattcagctattgatacttgtgtatgtttcacgaagttcttgtgctgtgtttttcagcattatcaggtcatttaggctcctctctaagctggttattctaattagcagttcctaggcctgaaacattgctagtagtttgagagttttttctgactttgttctttttatataactgacacatttaacttttcactgaagctgttatcaatgctaagaactaactagagttcaataaatttgaggtaagtttatggtattccttttgtagttacatagactttgctctgtaacttggtagttgtgtgattatgcaaaagttactaagcctcttaaacgctcagttttattgtttcttaagtggcaataaaactaatttgcagtgttgatgtgaatactgcaaatttataatttatgtaaactgactcttgcatatattcttctttatttttctgtatttaatgtgagatcttacaggctatttaggagtattttctcaactatataaaatatgttgaatccttacatttagtgactatgagagaaaaaaatatggatattttatgaaaggacttaaaaagtttgtggaaaaatgaaatcaaaagttaaaaatagaaaattatacatatacctaatgttaaatgacgagttactgggtgtagcacaccaacatggcacatgtatacatatgtaactaacctacacattgtgcacatgtaccctaaaacttaaagtacaataaaaagaaaagaaaattaaactttatttctcaacacaatctccatcaagttgaagacacttttgtaagtgatgataccagccattttatccctaaagaactgaggatcctggaatttaaccatgtcaatgcagtattttaaaaatattaactgaagaaatatggatgccctttaaatattttttaagattagaaaacaaaaagaagtcagaagaggctaaatcagaactgtaagctgaatgcctaatgatttttcattgaaattgtggcaaaattgcccttgttcaatgagaggaatgaacaggaatgttgtcatgattgaggactgtctggtaaagattttctgagtatctttctgtttaaagctttagctaacttttctaaaacgttttaataaaaagaagatgttattattctttggctctccacacagtcaacaagcaaaataccttgagcatccccaaaatccgttgccatgatcttttctcttgactaatccacttttgcttttagtggaccatttctacctcttggtagccattgctttgattgtgctttgtcctcaggataatactggaaaagccatgctttatcttctgttatgattctctgaagaaacactttattgatcgtccttgtttaaaatttccactgaaacctctgctgttgtcagcagctgatctggggtgtaaaggttttggcacatattgagtggaaagtttgcttaatgttaatgttttagtcagaattgtgtaagct

SEQ ID NO: 475488 - DNA, 587 bp, Homo sapiens
ttggtgttttgagttaggatggccggactccaaggaaagatcatcttctcacttgatcccctttctagctctgcatccatcctgctgagaaccacctccatcactcagcccaaatgttgccttttgacctgccacgcgccctatcctctacccataaaaaccccaaacccaatgttccataagcagatgagcagaagagcatcagagccacatggcagagaaggagagaagagaaggagcatccaaacatggagaggagttcgcctggggatggttggagaggagattggctgtgggatggccaaactccaggggaagatcatcttcccactccatattctttccaatttctcatccatcccgctgagagccactctctaccactcaataaaatccccacattcaccactcatcaagtctgtttgacctgattcttcctggacagtgggcaaggacccagagtaagagtttgatatgaaagtacaattcagggaagtggccactttttattttctaattattaagtaaaataagatctactcctatccgtcttgggtatgtctttatcagcagcatgaaaatggact

SEQ ID NO: 475489 - DNA, 794 bp, Homo sapiens
ggcctcacccacgtcctgctgattgggtgtggcatttcacttaaggccagaagaggaaaagtggcttagcatggataggctcagtgtgtgggatggaagccatggaggaacagcactacaagtcagactgcaccctgggaagcttgccaaaggcaacactggtggctatggaacgtgcaagggtgaggtgctggtggaggtggagctggctggctcgttgtctgccaaggctccatgtgcaatggtggggctgccccactggtgctctccactgatcaggcagtctgccagtgcagaagctacagtgcaggcccccagggcacctaagactaccctacaagcatgcatggccagactggggccacaggagaggccagcagtccaaggggtgctcaggtcagaccagtcccgtctgacaggcaagaccaccctacagagttcagatccaacagttccgctaggatcaaagtctcctatgggagcaaattgagcctagggcaatagctcagtggaagaaataatagaatgtttataagcttgcttattggaaaaattggtgtgtatgtgagtgagtgtgtgtgtgtgtgagagagagagagagagagagagagagagagagagagagaggaatggttattcctacaaagcaaatagagccagagaagtaaatgctatttccaacactatacatattcccctaacataatcaagtaagccagtacccaaccatgaaagttatattgatttggacagttttttaaacagtaagttaaaaaaaaaagtagtgtcttccc

SEQ ID NO: 475490 - DNA, 690 bp, Homo sapiens
ctgaattagtgtcattagtactctactgcaatcttgcgatgcattctgtgaactactatgggagaaaatgttctgagttgcaaatctatgagaggagtcttagaaaaggtggaggaaggagggagaaggagggtaagaaaacgaggagagaaaggtgaaacaggagaaagggagactggcaggataggaaagtttattgtcgaagaggtcttttccccacttagacttgaagtactacagggcacgtccatcagctgtgctgaaaaggctgtaatcaaggaggaccttcagggtgaatggactgctccagctggtgagttcactgcttcccagctcaaggtagcagatgaatctgaaggcttgtactatgtcccctacccctaccagggagagcaaaagttagccaatgaagacaacagctttagatcctttatcagccttgcgatgataccagagaaattcatattaccaagctttactaactaacttttatctgccattcgtttgccttcccttcaatttgctgcctgtaaagactccaagcccttttcctttgttttctcacttctctaaaaatgtactgttctttgctgaagatgctgtataagctggaatttaaatcagctcttagagaactgctcattctcgactatctcttgtgtttacatgagatatacatgttaataaact

SEQ ID NO: 475491 - DNA, 1644 bp, Homo sapiens
ccaacatttccctgtctgaaaatcacagagatgtcagtagtaagatttgaccaagaggagtcagaagctggcccaagggaaatgaaaactctgaaatctagaggaaagcaaggcaagaagtggaaggagcagacaggcatcaagcccaccaaggcaaattgtagaattgttattggaagcatttgtattgggcatgctaatgctagaggtagcccttcacttaaaattaaccacctaacagatttccttccgaagaccaaagagacgcagcaagaggaaaacagtcaaagcaaagaagctggctcgggtctgagctgtgtaattccgcccttgaccacccgtgtcattgcagcccacagatccttgaatggtgcttgccagaaatctgcattgaggggagcaacatctgcaagtagcaagagactcgcatttcctttgtgtgtgaacgctgcacagaccttaaaggctaaactggatctaccgcagtgtcctggctgctcccttttcttctgtccaatcttctacccatggaacttgggaaactctattgtcactttcttccgaggaggatgcagccctcaccagacaactgaacctgctggcaccttgatcttgaacttggcagcctccagaacagtgagaaaataagttgctgttctttacaaattacccagtctgtagtattttattatagcaaccaaaacagactaagacatctgtgcagtcagggtcatcacaagatgtttctgttgaaaatttcttttgttgtaaaatatccctgggaccattgggcgagaactgaaaataaaggtaggaaattataattcatttcatatactattgagaatgttagcaagtgtatcctgactttgtaaggcagttctgcatatttttagatcaaacattaatctgaaattatggaatgatttctcacaaaagatactaagtcaacattcatagcacattaaaaaaataaaaatggaagcttgaatgttagtgacttctgaaatggcagcaaatggatcttcagtttactccttggttatagacaacttagggccatacttcttcatatgctgaatgtagtttgtgtatattgactcaaactatcattggtttctttcactaataagtaggtaatattactaatattggcagtcaaaacctaggtgattgaagcgtttacatcatagctcaataatcttaggaaacctcattatattacatatcaaattaaaagttttgttattttcaacttgaatttataacttaaaggtatttaagatattaatacattgccaaggtacgtcactggattaagccaactgaaattgtggaaatgatacttaccagaatgaccatgatcatgaaagaatgttttcattatttactactcatttcaaacaatttttgtgagtaccattctgattgattggctgcttccatacttcaggatggatgtacagtctttgttgttggtttttgttttgcataatccctaaaaagcatatattaaatggttttggttttatcctcttcttaatctcaccaatgtgttcagtactaaaatgtacattagaaggcatacattgttgagtaaaacaaataaaacaagagtaaggacttgtaatagtctgttcttgc

SEQ ID NO: 475492 - DNA, 654 bp, Homo sapiens
aggggtggaatgatatggtttggctgtgtccccacccaaatctcatcttgaattcccatgtgttgtgggagggacctgctgggagtcagaccatccaagctgtcaggggttccctgagtagttgtttaaaggtcttttcattctccaagagagtctcctatatcacttgttccccttttgctgcagttgttgagcttttgctttcctctgcattagagagaatttatttctgtctcatgaaaatgaaatctgatgttcgtgatcctgggtatctatgggaaccccatgatatcatcatgcaccttggtgccctccagctcacttccaagccaccatgggagtaccgcccttaccgacatagttcagaatggctgctccagctccagcttctacacctgcactccaggaagcaggagaaaggaaaaggtggagaaatgtgtggacagattcacaaacagtgtctagaacacatggtggcctcccagtgttaacaagaaatgtctgaatcgcttgtaaacatcatcaaataatgtgaagatttgtcattttgattgctggttcttaagactgtggttaaaataatcttgttgactatggacctgctagattggaaggtgagatgctgtgacctgaccttatttgctgttgtgtcac

SEQ ID NO: 475493 - DNA, 1566 bp, Homo sapiens
gctcacctctggaagctctgcaaacaaagcggctgaaaagctcaactgggtggagcccaccgcggctcaaggaggcctgcctgcctctgtagaatccacctctgggagcagggcatagctgaacaaaagacagcagaaacttctgcagacttaaatgtccctgtctgacaactttgaagagagtagttgttctcccagcatggaggttgagatctgagaactgacagactgcctcctcaagtgggtccctgacccccgagtagcctaagaggcacctcccagtaggggccgactgacacctcatacagccgggtgcccctctgagatgaagcttccagaggaaggatcaggcagcaacatttgccattctgcaatatttgctgttctgcagcctctgctggtgatacccaggcaaagagggtctggagtggacctccagcaaactccaacagacctgcagctgaaggacctgttagaaggaaaactaacaaacagaaaagacttccacaccaaaaccccatctgtatgtcactatcatcaaagaccaaaggtagataaaaccacaaagatggggagaaaccagagcagaaaagctgaaaattctaaaattcagagcgccttttctcttccaaaggaatgcagctcctcgccagcgatggaacgaagctggctggagaatgactttgacgagttgagagaagaaggcttcagacgattggtaataacaaacttctccaagctaaaggaggatgttcaaacccatcgcaaagaagctaaaaaccttgaaaaaggattggacaaatggctaactagaataaacagcatagagaagaccttaaatgacctgatggagctgaaaaccatggcacgagaactatgtgatgcatgcacaagcttcagtagccaattcgatcaactggaagaaagggtatcagtgattgaagatcaaatgaatgaaatgaagcgagaagagaagtttagagaaaaaagactaaaaagaacaaagcctccaagaaatatgggactatgtgaaaagaccaagtctatgtcaattggtctgcctgaaagtgatggggagaatggaaccaagtttgaaaacactcttcagggtattatccaggagaacttccccaacctagcaaggcaggccaacattcaaattcaggaaatacagagaatgacacaaagatactcctcgagaagagcaacaccaagatacataattgtcagattcaccaaagttgaaatgaaggaaataatgttaagggcagccagagagaaaggtcgggttacccacaaagggaagcccatcagactaactaataagagagtttctggatctctcggcagaaactctacaagccagaagagagtgggggccaatattcaacattctcaaagaaaataattttcaaaccagaatttcatatccagccaaactaagcttcataagtgaaggagaaataaaatcctttacagacgagcaaatgctgagagattttgtcatcaccaggcctgccttacaagaactcctgaaagaagcactaaacatggaaatgaacaacc

SEQ ID NO: 475494 - DNA, 542 bp, Homo sapiens
tttcagattgatgtgtctacaagacaaagaatgccaaggactgcaggctgccaacagatgtagctcgtttactcagcccacagctctcaacccctcacaggagcaggagcacacgggtgagcagcatccaggaagaatcaggtcacatgaaccaattgaagatagtaaatgtggggattttattgccaatgaaagtggctctcagcaggatggagagctggaaaggagatggagtgggaagggtaaatctagtgttttaatacaggaatgtgtagcatcagaggagtggaagacacaagctggccctgacaagcactcaagcaattctgaagctttagaaatttactccaaaagcaatgagagtggccaagtctgtatgggttgcaggccaactgagtatctgggagttcaaattaacttccaagtagaatggattttttattaaagaatatggaatgtaaatgtgccaatttgaagcttacatatgtattttaaaaattcaacaattgcagcaaatgtttagatctgacaccaacaacacc

SEQ ID NO: 475495 - DNA, 584 bp, Homo sapiens
gtccatctggatgcccaggggatggtagggggaggtagaaagtgccttttttctttaataggacatggcatcagcaaagcatactctgtgatactcagttcacctatgggctggtccagagggtccaagatagctttcctcttggcaggcatggctgagggtttggctttgctggcacatttgatggcagaactacatgtgcctgtccggcaggatagccttagggccccaagtcagatatcctggctggtggctcagggttgcgggagattgtaccagggaattggaaagccaatcactgagacagtgccaaggaagaaggcttttttgggtgctgcagccaaggagaatgaaaggtctggctcaagatcatcacctcaaccaagtaaaattaggctttcttatagcaggaaaaaaaatgtaactatgtgtggaaaacaggaatttgggaaagggttgtcttggctattcaggctcttttttggttccatatgaattttaaaatagtctttctaattctgtgaaaaatatcaatggtagtttaatgagaatagcattgaatctataaattacttttggcagta

SEQ ID NO: 475496 - DNA, 764 bp, Homo sapiens
gaactgggagtccattaaacttctttgatttatagacgacccagtttcagagatctgtggaatgataaatggaaaattggacactaaagtatacaagtcaaaaaatacaaaaatgtcccttctctgagacaagttttgaagcagttgtagcatcattactgtcagttatagtaattctgcatgtttttatctcttcatccaggtcagtggttgtcaaaggcgacaatgcatcggtattgtctgaagaaattttcaaatacctgctcctttctaggatccagacacaggataaggttcagaggctatgtgtgcaggtttgtaacatgggtaaattatgtgtcgctgaggtttggtgtacaaatgattctgtcacccagatactgagcatagtccctgatagtaatagccattctgactggtgtgggtatctcactctgattagtgatcatgagcacatgtccatgtttgttggctactcctatgtcttcttttgaaaaatgtctcttcatctcctttgtccatttttaaatgaggttatttgttttttgctgttgatttaagttccttatagattctggatattaaatcttttttcagatgcattgtttgtgaattgatatggttgaatctgtgtcccttcccaaatttcatgtcaaattgtaatccccaatactggaggagggggtctggtgggaactaatttgatcatgggggcggtttctcatgaacggtttagtactatcccttggtggtgttcttgtgtt

SEQ ID NO: 475497 - DNA, 649 bp, Homo sapiens
agttactaagtgacccatttacatggtggagaatgttgattctgtgagaaggtcaaatcaatcagggttggtggtggtggttagagacccaggcctacagagacacgaccattttgtgacattggcatctcaaaaaatggatcactgtagcagaggaagagaacatggacaacccacacccactccagaagtggcacacttcattcccacacaggactcattgtccagaataggcacctacgtcctgctaaccgcaaggggactgggacatgttgagaaacacacgcatattgctgtcagttttctagcatgcgtggcaaaacccaaaatgtcttctgggcttggctggatttctgatggattgggttaccccaaagaggagccaaggaagcacttggaactagtgataactgtcagaacagatgaaagcaagaagtaactttaagctttgtttaaagatttagtgtttctgtttctttgttgacatgaaatatcatatgaaatactgaaagtcagaaatcaaatttgtgtgtttgaaatttagtaaaaagtaaagtgaactttgtccaaatgccattcgaatataaaataatttaactgtaactcacactgcccacattaagattaacttgggacacaggaattagtt

SEQ ID NO: 475498 - DNA, 860 bp, Homo sapiens
tcctacgtgcccatgctgcaatatggaaaaggaattcctaacatctgggggaacctccgttaaataccacaaggaaatcatgaagctgttgcatgcagtgcaaaaacccaaggagctggcagtcttacactgccaaagccatcaaaaaggtgaagaagaaaaggcagaaggaaaccatcgggcagatgctgaggccaaaattgctgccaggcagaacctcccatcggaaatacctacggaaggacccttggacaggaagatagatggttcctctcaggcaattaagggaaaaagacacaatgggtattcagatggaggccatcaagctacagatggtcttacaaatggaaccccaaatgagctcaactcaaaacttctactgaggacccctggatctttgactggcctagagagttcccctctggaggacactaccactgcagggccccttcttcgcccctatccagcagaagtagctagagtggtcattgcccaattcccaacagtagttggggtgtcatgtttagaggggggattgagaggtgaagccagctggacttctgggtcaggagggggacttgaagaacttttctgtagctagctagaggtttgtaaaatggaccaatcagcaccctgtaaaatggaccaatcagtgctctgtaaaatggaccaatcagcaggacatggatggggacaaataagggaataaaagctggccgccccagtcagcagcggcaacctgcttgggtcccctttcacgctgtggaagctttgttctttggctcttcacaataaatctgctcactctggatctgtgcaacctttaagagctgtaatgctcaccgcaaagatttaaggag

SEQ ID NO: 475499 - DNA, 573 bp, Homo sapiens
tacccttctccccagttcctgccacagtctgagcccaggtagttaccttagctatgtactcactatggtagtcagggttctccagagaaacagaacgaataggacaaatgctttggaagctctgtccccatgggaagggtcatacactagagcctttggggctgaggagcctctaagacatggcttctttggagtctctgtcttgtttgttttctcttggatccaccctaagcatgaccaccactggactacgatagaatttgaagagcccagtatatgtgagaggtcatttgcaacaaatgaaaatgggggccaaagggcaaggtttagttgtcagagtggtatctggtggcagcaaccctgccaggtcccctgggagcccaggtctgcccagcacaagttcctcagccatccttgctgctttgccttctgccaggctgggaagaggaaggggatggttactgtgccgtgaagagaaaggcaagtgggcattggccatagcctgtgcttaagaggcagtcgcacctatcgagtattcctgcccaaaatgcttaacctgaatcaaattgtgac

SEQ ID NO: 475500 - DNA, 793 bp, Homo sapiens
cggccagacatctttcaaagtccagatacgtatatctactctatttgaacagtgtctgttttcctccttgcatgttggctgatgcaggccccagccacaggcctggacaacagaagcaaaactctgtctcaaacaaacaaacaaacgaacaaacaaaaaacagcaaaagcggagggtgctagaagtagggggcctagaaacaaaattcccggggctccctccggggccgcggtctgggctgcgcatttggctgccgcgctcctcgcgaaggcagtggcttccaaactcctgcgcgcggtcatcctcagacccccctgctcgggcaagggcaccgagtgccagagcatcgcccagaactttggcttccaggatttctccagtgggcacttcttgtgggagaacatcaaggccaaaaccgaagttggtgagatggcaaaacagtatatagagaaaagtcttttgcttccagaccatgtgatcacacgcctaatgatgtctgagttggagaatagccgtggccagcactggctcctcgatggttttcctaggacattacgacaagccgaagccctggacaaaaatctgtgaactggatttacttcttcacagatgtgtaccaggtatccattaggggctcaataaatgttgaattaatgaatgtgtgaataaacaaaaaatcactaatcagtaaggtttttttgaatgcttatttttgaaaacgcactttaagagtaaattttttttttaaatagaaagaataagatctagtacttgatagtacaacagggtcact

SEQ ID NO: 475501 - DNA, 808 bp, Homo sapiens
ggggacagcagcagacatgaaaaggcctccgaggccaagtgtgaggatgccgggtcccagcactgaggtgtcctgcagctggacctgtcaggtgtccacccacccctggcagctgcatgtcctttgacggcctataggctgagcagcttctctgggccccgtgggggtgtgtcccacagcagggagcgactctggccccccatcacatgcctgtgacccagagaacggcaggtgagccttgcggcctcactgttgccactggtcaggtgctgatgaggacgggaagccaaatggggctgttcagccctaggcagagctgcttggagcacattcttaatacgccagccatcgctacctcagttccacagccgatattagggaagaaagatgcggggacacggcaacaggacagcgtgctgggcagaaaagatgtggacaggagcccatgcctggcagagacacggaggaccagagaggatggcgtcgcagagcagagggccgcagagaagggagtcactggtgtctgcagtggagaggacacacccctctggcaagggcaggggctgaggccctgggtgtggctttcagacgcagtgggcaatgagctctgtaaagccgagatggctccaagcagaccacaaggagcctggtcagcttctgtccctgcaactgttttccccactgccggaagtggcttcacttgtgtggatgtcctgcactcagcccaggactagatggattcacagccagattctaccaaacatatgaagaactaataccaatccttctgaaactattccaagaaatc

SEQ ID NO: 475502 - DNA, 926 bp, Homo sapiens
ctcctccttgctttctgccatgactgtgaggcctccctagccatgtctcagctatttggacagtctgctgttctttggacaatcactgcaacatgtgcagcttctcaaattaccccccatggcaactgcggccagcaggatgtggcttcctatgagccaaactgcaatgattgtaatttctcttctgaatctggccatccagcagaactaccaggctccaagctggcactggcaggagaaatctgcttccttcaaagagtctgtgaattctcttggctttcctggtatgttcctgtggtagttcctggagcagaagttcaggatgtgagtctccacacactgctgtgcttctttagattttcttcaatgaggtttaagcgaagggaaacttttgataaagtaaccatgtgtcaacatttgtattttaaagtgattgctgacctttgtttatggtagaagtggtaaaaattctgtactgtatattaccagcaggtagtagaagcaaatgtgagaacaaacttcagtgacatcgacatcataatttataaaaatatgagagttgagcatgtcagatattctccaactgtaccctttcacattccactcacatgtggccattgcctcataactgagaaatggtctttcattaaatcaccattgtcattgcaatctattgtaaaataaattaatttaacatctatttatttctatttcatcaatatcactagaggaattttccccacagaaagagtcactcaattgttgcaaattattatctctgtatttgcatatttatttttggaaatatgttttattgtggaatggaacaatacaatttctcttattgaattgccttattgaagatgaaaattttctaataaaactctaaaactctagtcattactgtgttgtattctgatatgtct

SEQ ID NO: 475503 - DNA, 940 bp, Homo sapiens
gggtggccataagtgggcctggacaaaccaccattttctgggttatatgtgcggaatgttccggtttgttacgcgagagctgccggaggcaagggtctccgatgccgtttcttgttctcatcatgtagacaaaacagccctgctgcaaagatggtcaacgtacctaaaaccggaagaaccttctggaaagtggcactatgatcggaagcagagtggctatggtgggcagacaaagccaattttctggaagaaggctaagaccacaaagaagattgtgctaaggctggacaatgttatcttcacagattctcttcaaagatatttgcatgaagaacagcctggggagatagagctagtgtctccctcaggagcaataagcaggtttgtttcctgtccagtaatacgtgtgtgtgtgcgtgcgtgcgtgtgtgtgcatgcacgcgcgtgtcttggtttttcaaaataccagttacttttggaagcttatcttttgccatgatttaacaaaacaacctttactgccttcctctcagaggtcaaactcaacaaacataatgtttatcttctctgttttcccagagactgatgatctctctgggagacagagaatgagagagagagggagacagagaaggggggagagagagagagagagagaatacatgtgtcatagggaaatagagagagtgccttccacttgcgtctttagctccttacttgtgtaagccgttgagcaggcgtctgttagctccttaccatgctcattagattgtggagattccaatgaatattgttcaagattagctgaaattctaaatattggaattccaatgtatattctgttacatcaactgtttctccaaatttgttgataatttagcagttttaagtggagctgtctgtaagttcactcagtgaacactaatcaagtgcttatgtg

SEQ ID NO: 475504 - DNA, 1092 bp, Homo sapiens
ataggttctcacaatgctagaatggctatgtcaacttggctcttacctggaggctccgggggaataaatctcttccaaagtcattcaaattcagaaaatttgcaggctgatgatgtgatatacaagaaaaactcattttctgaggagaaattcaagcctgctgcagaaatttgcataagtaatgaggaggtaaacattagtcaccaagacaatgggaaaaatgtctccagggcatgtcagagatctttccagcagtctctctcatcaaaagactggaggcctaggaggaaaaaatggttttgtgagctgggaccaccaccccccctgctccatgcaacctgggacttggtgccctgcaacccagccgctctaaatgtggctaaaagggaccaagatcctggtggcactgctgaggaacaccaggaattaagctgaaaataccaccaagacttgtcttaagtaagataactaaatgtcactaatgcttacgactatttgtaatgttttcatctgaaagcactagtgattgacactgtgtatcatgaaagggtcttcagcaggaacagtcaagttcgggaagtggttttggaaaatggtgagcaagagctggtaagcaggaaattaggtgtacctcataacactggaaaatatataggaaaagaaaagaattattttgaactctggaaaactgtcagtaaaagggaacagatatcgaccatgattgaggttgaatatggcatattttgaagaggtcgttaactgaaatgttgtaagttatttgaaaagaacagcatctaaaactaacgtatattaatagtatatcacatttgaattaaaaaaaatttagcattagtccatatctaaaatttttaatggtgaatgatttaatcaaatggtcttgtgttttaaagtgaactgcttaaaagttaaataactttctagatttagtttgattagtttattttttacagttattatttagaataatttaaatataatactttgaccttgtgttcacaattcatcctgaaagtttaaatagattcagctactcatctgatcatctacttaataagtactgcattttcactt

SEQ ID NO: 475505 - DNA, 1145 bp, Homo sapiens
ggcggttttgtggaatacaaaggggggaaaggagggttgctgaccacctttgaatctttccagggctgtgatacatttatgaaaaacatacaaacccgcggggacattagaagcaaagattataaggaagtgaagagatcaggcaagtcaatttctggggaggagcaagtagaggaagtaaccagagccaatgccactggcaggggtgaacctaggtgctttgtgaacagcaaagggcccagtgtggctgcagcaggtgaacaagggaaaactaaaaacaatgcaaccatttgtctcttatctgcctatgacctggaagccccctccccacttcaagttgtcctgccttttctgaaggaatcaatgttcatcttgaacatgttgattgatgtctcacgtctccctaaaatgtataaagccaaactgtgctctgaccgccttgggcacatgtcttcacagtccttgagtccttgggctgtgtcacaggcatgcatcttcaatcttggcaaaataaactgagacctgtctcagatgttcagggttcagagaccattgttaaaagctcttaagttaggtaaaatattatgttgtgtaatgatataagacaatttgcttgaaagacatgttcctcataaagcctgatctattagagatgcagggagagcttaataaaatagagttatactcagggaatgtaatatatctttttgaaaattagaaaggcctacaagaattaaataaatgagaacatataggaacagaatactgtaataaactacagtctgacataaatatctgatttgcattctatgaatattgaatacatataatttattggtatctgaggaatacttacaaaactgatcatgtacttggctataagtaaagccttaaagatttttaaagtacatatttcaaaggctataaccattgccataaattcaaaaaacttagaaataaattataaaaattcaaactacttcaaaataagaaacactttcataataatgtttagcttctgaataaaaaaggaaatacttctgaagttacaatctttaggaaagtcaatgaaaaggagtataccttaataatgaactaatgaaccacttacttgaaaatgtttaaatacctttatattcaacatt

SEQ ID NO: 475506 - DNA, 748 bp, Homo sapiens
ctcctcaagtgccgccaaagtgggagtccaggcagaggaggcgcccagagcgagctagcgagggctgtgaggactgccagcacgctgtcacctctcaccatgaggcaatgtggaaactcttggaagacaatttacttaacagctgcttctgtcaaaacccatcctgcggcttgtttgcctactgtcttgtgggttctaattgttctctgctgctacagctgctgtcccagtcccctgaggtgatagatcatgaaggctctgccctcatgaaagaactaatgctgtttttgcagaagtgggtttatcgtaaaggaatgagttttgatcccttcttctcactctctcatgctgtctttttcttacatcttccaccacgggatgatgcaacaagaaggcccttaccagatgccagcaccttaatattgaacttcccagcctgcagaactatgagaaaaaaatatcttttctttgtaaattacctagtttgtggtattctgttataccaatacaaaattgaccatttcctgagtcaatgaagaagccaggaatatgaagggctgactatacataacagaataaaagacaatctaatcaaaagtagaagaggaataaaaaaagtcagtgaagaaaaaaacctgtgaaaaagcaacattatttataacagacaggaagagaggatgcttcatctaatatagcttcagtaaatcaccctttttaaagcagggatttgatgagttaaattgtttgc

SEQ ID NO: 475507 - DNA, 494 bp, Homo sapiens
gggtgggcctcccgtttctaaagcacccactatggatgcacagcaggacagacccaagtcccaagactgcctgggcctactggcccccctagcatctgctgcagaggtctcctctacagctcccatgtctgggaagaagcacagaccaccaggacccctgttctcctcctcagatccccttcctgccacctcttcccactccggggactcagcccaggacacctcgctgattcctgcccccttcacacctgcaagcagggatgccggcatcagaagaatgtttcgtgctcgagaacaacaggatgctttggtcctgtatcagcaggacgctttttgggtagatcctactgccaccctactatcgggtagatcctactgtcaccctagctatgggcacatgtcagagtcccatgtaataaaggagacaaaaggaaaccaccacaagtataaactaagaaaagtactccaaggtttctaagaatggagctgtataa

SEQ ID NO: 475508 - DNA, 685 bp, Homo sapiens
ggactcatagtggttcctaaaaagaccttttccacgacaagcacagccaccatgctgggaaagaggtaccagaagctccctgtcaacccttctgacctcagtttccccagagttgagccagatgccctgaggtcctttcgctggataaaaaccgtggacctgagttctgatctggcctctggggctggagttcaccccacctttgcggactctgtggctgagagactgaagtacctgtcccaggactgcatccccacgaggctggactccatcatgactctcactcaccagcatttccacatcctgggccttattgaagcagcaggtgtcagttacagaaatgtgtccccaggcaccaccacccccaatacccacccacacccttgtctgccggcccagggccagcaaactcacaccccaacccagcagcatgcccctgcaaactgctgctcatccccccatcatgggttctcagtgggcttcatcatccaaaagaggccccaaggacagggcaaactggagcaagcttgcactggttctcagttcaagtccatgacctcagcctgagtccatgaccagtcctgctctgacctgtctcagacctatcccatgctgatccctgtgcatgggggcttggcagagagcacagacagaaaccctgagaatctctgaatccccacttcct

SEQ ID NO: 475509 - DNA, 2758 bp, Homo sapiens
agtgacatgatctcatttaggtttttcaaagatgagcctggctgctgtggtggagtgggaagcagggagacaagagtaggagtggggtgaccagtgaggcacctgccatggcagggcaggtagctgggggcagctgcagagcagccagtcacccatggactctgcatttgtcgttaaaacagagctggaaggagctgctgacagggaattttgctgtgaatggaagagaaaaggtgcgatatttggcggtaaaaatggactcaagtaagagtctatcatggctggagctagtgcccatgtggttcacagctgtggtccaaaaggaacatccaggccacaggacagtcattttcttctctgttctgagcagcatcctgggccagatcagggcaggaggtgaagggagggtctgtgaaaacttccaggacattcgggattttcctgctctagagtccagaggacacaggaaggccatatgggagcagaggctgggatggaggttgctgaaggggaatggggtgaggggccaatgacctgaggagtggagattacaggggtcagactattgccaggggtttacaggatacccctgaggagccccctcacctccattcccagagcagccaactcctgagccccatccagcctgtcttctctgcagcggtgggaaatgcatttagagaaaaacaaaccctctgattttgaaaacctgattattacgtatgtcttaatttgcattcctttttaaaaatataacttcatttttctttctgactataaatgtgatatatgttcattatagaaagtttggagaactcagaaaagcaccaaaaagagtacaaaaaccaccctcgatccagctcagaggtcattatttacttctgacacatcagtctgtgtctttcctgcctcccttccaatcacatcttctttttgttaattggagccataccttccattccagtttataaatttcataatggaatgtaggctccatgagaacaggggttttatcttctttgttcactgctgtttcctagtacatagtaggtactcaataaatatttgttggaagaatggattttgtaacccattttaatttaatgcagtgcagccatcttctggcattatttcccattctcatatgccattatttttactggctacatagtatttgtcctatgggcaatgtgggagggggcgtcactctgatttccctaattatcttcccatgacctgcttccccttctccagcaccccagccctcactgaaccaagagacaccggaaatggcttcttcttataatagatttttccttgttacaaaaatgtttattcattgtagaaaatttggaaaatacagataaatttaaagaagaaaaaagccttattatctcatcactcactgataactactattaacctttcttctattttttccgtgaatatataactgcttctaaacatcatttgaataatgctgactatactgttttataacctgcatttttcaattggccgcatgccatgaacatctctctgtgtcattgtgcagtctcctgcatcatcgtttttgtgggtagcaaagcatatgccatcctatagatatccaaaaatgtttccaaccttgtgattgggcattagggtagcttccaacttggcactaccgtaaataatattgcaatgacaatccttttgaacaaataattcctgattcccacccccctcaccacatacacacactttgtattaattcctgagcaacccaccattgatagtccaaaggtaagaattttttgaggtttatattactccttaccaaacacccccaccccccagaaagggctctcaggatgtcagaccctcagatacacagtttcttaacatctctatcctgcttttattgtttaaaatcatctggcctggttggtgggcttgagttgcttaggtggccactggggaaaagggtctggattcttagtgaagagaaaagtgattggggtgggtgagggggttccagatggatgagatggggcttatggaatgctggtcatctctcctatcacagggatcagcaccctgcgatgccaccatagtctctggaggagggagacaaaacatacaggcaacagcttcacatttcgcctgggtgggcagttcggctgagaaggacagcatttctttcttgaattgcctgtctatggcttttgctcttttgtctttttcttattgatttggattacatgtcataccctctgttgcctgtggcataaatatttttgcaagttatctattgattctttagatttttgtaatggtgttttttaacaactaaacatttaaaatttgcatgtattcagaccttcaaatctaccagtcttttcctttgtggtttctgccttctctgttgtgcataaaaagaccttccccatccccagatggtgtaaacattaatctatattttcttcaagttggattcattttcagtctttaaaatgtagtttgtttcccattcaattctgacctcgtgtgagtgggagacatatgcacaggcatcccctcaggaacctggaggtgccagtgctaactcccagccagttgacgattgctaacttccagcccagtggactcaggacaacttctaagagctctatctttgcctttccatagctctggggaaatcccagaagcccttcagttatttaattggcatttttttttaaaacgaatctcattggttttgtctgtctggttggat

SEQ ID NO: 475510 - DNA, 1566 bp, Homo sapiens
cctggagccctgcagtagctgactgtgaaccgggtttcctgacacttctctgttggattccagtgttctctcttggatgatctatttgaagtgtgattatccagtcactattttggttcttcttagtggaggagaagaagacaggaagatgtgggaaggtttggaacttcgtagagacttgttgaatagctttgaccaaaatgctggtagtgatatggacaatgaagtccaggctcagatggtctcacatggaaataaggaacttgttgggaactggaataaagggcatgtcagagatcttcacaggcctggaggcctaggaggaaaccatggtttttatgggccggccccgggcctttctgctttctgcatttttgggacttggtgccctgcatgccagctgtggcttaaagggaccaatgtacagctcaggccattgcttcagaggattcaagccccaagtattggtgacttgcaggtggtattagacctgtggttgcacagaagtcaggcagtgcagaagggaaatatagggtcagagcccccacacagagtccccactggggcactgcctagtggagctgtgagaagatggccacggtcctccagtccccagaatgatcgattcaccaacagcttgcactgtgcacctggaaaagctgaaaacactaaacgccagcctgtgaaagtaacaagcaactatccttcaaatggttcatgtggtggtcccctgataaaagatgtgaacaacagggaaggccgcaggagggctgaatctgggaatgtgcataagaacaagaaaaatttcccgaatgtcttaagaaaccttctcctcatgtctccttgcattgggctaagcctcgtgtccattcttgagccaattcctcttccacaaaatgggaaacagcattctgccatatctggaataatggatgtaaaggaccggcgacaccgctctttgaccagaggacgctgtggcaaagagtgtcgctacacaagctcctctctggacagtgaggactgccgcgtgcccacacagaaatcctacagctccagtgagactctgaaggcctatgaccatgacagcaggatgcactatggaaaccgagtcacagacctcatccaccgggagtcagatgagtttcctagacaagtattcttatttaaaacccaagacactgatcataaaacaaacacacttctcacatacaaccaagttttgcaaacacagttggatgactctacagatgctcagggtggaaaagaattgccagccagcaaaagtgatgggggcccagagtcagaccttgtccagttaccccagctggcccattcaagtatcaaatgcaagaacctgccatctcccagcaggagaaatgagccaggtgttcccatgagaagtttacggaagctcggtcaaattgtgcccatctttgcttgctttcaacacagaatcctcctctgccttcttctattgtggcttcttctcttgagtatgcaaatcacctgtctggcctctattatgctggatcctcctggtgtgaaagaagaaaattgctgaccttc

SEQ ID NO: 475511 - DNA, 1065 bp, Homo sapiens
atcactaaaaaaatatattcgtcagcataaagacaggcgaatgggctgcatgttgctatgcagacgacacagtttggaagggccttctgtttgcttatggattcgctctcccttgaagaaaaactattaactcatgctgcagcctgctgctctctgcttggtgttggctatgtcaccgagcccaaaatagaaagttcttttactgcagagagggaaggaggtttaaatttatcaattcaaataacaaagggtagaattatactggcttttctcgggtggggagtagggggagataatgcctatttcattaggagaaaaagtgatctgacattggcaggggctgggaccagaagacaagcttgcactgtggtgattgggcttgtttcccatcctggcccccctcactccctccttccaacagtgtcacctctttcaggacatgggaaagcatctgagccactgggtaatcagttccagaaatatcactgaaattatcagactgggaacgattctctgaaccaaatcccttctcgctcagcttctgaaacagtcagtaccttaccacaaagttaaacagcagggagatgttatctttctcctatgaaatggtcaaaaatcttttaaagattcccagtgttggaaggagtttggggcaatgggcattctcctgcattgctggaggagaggcaaactgatctaaccacctggaaagcaacttgacaacatagatcccaaaccatggaaacatcaataccagaggatatggatccagaggctctctcatccatggctgggggaagcgtcaattgattttctagagaaatgcttgcacggatgagaaaaccaagactcagaaaagttaggtaacttgccaaagttcacacatctaggcggttgcagaaccagaattcaaacccagttccatctgactccagagtcgtttctgacactggtctactttctgtctcagtaagtttagaagtcagggaactggaaggaacaacaacaaaaaaataaacctaacttaatgccaagagaattgctgacaagatatatctcattcct

SEQ ID NO: 475512 - DNA, 464 bp, Homo sapiens
cttggcattttcttggctggatcagacgatggagaagtttgcttttatgtctatggccaacagatccgatttgtggaacactgtcgatcccaatctgaggcgtcattaccaagatggagggcgggattcgaaatacatcatggatttaataatggagatttgtgggatttcatcttgcatgtctcagacccctgaggccaccccatgtccagatgagcatatgtgtgaagacaaggatatatgtccacagcactggggccaggaagctgcagctgcagcccagcttaaagaaagaaaggaggaaaaaaaccctgctggacgttggatgtacagccaaacacctgggttgggaatgcagaaaacaggcatggaatgccaggaacgcagcacctgtggctaagttgtggtctcacagcataactgtcaaagtcattctcatgttgtacaaaatgacaactgtaatc

SEQ ID NO: 475513 - DNA, 1061 bp, Homo sapiens
ggcaccatcgttttatgtctaatttatctattactttgattcttaccaattggtacttttcttccaagttggtacttttaatttctttatttgacagtttttcagaatgttcttgttataacagcaactcaggagcagttgattcagcgagggcttgggcagccttcagcctcactgagcagacgctggcgatgggcgatgagcacctgtgctgtgcaggtggcactgcagagaggcaggtagagttgttggtggcttggagccaagagtgcggcccagattttaagcacataatggaatcatatcaaaagcaaggaggggcagcaggaaccataaatcctggaagtgcaaaatctgtccattgtgaaacttgtgctgaagggaaaccagatgtggatgctagagagagagggcaggagggaaagtgtggtatggggactctgagaacgggcccctgtgtaaggctagatgtcctgctgtgtgttggcggaggcccgaattcaagaggctcagaaccacggaaagcagggcgggtttgctcctggtgtcgtggctgacggtccagtgtccaaggaagaaggcagaggccggagaattaatgttcttgtagctactgtttcagctggactaacagaagtattgtacaagtttttcctgagtttttgtctttgaagatgaaacatttgggggcagttctttaaacatgtatttgagctatcacaaagagactaaatttgtttatcctgtggaggaaaaaaagccactaacacatgtggaaatccatttggattgggatgaaaaacatgattatccaagttgccatccttggcctgaaatggggggtttattttattctgcttcacagagttggtcacataagtgggaagtcaaaaaaccaaccacagaagacactgaagagtgaagggctgaccactgtggggaggaagtgactagggaagttccgactgctgaggtcaccccatccgtgaggccactccatccatgggacaagtaagtcatttaatggctcttgacaccaaggtgttcattcgtgataataa

SEQ ID NO: 475514 - DNA, 532 bp, Homo sapiens
tgtctgtaatcccagcactttgggaggcccagcgcaaacagcaaaatggtctgcatcagattttctgctctcccttgcctaggatgcttggaagtgactcgctgtagctttctgaagggcacgggccagattcaagaacggcaagtctcctatggagagtccagccatggggtgcacagtcaaatcacggtgagccttgtaaactattataaggacttcaggttttttctcaaggtgattggagggctgaaaacaaaggtgtgctatgaattaccttatatttttaaaggctacactggttgttatacggatgatagatgctggagccagggcagaatcagggacctaactaagcagttgaccattagtcctgtagaaaggagtatatggtgcaaagctgatgaaaagtggtcagaaccaggacacactttgaagatagaaacaccaggatttgttgttgagcatgaaagaaacagaggaatcaaggatggcttcaaggatttgaagtaggagcaatgtggatacagaacct

SEQ ID NO: 475515 - DNA, 853 bp, Homo sapiens
gggagcaggaagagatggccctcccttcaggaggatctgaacccctgctggacaccacttcctgtcagccttatctttatgatttttaaatgatccatacccgtgctctactgcaactacatacagtaacaacattgctcaacaatgttgagcaaagccagccagacacaaatgagttcacactgtgtgattccatttatatgaagcttaaaaataggcaaacagaatctctggagtttaaatcaggaaatgggtcagccctggggggtggtgactggaagttgacactggaggtaagagcgcctgtgatgttccctgatcttggtgctggctacatgggcacgaccatcttcaacaaaaccagaacccagagtcacctcctgcctctggcctttgctggacccagcagaggaggctggctggagaaatgcagggcggagaaggaaccaggacagggctctgaggccgccctagagatggcctagatattcatctaaatggagtcataccatatgtgtccttttgtctctggcttagctcactcagcataatgtttgcaaagttcatccatgttgtatcatgtaacagaacttcattcttttttatggctgaataatatttcattgtatatatgcacgctacattttgtttatgcatttatccttctatggacacttgggatgtttccaccctttggctattatggataatgctgctatgagcattagagttcaaatatctacttgagtccccgccttcctttttgtgtttgtgtgtatacctagaagtgaaattgcggggtcatatagtaactctatgtttcactttttgaggaactgccatactgttttct

SEQ ID NO: 475516 - DNA, 2432 bp, Homo sapiens
gtactcagtttgaagacaaggaagatgaagacctttatgatgattcactgccacttcatgaataatagcatttgtggaagtgatgaagtgcatggtccacatcagccatatgacaaccctgaatctcttgacctgaccagccagattgaatatagatcatcatttcagagtaagagtggaaaactgttatggattgaattgtgtcccccagtgtataggctaaagtccttacccccagtacttcagaatgggaccttatttggacacagggtttttacaaagcagttacagaaacgtttattgtctagcaggatagccctggcttttagagcctggcaggcaagctttgatgtggaaatgcagtccattaggaactgggttcacccaaacatggagattcccaccgtgttcttcttgtccttgcctcaacatgtgcctggcaacatggccgcccccacatatccccacttgtgtagaacatcatggtgccctgcttttgcatattaaaaagctaggccttgagggactggctcatgatagatgctaggcttcttttgtctcttgctgcctatctctaaataagaaactcatttcatataacttgtagtatgtgagtatattgctgtatcactgaactcaaatatgtaggtaaatagtatattaacctgcattacagttcaaaatctatcattcaaaaaataaaaatgcacatttgaaagatttctatttgtcccacttattttcagtattagtccattttgcatattagctagttatgaatgtctgtactcaaatatagggaaaaagtaaattttttttcttgatttcaagtaactgagatttcaataaaaggcttttttcatgtcttctttttttccacattttgattctgtgattctattcttatgtaatagattaagtgctgagctagcagttggggaatgtggagtttattgctgtctccatcctttattaattttgtgattttatgcaggacacttaattgcactagaaatgtattttataatctgcaaaatgaaagagaacccataaatcaactccattgaaatctttaaataatctctaatgaatgagtcccctaaatgatatatacatttattttagctataaaatgacacattatttgaataaagaataactattggtttggtttacatgtataataaaatattcctcaaataaagatgtttgaccaatgaaacttgattatagatgccaatttcagaatctgaaataaaatattttattataaaataattagtcataaactaagtctttgagtatatatatgagtatatatattttatatatattttatatactcatatatatgagtatatatgtatatatatttatatataaaaatatatgagtatatatgtaaaatatatatatttcatatatatactttatatacttatatatactcatatatgagtatattttatatattttatatactcatatgtgttatatataaatatatatttatatataatacatatttcatatatactcatatatgctatataacatacatatttatatatataaaatatatatttcatatatactcatatatgctatataacatacatatttatatataatatatatatttcatatatatactttatatacttatatatactcatatatgagtatattttatatattttatatactcatatgtgttatatataaatatatatttatatataaaatacatatttcatataaactcatatatgctatctaacatacatatttatatatataaaatgtatatttcatatatactcacatatgctatataacatacatatttatatatataaaatatatatttcatatatactcaaagacttagtttatgactaattattttataataaaatattttatttcagattctgaaattggtatctataatcaagtttcattggtcaaacatctttatttgaggaatattttattatacatgtaaactaaaccaatagttattctttattcaaataatgttattttataactaaaataaatatatatgtatatgatttaggggactcattcattagagattaaagatttcaatggagttaatttatgagttctctttcattttacagattctaaaatacatttttagtgcaattaagtatatatatatactcatatatctgaaatatgtgtatatatactcattcattagagatgtgtatatatatgtatacatatgtatatgtcacttatcttttatatataatttataaatcaatgattggccttatgtgattggattcccttttagctattttagtgtctatgttctttatagataataatacacattaatatataaattaatatataatattacatatttaatataaaaataaattttgaagaac

SEQ ID NO: 475517 - DNA, 913 bp, Homo sapiens
tctctctctctcgcccacgctggagtgcagtggatgcgtggaaaatcctagatgtctaagcaaaagcttgctgccagggtgaagcccacactgagaacctctactagggcagtgaggagggaaaatgtggtgttggaggctctgtacagagtcccaaccaggacacttcctagtggagctgcgggaagagggccaacatcctccagacccaagaatgttaaatctaccagcagctttcaccctacacctgaaaatgccacagtcactcaactccagcccatgagagcagccttggaggctgcaccctgcaaatcctcagaagcagacctgctcaaggacttgggagcctacctcttgtaccagtgtgccctggacaacacaaacctcgccattgagaaagcaagcagactcaggtttttggcatctcagtatgttcctgtggtagttcttggagcaaaggactcacaaaaatgtgagtcttcacgtgctgctctgtctgaccaaatgggagctgcagactttagtcctgtcttctatccatcatcttaatcttcagtatccaattttagacactccttatgttgtagttatcagagtgcttctatagcgtggaagccttacaaatgcactctcctggacggcagagaagcccagagatgtgaggcagacacttggaaccactttttcgccaaggatttgctctgaggagggtggagatctgagaagctgaacagtcatctgtggttgagaagtaagaaacttaccagcgttttggacaattgcacagagttgatgagaggacataaattggaatttgaggctaacctgggagaaggatcctggattccacaccaaaatttcagttgggcccctgagaggatatgccttaggttaggtgaagagaaaatatgcc

SEQ ID NO: 475518 - DNA, 1456 bp, Homo sapiens
gacatcgcggagatggtttcacccaaatatcactggtgtggaggcagaaaacctactgaactgaaatatgacgttggtggaggagaacggtttgattctttaacagatcttgaagaacattacaagaagaattccatggtggaaaccttgggtacagtactacaactcaagcatccccttaacacgactcatataaatgctgctgaaataaaaagcagagttcgagaactaagcaaattagctgagaccacagacaaactcaaacaaggcttttgggaaaaatttgagacactacaacaacaggagtgcaaacttctctacagccgaaaagagggtcaaaggcaagaaaacaaaaacaaaaatagatataaaaacatcctaccctttgatcatactagggttgtcctacacgacggtgatcccgatgagcctgtttcagattacatcagtgcaaataccatcatgcctgaatttgaaaccaggtgcaacaattcaaagcccaaaacgtgttacattgccacacaaggctgtcagcaaaacacagtgaatgacttttggcagatgaagttccaagaaaactcccgagtgattgtcatgacaacaaaagaagtggatagaggaaagagtaaatgtgtcaaatactggcctgatgagtatgctttaaaagaatatggcgtcatgcgtgttaggaacgtcaaagaaagcgcagctcatgactatacactaagagaacttgaactttcaaagattggaccagggaatatggagagaccggtcgggcaatatcactttcggacctggccggaccatggagtgcccagcgaccccggggtcgtgctggacttcctggaggaggtgtaccataagcaggggagcatcacggatgcagggccggtcgtggtgcactgtagtgctggaattggcctgacagggacgttcattgtgattgatattcttactgacatcgtcagagagaaaggtgttgactgcaacattgacgttcccaaaaccatccagatgatgcggtctcagagaagaaatgatctgggaaaattaagtaacgacatcctagaaaagtgagaacaatctcatttaccgtcatgtatcgagtagtgtataattcattttgatggcttctatttttggccaaatgagaactaagccagtgcctgagactgtcagaagctgactggtctacttttgcattggcattaaagagtcataggaaaagaatcatggatatttatgaactaagataagaggcgtggcttttttattttttttcagtcgatgaccaattatagttcagctgttgactgagaaggttgtggtgggaaaacgtttgccatattttccttgcatttgagtaattgtcttgtacttagaaaaaaggcatctatgaatgaccagtgtttttggttgtcaagtattgctgacaaacttaccctaaaacttt

SEQ ID NO: 475519 - DNA, 528 bp, Homo sapiens
gttttctcctctttagtggttgccatggaacgctaccagtccattgctcagggattggggactgctgttctaatccaagttgggatcaatcagtgcccattaaattcgatgcttttgtttcccttgaataaagggcgttctgattacatatttacaacaaaattttcagaaagttgtttggctagagccaaagagaaagagttcatgtttaatgcaataagcaataaaaacgggctgctggccagatggccaaataagaacagctcaggcctgcagctcccagcgagaccaacgcagaagacgggttatttctgcatttccaacagaggaataggggagccccctcacccaactccacgtacctcagccaagggaagccgggaaggactgtgctatcgggcccagatactatgcttctcccaatttttttgcaatctgcagaccaggagattccctcgtgtgccttcaccaccagggccctgggtttcaagcacaaaactgggtggctgttcaggccgacactgagct

SEQ ID NO: 475520 - DNA, 1363 bp, Homo sapiens
aaactatacactcaagaaaggagagtgtgggtgtattcgagagagagagttgctcattctttcctcccttccttccttccttccttcctctctctccctctctctctttctttctttctttctctctctctctccctctctctctttctttctttctctctctctctccttccccctctctctttctttctctctctctccctctctctctttctttatttctctctctctccctctctctctttctttctttctctctctctccctccctctctctttctttctttctctctctctccctctctctctttctttctttctctctctccctctctctctttctttctttctttctttctctctctctccctctctctctttctttctttttctctctctccctctctctctttctttctttctctctctctctccctctctctctttctttctttctctctctccctctctctctttctttcttttctttctctttctctctctctctctccctctctctctttctttctttctctctctctctctttctttctttctctctctctctcccgctctttctttctttctctctctctccccctccctccctccctccctctctctctctacacgaacctatgaaataccagcaagagctatggaataaaactactgatgcaatgaagagagttgaagagatcaaacagaaacgtcaagctaaatttataatgaacagattgaagaaaaataaggagctacagaaagttcaggagatcaaaaaaagtcaagcaaaacatccatcttatccgagcccctcttgtaggcaaaggaaagcagctgtaagagaaaatggtacagcaattacaacaggatgtggacatggaagacgtttcttaaaaacctcacatttctacaaactgctgcctcgcaggtcaatctcagactgctgcactagcagtgaggaaggctctgtggaagtgggacccaccaagccaggcatgggagagtatttcctggtctactggttgctgagaccatgggagaagtgcagtatttgggcagggagtgtcccgtttttccagaaagccaaaagtgggaatattcgttaagcaactgttgtattgagaatactaaaggtattactgccctcaaccaagaaagacagtaatagaaataaagagagcttgaatagtattgatgcatagaaatgctacagatttttgtgcactgactttgtatcctaagactttactgaagttgtttatcagttctaggagcctttgggcagaatgtttaggattttctaggtatagaatcatatcatctgtgaagagacatagtttgaattattttcttcctattt

SEQ ID NO: 475521 - DNA, 739 bp, Homo sapiens
tttatgatttaccaagattgcacatgagaagactgtggaagatgtttttgtcaatccccagccccgtggctcgtgtgtgtaggcatgagcagactgggtggagcaatccactggcctccagaaggcatgcatgggaactaatggaagtcgggggagtcagatcaaccccaagctcccagataatgcacacaggcactggcaagaaagtgttctcaggtgctgacagcgggcaggctggatctgtttccaggtctcctgatggtgcacctttgtgcatcagcagtgataggcagggaaggctgatatctaggcctcacatccgcagtggtgaaaaggcctgggccttaggccaccaatggtatatgttggtacagtctgtggtacgtgggacgacacttgtgggcactggtagggacagcactggtcagagggggcctgtcctcaggctcactgatgatgcaggcaagcaccagctgtggctggcaagagggagtgtggcagttccctaacctggtcccagagaccatgatggctgaggctatctctgtggctagtaccacagtagtctgcagtgggaatgtgaactactgggatctgtcacttacatattttctgcactggaaggtttctcctggttcacagctggtcccagcctgggaggatgcttcacttccttttacttctctgcctaagaggttccctgacacttccctgctgaattttactgttctgtgttata

SEQ ID NO: 475522 - DNA, 1474 bp, Homo sapiens
tctccttccacactgtggtagctttgttctttcgctctttgcaatgaatcttgctgttgctcactctttgggtccacactgcctttatgcgctcttcactcctgaagccagcgagaccacgaacccaccggaagaaacgaacaactccagaggcatcgccttaacagctgtaacactcactgcgaaggtcagcagcttcactcctgagccagcgagaccacgaacctaccagaaggaagaaactctgaacacatccgaacatcagaaggaacaaactctggacacgccgcctttaagaactgctaacactcaccgcgaggggggtcgacactcagatcccaactcttggactgcatgttctaactctggggaacttatattaggacacgaatttgttctctggctcctcaatgttaagaattcactgcactgggcttggttcaccggcacagatgctatggattgggcccagacagaacttgagactgccctgcaagcaagtgtagccaggctggggccccagaaaaggccagcagaccaaggggtgctcagaacaaagcaaatgaatatcatttcaaaatccagtataaaaccagggcagaaaatatacaacatgagcctggagcatctggtagttccagaacttgaagatatgctcaaaacaaagagcaaacatacagataagcttaagggagaaaagccgacttctctcactagtgtggattggcatcatccaattgaaggcctgaatagaacaaaaggcattagaagagagaatttgccccttctgtctcactgcttgagccaggacattggtattctcctgcccgcacactgggagttacaccatcaaccccctggttctcaggccttcagactcggtctaaactacgccagtggcagtttgcagacagcagatactcagtgccagccagcccctgaaaggagccaggagtgggctatatcctgcaaagccacaggattggagcttcccaaggccatgggaacccacttcttgtatcagcgtggcctgaatgtgagacccggagtcaaagcagatcattttggagctttaagatttgactgccctactggattttggacttgcctgtagttcctttgttttggccaatttctcccatttggaagggctgtgtttacccaatgcctgtactcccattatatctaagaaataactaacttgcttttgattttacaggctcctaggcagaagggacttgccttgtctccaatgaggctatgtatggactgtgaacttttgagttaatgctgaaattagctaagacttttggggactgttgggaaggtatggttggttttgaaatatttttcaaaataaatatatttaatggttaaaaatgtttaatttcttattttttttccaacacttctctttttctggctgcctcattgttttttacaatgactgtgagtctataactatgtcctctga

SEQ ID NO: 475523 - DNA, 1759 bp, Homo sapiens
cccttttctcaggtacttaaagcgtgttgtttaactgagcatcctgtatcatggcaggaggttccacgtgtacaccgttatttatagtcagtgtcctttttcttatcttattgctgttgcaggtcaatccttatggctcctcatttattattgactttactaatatcttcacttcacttctctcatcacttaaaaaatttaaaccagacagcatttttcagttgatacctggaaaacgtatcaatgttgcagtatcagttggaatagaccatgctacatatattgtagcaacacaggcttccatatcagagtgggttgtgacagaacacactgatgacctaaccagtgccataggcctgtgcaagtcagactactctgattactgctttgagtgtgctgcccattatggtaaccacatccacattgacttcagttttcactgtgaggtctggcttacagagaagagtgatcacagagcacttcaaagatgccagggctcccttcacaaatttatttgtcaatcatggtagaattcatggtagaagaggagctaactcaaaaaaaagttatatgagatcttaccttgccctaagatttcaactaactggacaaaataaagttgctgaaaggattaattttttttttcagacagtaagaaggttttcaaatcttccctctgaactcattttaaaactgtctaaaaagcaaagcttggtatattggatttatagaagtctcaggctaacatcaattctgtttctatattaacatatgacaaaaaacaaccctatcttttggttgaatactgaaagggctaaaactcataattttcttcttcttatctgatttctaaatgaattctttacctcacttattctgaaagaacaaaagtataaatagttctatattctattgagtgttctattaaaagcacctttagacaaatccagaagtagatctaaaggttgccctcattcatctctcagagacacagcagatgaaacaactgttttacatccttcagatgtcagcaagcattaatctattttatgccaccctcaagtgattccacatagtttgggaaactgaaatgctttgtattttaaaaaattgagtaatgaaaatagctcaaaattgccatgtttattttgcctaaatgcaaaacatccctctccaagattcaataaatgtcccattttgatgatgtgcaaaattctttaaatttgcagcagtacttgaggaacttgtgctaacaagcagtgaatttatatacataaatcatacctatctcattttttaaaatctaacttttcaggtctttcagactttctcagagttttaaggtatagtcacggaatcatattgtgggtttccatgactatacttgaagtgcttccatacctgttagcatttgataggccagaaacacgagccctagaatgagtgtactttgtgatgtttattatgttatcagagatgagtgttctaacacccaaggcttcttcacattcccaatatgtgaaagtgtgtttgcaaccacagagaaaagcactcaatgcagacttgattttatatattttgctttcagtttcacaatgatttctttaggcatagagctcttttttttacctatactgtttgagatttgtggagcttcacgaatctatggatctgtatctttaaacacttcaggacaatttttagtaatgatattgtaaacactgcctgtgccttattcttccctcctcttatcttcttc

SEQ ID NO: 475524 - DNA, 468 bp, Homo sapiens
gtgagctgattgctcatctgagaaaggtgctctaacactgaaatgccaggaagagaaagaggaaaactaaaaataagtgacagtgaaggaggagaatcacgtgagtgggatgttccagaagccgaggaaaagtgttctaaggaggaagaattcaagagagcagaaaaaataacagaagtgatcatcaagcctctgctcatgtcacatccaatgacattccatcaggcaatcaatgatgcagccaagcccatattgggaacagccaagcctgttcccaatatgaacagggctgggaaatatacaccacaaaatctagagaaaggtccatataattcggggtctcaacagaaaatggttagtaaagaggaacagattattggtaagtttaataaagggacagttgttagttgttataaagagcctccaaatggacaaacacagtggaattcagtgaatctataaccccat

SEQ ID NO: 475525 - DNA, 721 bp, Homo sapiens
ctgcattaccagtgggccgctatgttaggagactattgctgtaccccaggggtgagatgacaatggaagcaaaggatttgcatgcagcaggtgtggtctgccaggaaaggagctatgatgagggcctccaggaagcaccctgcttgggcattcaaatatgccctgcaagcatgcgtgggcaggttggggccccaggaaaggccagcagacagggggccactcagataggacaggccttatcccctgggcaagacggccatgctctgtccaggtctaacactacccaaaagctaaagccagctaaaggagcttggcaagccttggaggatgagcctccctggccatactccactacaacccttcctgaaccaaattctttgggctccatacaggctggcatccttcccctgccaccttcccaaccaactcttcctgctagcttaagtgtccatgggatcgtgggttgtgcaccagaattccagaggtctgtgggctcaatgtatcaagagaagcctcattcagaaggagaatgggagctcaggttttcatgagaattatagaaaataggttaccattttgatatttttagacaaggcaaatgagttttatgtcttatcataaaatagatttaaaaaaataaaagatttcaaaaaaccaacaaaaggattgcacaaatctcaggaatttgtgaacatttatattctgagcactgagctaagaa

SEQ ID NO: 475526 - DNA, 511 bp, Homo sapiens
cacagtgtttgagctgcaacttcaaccagaagggaagaaggagagtgggggtatgtgcatagcacgtaatgcagctggaggattggctgagtctgactcagttggagcactggcatgactgggcctctctccatgtgctcttttcatctcagccagagcttcttcgcatagtggcagcagcattccaagagggtgcagacaacgtgtcagggcctcttgtggccttgactcataagtggcataacaccaattctgccatacaagtcacaagaccagctcacatcaaagagctgcattctctccatggcacaaggagactggaggccaagggcatgtttccacctagaatcctgccagagcccatttcttcttttggaccatgctccaggcatcaggatctccgatatttctacccaaatggcctgagtcagcctcctgagcctacctgggcctcttctctgcatttgttctcctggagctgaccatcctgcagcgtggacatccctaatat

SEQ ID NO: 475527 - DNA, 597 bp, Homo sapiens
agtgctaaaaacgtctggtgcttgcaatctcactgttcttatagctatggccagctcagggcggtggacctggacccatcagacacactcatacttagaatgcaagctaaacatgagaagaagcaggaagaacacaggagcaagtccagtaaatggtagaggcagcaccagcagcaccctctacttccagaggggagatgtagccagagttcagtctgcaggtctgctggagtttgctgggggtccactccagaccctgtttgcctgggtgtcaccagcagaggctgcagaacagcagatattgctgcctgctccttcctgtggaagcttcatcccagagggacacctgccagatgccagcaagagctctcctcagagcttgaacgctgtgctgggagatctgctgctctcttcagagctggcaggaaggaacgtggaagggaagactgtgagtgattccaagtctgagagaacaggggactttagtgcatagtgagtactgaaactttatcctaaaggatatggatttgaatttacaaggtcttctaattaaagagatttgaatatcaggatttatatgtagagtggaaaaaaagc

SEQ ID NO: 475528 - DNA, 774 bp, Homo sapiens
tccgagcccagctccgctgcccgctgcaatggaagaagagatggcggcactcattgacaatggctctagcatgtgcaaagctggctttgctgggggagctgttttcccctccatcatctggtgcccccggcaccagcacgtgaaggggggcatgagccagaaggattcctacgtgaatgacaaagcccagagcaagcatggcatcctgaccctgaggtaccccatcgagcatggcatcgtcactaactgggacgacatggagaagatctggcatcacaccttctacaaggagctgtgcatggccctggaggagcacatctggctgagacctgacccactacctcatgaagagcacggctacagcttcaccaccaagcacggctacagcttcaccaccaccgccaagggggagatcatgcgtgacatcaaggagaagctgtgctaccgcaacctggacttgaagcaggatatggccaccaccgcatactcctcctccttggagaagagctacaagctgcctgatggccaggagaccaccttcaactccatcatgaagtgtgacatggacatctgcgaagacctgtatgccaacacggtgctgtccagcagcaccacaatgccatgatggttaattatgtgtcaacttgactaagttaaggaatgtttggatagcggattaaacattatttctggtagtgtctatgagggtgtttcaggaagagattagaatttgaattagtacacagagtaaaaaagacctatcctcacttgcac

SEQ ID NO: 475529 - DNA, 693 bp, Homo sapiens
cagaaagcccaccttctctctaaatgctctagggacttggagttaaagaagacagcaacctggaaatgcccgaggatgtagacaaaataagtgatttcacacagtatccttcaccagaatttggttacacattggggagccactactgctcttttagaaatgagaaaactgaacccgctagaggatataaaccagcaaggtgctttgacaagacgcttgttaaatggagaatggaaccaggttattcactgtgtggcatcttaactccctctgagttaagtcctgatcatttggctggtgaatactttgtgccttcagaaacctatgtaaagaaacgcatcattgtgataacctctgagccctgcagccactttgtgaaatacagaattgttctgatttatgaatgcgatattacggctgcagcaagtctcttacctacacatgaagtttcagaccgggagtaccaaggaaagaaacagaaacattaaaaaagtacggattaaacttgaaacaatcctatatctatatctatatctatgtctatgtctatgtctatatattctctagtaaacattagtagctaatacttcctgaaaagcagagagagagagcagaagaaccatgctgctgagtactgtaagcccataggaccaggagaaatcacaaaattgttgttttaaccactcaatgttt

SEQ ID NO: 475530 - DNA, 3305 bp, Homo sapiens
aaaggtattgtatgaggacctggtatatgcagtatgatgtcgataacagtgatactgtcagatggaagcagcagcacaaaagaactctcagacccaatagccccatcctccatccacttctgctggctgccaatgggcaaagactgaagggagagaaggaagccaagcgggctcttttggatgcgaggcataactacttatttgcaattgtggcttcctgtttggacctgaacaaaaccgaagtggaggatgccattcttgaagggaatcagattgaaagaattgatcaactttttgctgttggaggtctccgacacctcatgttttactatcaagatgtggaggaagcagaaacaggaggggtaaatcttgtttctggaaagattaaaaaacctaaggtgttcgtgaccgagggaaacgatgtggctcttactggggtatgtgtgttcttcatcaggactgacccttccaaagccatcacccctgacaacatccaccaggaggtgagttttaacatgttagatgcggcagatggaggcctgctcaacagtgtgagacgtttgctgtcggacatcttcattcctgctctcagagccacgagccatggctggggcgagctcgagggccttcaggacgcagctaacattcgccaggagttcttgagctccctggaaggctttgtgaacgtcctgtcgggtgcacaggagagtctgaaggagaaggtgaaccttcgaaagtgtgacatacttgaactgaaaaccctaaaggaacctacggactacttgactctagcaaataaccctgagactttgggaaaaatagaggattgcatgaaagtatggatcaaacagacagaacaggttcttgctgaaaacaatcagctgctgaaggaagcggatgacgttgggccacgagcggagctggagcactggaaaaaaagactctccaagtttaactaccttttggaacaattgaaaagcccggatgtgaaggctgtgctggcagtgcttgcggcggccaagtcgaaactgctgaagacttggcgggagatggatattcgaatcactgatgcaactaatgaagcaaaggacaatgtgaaatacttgtatacacttgaaaaatgttgtgaccctttgtacagcagtgatcccgtgacaaatcagattatatctgcatgtaaagcctatattaccaataatggaaccgcttccatctggaaccagccacaggatgttgttgaagaaaaaatactatctgcgattaaactgaaacaggaataccagctctgctttcacaagacaaaacaaaagcttaaacaaaatccaaatgcaaaacaatttgattttagcgagatgtatatttttggaaaattcgaaacttttcaccgacgccttgccaagataatagacatctttacaaccctcaagacgtattcagtcctgcaagattccacaattgaagggctggaagacatggccactaaataccagggcattgtggcaaccataaagaaaaaggaatacaatttcctagaccagcggaaaatggattttgaccaagattacgaagagttttgcaagcagactaatgaccttcatgtaggttgtataataaaattcctgttgacagtcgtgtgtttattttttcctttctgtataatgccgttaatcattacccaatcagaaggcagaggtatcttcatcatggagaacgagttgcggaagttcatggatgttacatttgcaaagattcaaaacacaaatcaagctctaagaatgttgaagaaatttgaaagattgaatatacctaatcttggtattgatgacaaatatcaacttatccttgagaactatggggctgacattgatatgatttcaaagctgtatacaaagcagaaatacgatcctcctctggctcgaaaccagcctcccatcgctggaaagattttgtgggcccgccagctcttccataggattcagcagcccatgcagcttttccagcagcacccagctgtgctaagcacggcagaagccaaacctataattcgcagttacaacaggatggccaaggtcctcctggagtttgaggtcctcttccacagggcgtggcttcggcaaattgaagaaattcatgtaggtcttgaggcttcattattggtgaaggctccaggcacaggggaattgtttgtaaactttgaccctcagatattaatcttatttagagaaacagagtgcatggcccagatgggtctggaagtctctccactggcaacttccctcttccagaaacgagatagatacaaaaggaacttcagtaacatgaaggttcctggtttgccaaagctaaagcatcatgggaatgaggaaatggtggagccccatgctgattattcaaggaggacaccactcaggattgaaagaaaggcccttttggtgggtttcagcttttgggtgtcatcatggagctcattagtggaggaggcagtcaatgagcttgtaaatatgttgctggatgtggaagttttatctgaagaagaaagtgaaaaaatatccaatgagaatagtgttaattacaaaaatgaaagttcagcaaaaagagaagaaggaaattttgacaccttgacatcatctattaatgccagggccaatgccctgcttttgacgacagtcacgaggaaaaagaaagaaactgagatgttaggggaagaagcccgcgagttactctctcatttcaaccatcagaacatggatgctcttctgaaagttacaaggaatacactagaggccattcgcaaacgtattcattcctctcacacaattaacttccgggacagtaacagtgcctctaacatgaagcagaacagtttgcccattttccgggcaagcgtcactctggccattcccaacatcgtcatggcccctgccctggaagatgtacagcagaccctgaacaaagccgtggagtgcatcatcagtgtccctaagggggtcagacagtggagcagtgaactgttgtccaagaaaaagatacaagaaagaaaaatggctgctttgcagagtaatgaagacagtgattctgatgttgaaatgggagaaaatgaacttcaagtattttgaatatatcacttcactcctttctaacctgcaaggcttctgctaagaaatctactgatagtcttatgagtgttcccttacatacaatgaaacacttttcccttgctactttcaacactctttatctttagctattgacaatttgattataatgtgtcttggtgtgagtgtttttgaattaatcttatttaa

SEQ ID NO: 475531 - DNA, 568 bp, Homo sapiens
gtatctgaagtaggatcaggaatgagaagagaaaatagctatggtctggtactggggagtgtctgcaaagagccctgtgatgtgatccatcttcaggtctctcagctgtggataccagcacctgctccagtggaggaaacctcacgtttggtcaaaattgttacaaagttcaattggaagtttccttctccctgtggtctttccccaattccactggcagctctctccaaggacccctgtgaaacaaagtcaggaatggcttccctggagaccaagagtgcccacaggactcttcccgctgcttcctctacctctgcatttcacttgactctctcagttcatctcagctctaggttccgcagtgaggatgagtgctcgggagcagactttccccctctcacactttgggcactcggagtttctcagctgtctcatggggccggcagcagcaagccgcttccttcaaagggtgtgtggattctctcagctttcctgggatgttcctgcagtagttcttggagcaaaagttcatgatgtgagtctccacatgctgctctgtccattcgag

SEQ ID NO: 475532 - DNA, 531 bp, Homo sapiens
tcataaacagaaggctctcgtgtgcgaatgcccgatggcaagaacaaccacgaaagactctgcaaaatccacaaccttgcataaaagccattgcaacctcaaaatacttctgcaaggacatctgtccatcaactgcctgtctgacttccgactgactggctggggagccctcacaattatggcagaaggagaaaggaatgtctcacatggcggcggcaagaaagagaatgagagccaagcaaaacgggtttttcctaatgtgagatttattcactaccacaagagcagtgtgggggaaaccatccccatgattcaattatctcccactgggtccctcccacaacatgtgggaattatggaagtacaattcaagatgagatttgcttggggacacagagccaaaccatatctggcaccaacaaacaacagatgccagcccatagctctgtgccaggattaatttagtccttacattgctggataattgagaaatttaaaggattccaagtgagaagacagaatggacagggc

SEQ ID NO: 475533 - DNA, 634 bp, Homo sapiens
ccgtttcttgactattttccattaggtccctttagccacttggcggctcagtctgctcctcccggtctctcccagtcctgctttcatgctgataacagctaagaactccatgatgtgtgccatggcatctaggctgctactgccatgctgccttccacagacgagtggtaccaaaaggcacagtagtggatatttgtcctctttagctgactgccatccaaatcgccttcctaacacaagccagaaagggaaagtgaatttcaaaacgcctcatctttgtcaagctgctttgatgaaaagtaacagaaactcattcaaattgtcggaaggaaagagaatgaggtacagggaagatgtaggaagaatcacaagtaagggtgggaggaatagcatggccagccagaagcatccagccagcagcacctgtcagtggccccagtatgaccccctcctaatctctgcttctctctgcataactctccctgcagaccttggcttcgacatgcacacagcagaagcttgctaccccatgacatccaagttttaaaatccttagttcaaacacccacaagagacagactggcaagtgtgtcttaaccccaattcttggagggaatcttagggctgctgttca

SEQ ID NO: 475534 - DNA, 643 bp, Homo sapiens
aaaaggagttgaaaggaggtggtcatgaatgtggccaagtctgtggtggtcagaaagaccagaggagaaagtgacccaaatcagagcagaaggaagggatttggggctgaaggaagggctgctgctggagtggcagcccacagtgtctccttctcactgaaggtgacatccatggtgaggagagagcagggtaggagtggaggtggggagctgagacaagtgggaaggtttgacctcatctgcagagtccaggtcaaacctggtgattctgaagaaccaggggtccaaagtgccatcagggagaaaaagaggatggggcagaggagaacaaagagccccacacagcaccctaattgtcctctctatgccaggtaccagagggcacgccatacaatcaccattcagggtcaagcgctgtgccagtgttctttccagggacatctaagggagcccccagtcactgatttggaggcaagttgagctaaatcattctccctgccccaaatagagaaatatcacaggctccagcatgggggagacagaacagacagaagggccctctgtggccagctgaggttccagtagaagggtagagtaggaggtttctggagaaacttcaatgtacatagcatggggacaaaat

SEQ ID NO: 475535 - DNA, 662 bp, Homo sapiens
ctgtttttactataaacaagtcctatgttttacatgttgaagcctttcctggctcttgataactcagatattgctgctaaatctaaaggaattggtttaaatttaaggctaaatgttagagtagtgagggtgtggccctggtttccatcctataggtgtgaggtcatgaggcttcagggacactttatgccctcccagatgctgccactgaagtctgcagtctgtagtgtcaatgcttggatccttttagagcattggaatggactcaaatcacgcacgtttccattcaataatctcaaaaaacagttacacacaatctcaatatttaaactggtgccacataccataaagcaaggctcaaagaagtccagactcttgacccttgagggaggtcctttttctgatccaggagagaattaactaagagtgtggcacctttttaagtctgataagaaacattttacaatctattctcttggaagcctgctaccttcatgtgcataataaaaccttggtgtctacatctttttatcttaacccagacactcccttttattgactccaggtctttagataaaatctttgaaccaattgccagtcaggaaatcttataatccacctatgacatggaagctcctcccccaccctctccccacccctcc

SEQ ID NO: 475536 - DNA, 503 bp, Homo sapiens
tccgataagggaataaaagcaggctgcccaagctgtagtgaagaaatggataactctggatgcagtgccttaagagctgcaacaatcgctacaaagatctgcagcttgactcctgaaaccagggggaccacgaacccaccagaagaaagaaactctgaatgcgtcaaacatcagaaggaacaaattccagacacaccatctttaaaaactgtaacagtcactgcgaaggtccgtggcttcattcttgaagtcagtgaaaccaagaacccgccaattctggacacagtggatgttttggcaagtgtgatgatttgcgtccacatttcagctgagactgttgctgcaggggtctttgttcagcatgactttcagctggcatcacaccacactctcaagttacccattcatacatatttaagctctgagctaggttctagggattctaggtcagagttcctgccctcaaagagctcatgaactaggtatttttaaaaaataacttc

SEQ ID NO: 475537 - DNA, 1213 bp, Homo sapiens
tttcacgaaatgcaaattcaacacacaacagcttccttaatagcaaaggtagcaacagcccaggatgatataactggtgatagtacaacttccaatgtcctaatcattgaaaagctactgaaacaggaggatctctacatttctgaaggccttcatctcagaataattactgaaggatttgaagctgcaaaggaaaaggcccttcggtttttggaagaagtcaaaataaggaaagagatggacagggaaacacttataaatgtggccagaacatctcttcatactaaagttcatgctgaacttgcagatgccttaacagaggctgtagtggactccattttggccattaaaagacaagatgaacctattgatctcttcatggttgtgatcatggagatgaaacataaatctgaaactgatacaagcttaatcagagggcttgttttggaccacggagcatggcatcctgatatgaagaaaagggtggaggatgtatacattctcaagtatgctcttgcaaaagaacacatagtcactcttcacagagctaaaaggagaaatatcgaggggctgactcttgcttctggtgaggtagccctgaattcttttgaaaacctaaatcctgactgcttgggacatgcaggacttgtatataaatatatattgggagaagagaagttcacctttattgagaaatgtaacaatactcgctctgtcacattattaaacaaaggaccaaataagtacacactcactcagctccaaagatgcagtgctggtgctgtggaagtagcaatggcagaagccctgattaaatataagcccagtgtaaagggcagggcacagcttggagtccaagcatttgctgatgtgttgctcattattccaaaggttcttgatcagaactctggttttgaccttcaggaaacattagttaaaattcaagcagaatgttcagaatcaggtcagcttgtgggtgtggacctggatacagatgatgctgttttgactgtaataaactagggcaaaataatttgaagttttaaatgttgaatgggaatttcagatctttgtaaatgaaatggtccatgaactattatatcatcatttctgtctaataaagtaaccatttgaaaatcatttctgtctaataaccatttggaaaatattatttacccttttgaacaaattaaaatcttaattttaaatgttt

SEQ ID NO: 475538 - DNA, 1646 bp, Homo sapiens
aaaagccaaaatgggaaaggaaaagactcatatcaacattgtcgtcattggacacgtagattcgggcaagtccaccactactggccatctgatctataaatgcagtagcatcgacaaaagaaccattgaaaaatttgagaaggagactgctgagatgggaaagggctctttcaagtatggctgggtcttggataaactgaaagctgagcgtgaacgtggtatcaccattgatatctccttgtggaaatttgagaccagcaagtactatgtgactatcactgatgctccaggacacagagacttcatcaaaaacatgattacagggacatctcaggctgactgtgctgtcccgattgttgctgctggtgttggtgaatttgaagctggtatctctaagaatgggcagacccgagagcatgcccttctggcttacacactgggtgtgaaacaactaattgttggtgttaacaaaatggattccactgagccaccctacagccagaagagatatgaggaaattgttaaggaagtcagcacttacattaagaaaattggctacaaccccgacacagtagcatttgtgccaatttctggttggaatggtaacaacatgctggagccaagtgctaacatgccttggttcaagggatggaaagtcacccgtaaggatggcaatgccagtggaaccatgctgcttgaggctctggactgcatcctaccaccaactcgtccaactgacaagcccttgcgcctgcctctccaggatgtctacaaaattggtggtattggtagtgttcctgttggccgagtggagactggtattctcaaacccggtatggtggtcacctttgctccagtcaacgttacaacagaagtaaaatctgtcgaaatgcaccatgaagctttgggtgaagctcttcctggggacagtgtgggcttccatgtcaagaatgtgtctgtcaaggatgttcgtcgtggcaacgttgctggtgacagcaaaaatgacccaccaatggaagcagctggcttcactgctcaggtgattatcctgaaccatccaggccaaataagcgctggctatgcccctgtattggattgccacacggctcatattgcatgcaagtttgctgagctgaaggaaaagattgatcgccgttctggtaaaaagctggaagatggccctaaattcttgaagtccggtgatgctgccattgttgatatggttcctggcaagcccatgtgtgctgagagcttctcagactatccacctttgggtcgctttgctgttcgtgatatgagacacacagttgcggtgggtgtcatcaaagcagtggacaagaaggctgctggagctggcaaggacatacagttgtccctcagtatccatgggggattgattccaggacccctcatgaataccaaaatctgaggatgttcagttcctcatataaagtggtgtagcatttgcatataacctatgcatatcctcccatatagtttaaatcatctccagattacttataatacctaatgtagtgtaaatgttatgtaaatagttgttaaactttttatttgtattattttttgttgtattatttttaattatttttttctgaattaaaaaaaaaatcttcagttggttgaat

SEQ ID NO: 475539 - DNA, 946 bp, Homo sapiens
ctcctccttgccttccaccatgattgtgaggcctccccagccctgcggaactcatctggtggctgcaggcattccctggattgtggcaaagggcaaagaattggaagcagcaaggagtaggcctgtctggcagtttaggaactgtggactgaacgaggctgctgggacccccagtgcccagggttgtggacctgtactggtctgtggcctgttagcaggagaactaccagctttcaaggaaatgggtagcgcagagaatggctctaagccaatgaccttgcggcatttggaagcagaaattcacagtgtttcaggcactgcaaaagtggcctcattttcaatggcaggtgttagcagagtggtcatcctgtctgtgtgtgttccatgtcacccctacctgctggtagcctcattaactctggcatgtagcagcagaagagggcattggaaagagtccagtggagcagagaaaggtggggagtggacgatcaagggcagccaggttctagaggctatgacagcaatggcattctgtgcagctggaccctcaggggctccagtttccctggcggctatctggggtgggatgccacctggacgttagcataattacttgcactgtgagaactaaatcaaaaggaagaccccaactttccacacctaagtaacaaaaaaacaccttgctactcaccgccaactgctgcccgcccattttttgggtggcagacggaaaattgaaagtatctctgattggctggtttctgcaaccaatcagactgactgccggccaagtcttctttgcctagaagtgtaactttgtaacttcactttagcctctgattggttgctttccacaaccaatcagatgcttgcatagggtgtaatctttgtaacctcacttcagcctctgattagttgctttctgcaaccagtcagatgattgggg

SEQ ID NO: 475540 - DNA, 829 bp, Homo sapiens
acccgataaaggaggattggcgttttccttagacacttccggttctgtcttataatgtataatgcattcaaagggaggattgagaatacagaactgccagcagctgacagtgggagaaatgaccattggcaacaagggacaatgtggaagaaaagtcgagattatgagtttgtggatccctataatgaagacatagtggacaacgatggctattggagcaacgataaaagtaatgaaaaccacctaggagcatctattgtctaccaggcaaaagtagttggtttaaaagaaacagaatcagtgattgtggggtctggcaagtctgacgtccctagagcaggccgtcgggaagagccatctggagtctgtcaggccagagctgatgctgctgaatttgcctgggagcagcgagggcgtcatgctggccgaccacagcaacctttaaacctgtggtggtaaaactcagggtttgggatctgctgcatggaaaggaaaaattttaaactagcctctttcatcttgattgagggtggaaacataaacgggagtgtttgtgcttgaacctcttgaaaccagtttcttggaaagtaatagttaagtgttttcttaaaacatcatttgcaattgaaaatgcaaaccgtagggctcattagtttgtccatgggtggtcttcagaggctggaccaaggctggatgtttgggtgttgttctgtgtgagctgactgaggtatgggaaggcctagacacattgtttttggggaaacttaaaaataaagtttggacttctttattaaaggctgtcaacctaaggctttgaccacaaagattt

SEQ ID NO: 475541 - DNA, 1239 bp, Homo sapiens
ctgccagcacgctgtcacctctcactgtgtttgcaagggctgctcttgtttgtgcatgactaatgtgtcccgctcggttgcgtcatccagaggctgagtgtctggcatgccgggaagcgctgtggttccctgcaggcggtcttcaagatatgaatatctggaggtatcatcagtccacagcaagcatctggatgcggagccagggtgccagccctcgctttgctggggcaagcaggcagtgctgtctgcagggcagtgttgtcatgctgccacccagggtgaagacagctgcagccatggtcctctgagatgctgcagggtactctcccacatctgggcccacgctcccactgtggggagagagcagcagcaatcactggttgggacctgggaggtgggggtctggccttcctgttctacacctacaaaggactctttacactcagtcgttgccagaggacaaagacccaggtggctctggtagctgaggtggaggcagagaaagcttgcagctgggggctgtctgctgatggggctccctcaaatgagggcaagtccctcctccgagggcgatctggtgagtgtgttcctgcctcaggtagagcagctgatgagaacatttatcctgggaagaaagaagaagtttctggggcaataacacctatagagctgtcatctcatgataacactgttccttctggaataatacctgctgaaggacctgcctgagtcagctttacaactaacttaaaaaagtaagcagaagaagtacactctaaaagggatagcattgtaaatacataaaccagtaacagttgtccattatcaagcattatgtactgttcatatttgtatgcgctcaacttttatgcaactggcagttcaaattccctcttagtctcttgacaatttgactttaatgtgcctcagagaggacctttttgagttgaatccatttgggaacctttaagcttcttgggtctggatgtccatatctctcttaaaacttggggagtttcagctgttatttcaattaataggttttctatgccattctccatctcttctctttctggaattcccataatatgaacttttgttcacttaatggtgtctcataagtcttgtaggctttcttcactctttttcattcttatttcttgatttttatcctttgggtaatttccaacaatgtgtcttcaaattcggagatcctttcatagagaaacttttacctgc

SEQ ID NO: 475542 - DNA, 723 bp, Homo sapiens
agcagccggcagaactcccacattggctccctgactggtaggggattgtggagattaatgccaccatgaaggaattgaaagacgcaggggtggtgattcccaccacatccccattcaactctcccatccagcctgtgctgaagacagatgcatcttggaaaatgacagtgaattattgtaagcttaaccaagttgtaactccatttgcagctgctataccagatgtggtttcattgcttgagcaaattaacacatctcctagtacctggtatgcagccattgacttggcaaatgcctttttctccattcctgtccaacaggagaaggctctgcaacaggttcaggctgctgtgcaagctgctctgccacttgggccatatgacccagcagatccaatggtgcttgaggtgtcagtggcagatagggatgctgcttggagcctttgccagtcccccataggtgaatcacagcagaggcctctaggattttggagcaaggccctgccatcttctgcagataactactccccttttgagaaacagctcttggcctgttactgggctttggtggaaactgaacgtttgattatgggtcatcaagtcaccatgcgatctgaactgcctatcaagaactgggtgctttctgacccatctgggcataaagtgagtcatgtacagcagctttccaacatcaaatggaagtgatatacacgtgactgggctc

SEQ ID NO: 475543 - DNA, 759 bp, Homo sapiens
agctgctgtttggagccctgagagaagagatactagaaggaaagatttttctccatcgctttactttgactctatggctgtcattgcatgggaaaggctgtgggcaagtgaacgccagaaaagtggcacaggggaagctgtgatgaaaagagactgtgtgggctggtgtgcatcagcaggggtcgctctactggagctctctgatagtcaggcaaggtctgccgacaaaggagctatgatgagggttcctggaagcaccctggttgaacatctgaggctgcactgccgtcagcagctctccctgccagctcaagtgtccatgggggtcatggggttttctgctgcctggagtctggaggtccatggtgggagtgggctgctccttacctgttcaacccaccccttccccaggagtcgctgggggctaggaatgagtcccagtgatcagcagacctgtgcagggcatccagcttttttccccttcagcccgcatgtgtcctcactctgtccactctgaatgcctttcctctgaaggctttattttctaatcttctttgtgtcatgatttctccctcccttctattttgtatgcaactgtagccgatgcctggtgatccatacatatgcctaaagccattccagagtcatctgccagcaaaacctgcacactctgacggctctgtgcatctctttgcctgagggtggtctctgacagggggagcaagccaaaagacaagaattgaaaacaagaaagcaaag

SEQ ID NO: 475544 - DNA, 1841 bp, Homo sapiens
attactaccaggtcctgtttttccctttaccatcaatttcagaggatgtacggaaacacttggatgtctaggcagaagtctggggcaaggatggagcctttatggggcaaggatggaacctctactagggcagtgcagaggggaaatgtggggttgaagcccccacacagagtctccactgggggtctgcctagtggatctgtgagaagagggccatcatcctccagaccccagaagggtagatctatgaacagcttgcaccatgcacctggaaaggctgcaggcactcaatgccagcccatgaaagcagccatgggggctgtgcccctcagagccacaggggcagagctgcctaaagtcttaggagcccacttcttgcatcagcattccctggatatgagacatagaggctttccggagcccagtgtgatttgcacatctgatcttcatcgatcccagtatcagatgtgctgtggagaggtctcagccctgtcatttaacatatgacctgaaatgatatgagaactggagttactgctgtatgtttctgattaggaaattgcccattttgcaactctcatttcagaaagatgcctaataatgccaagagtactaaatagatattcaccaatcaccaaaaaatgtaagtttaactgactcatattcaagatgaatgtgctcagaactagacacctagagaccacctattaaaaccaggaaggctgacaaatggagatgcactctacaccccatggaaaagccctcaaagttttgtagtgatattgagaaaaattttttaataagttgaattcaataaacagttccttttcccttgtgctgcctagttacgcactcttattttctttgtccttgctcataagctgttaagagaaattgttgagaagctgagcagaccaatacactagaccaagagccttagaggccatcagatagcttagatagataggcaatatctgctgtattattacactacttggaaatgaggagggtcattgtaatgagaaatatcctttggactgttttgaaacactgcgattgagggggaggagaaaggggagctgttgcttagcagttatctattttgtcaattataggggcccagtatatccacattcccagtcctgagcacaacagattcttctcaaacaagaagaaaagagaaatacctgtgggcaaacactattctttttcttttttagcagctttattgaggtataattgacaaaaatgtatatatttagggtgtacaacatgatgattttatatacatacacattgtgaaatatttaccacagtcaagttaatgaacacatcaatcatgtcacataataaccttttttattttgtagtgagaacagaagatctagtctcttacaaatgtcaaatatacactatatcattattaagtatagtcaccatactgtatgtcagagtcccagaagtgacatcatacggtaacctgaaatcagccacgagagcattcataccacagaaatcagcaaatgctacaagtgagggcacttttcctagagagctggctattcaacctttactagtatatggctgtgtaaatgaagcaactaaacatggaatcagaggactgaaatttgaatcccagctctactacatactagttctctaatttgggaagatcatttcccatggctgagtgtcggttttctcgactttaaagtgagagggagaaaacccgtcatgaaggtggaatgacttcatttgcgagtacagaaaatccagtttcatggataaacaaataggaggttagatttattatttcatgtgataataagtcttaaataggc

SEQ ID NO: 475545 - DNA, 4275 bp, Homo sapiens
aatgtaaaaggtagaagatgtcaggaggcaagcttctgatagtaagacagtcctcataccccacaggtggacctgaggtcctgcagaacagagatgatgctggaccagtcatctcaggcggacctgaggtcctgcagaacagagatgatgctggaccagtcatctcaggcggacctgaggtcctgcagaacagagatgatgctggaccagtcatctcaggcggacctgaggtcctgcagaacagagatgatgctggaccagtcatctcaggcggacctgaggtcctgcagaacagagatgatgctggaccagtcatctcaggcggacctgaggtcctgcagaacagagatgatgctggaccagtcatctcaggcggacctgaggtcctgcagaacagagatgatgctggaccagtcatctcaggcggacctgaggtcctgcagaacagagatgatgctggaccagtcatctcaggcggacctgaggtcctgcagaacagagatgatgctggaccagtcatctcaggcggacctgaggtcctgcagaacagagatgatgctggaccagtcatctcaggcggacgtgaggtcctgcagaacagagatgatgctggaccagtcatctcaggcggacctgaggtcctgcagaacagagatgatgctggaccagtcatctcaggcggacctgaggtcctgcagaacagagatgatgatggaccagtcatctcaggcggacctgaggtcctgcagaacagagatgatgctggaccagtcatctcaggcggacctgaggtcctgcagaacagagatgatgctggaccagtcatctcaggcggacctgaggtcctgcagaacagagatgatgctggaccagtcatctcaggcggacctgaggtcctgcagaacagagatgatgatggaccagtcatctcaggcggacctgaggtcctgcagaacagagatgatgatggaccagtcatctcaggcggacctgaggtcctgcagaacagagatgatgctggaccagtcatctcaggcggacctgaggtcctgcagaacagagatgatgctggaccagtcatctcaggcggacctgaggtcctgcagaacagagatgatgctggaccagtcatctcaggcggacctgaggtcctgcagaacagagatgatgctggaccagtcatctcaggcggacctgaggtcctgcagaacagagatgatgctggaccagtcatctcaggcggacctgaggtcctgcagaacagagatgatgctggaccagtcatctcaggcggacctgaggtcctgcagaacagagatgatgctggaccagtcatctcaggcggacctgaggtcctgcagaacagagatgatgatggaccagtcatctcaggcggacctgaggtcctgcagaacagagatgatgctggaccagtcatctcaggcggacctgaggtcctgcagaacagagatgatgctggaccagtcatctcaggcggacctgaggtcctgcagaacagagatgatgctggaccagtcatctcaggcggacctgaggtcctgcagaacagagatgatgctggaccagtcatctcaggcggacctgaggtcctgcagaacagagatgatgctggaccagtcatctcaggcggacctgaggtcctgcagaacagagatgatgctggaccagtcatctcaggcggacctgaggtcctgcagaacagagatgatgatggaccagtcatctcaggcggacctgaggtcctgcagaacagagatgatgatggaccagtcatctcaggcggacctgaggtcctgcagaacagagatgatgctggaccagtcatctcaggcggacctgaggtcctgcagaacagagatgatgatggaccagtcatctcaggcggacctgaggtcctgcagagcagagatgatgctggaccagtcatctcaggcggacctgaggtcctgcagaacagagatgatgctggaccagtcatctcaggtggacctgaggtcctgcagaacagagatgatgctggaccagtcatctcaggcggacctgaggtcctgcagaacagagatgatgctggaccagtcatctcaggcggacctgaggtcctgcagaacagactagtttaatccctggtgtcaccgcctgtaggggagaagagtgcagtcttgccttttaactgactccacgtaacctattcaggacttttatgtctgtatgtgacatctggagagactgctcatcccaattcaggcatccggaaaactactttgctgtgttaagcgctatttttcttaaaaatgggcaaatttccagcgtatagcaaggacaggcttagtgccacagccgaaataattgttgctgcgttaaaagctttgcaagtgagactgtcagtgcagaggttggtgagtggatgacgtcagcagtgctggagggagtttctagcgtcatgttgcaggtgtctgttctcatgcagaaagcctgtgagtggttgaattggtttggaaggtgtgtgtatcaaatctagacaagggcctgtcagatacgtcaggtgctagaattcagatcccaacagatctcagcaccaaatcaaccacagaaagtttcattaatcagttttaatatatgagtgttttgaatcagtacagagtaagaatcacataggtggcaacagcatgtgtttaatgaagaaatgagcttacatgtgttatttggttgagtccacaatgctgtcatgcccccaaataactccttccactgtggtgaccaagggaggccgtcgtcttgctttctggctgctgtttggatcacgtgggtattgtgtacagttgtccagtccctatgtcgttttgttttgcttaatgaatatcacatcaatttaatgtgtccacactgggcaaaactgacttgaggagtgtgagagtaataaaaacaggatatattccagaatgatcatctggtaagaacatgccctggaagctatagttataatatcctcgaacagattacactggttatttatacactctttagacttcttagtgctcaacaattgatgaaataccatttctggggagtcatgcttatgtttaattttcagtaaggactggccacagttctatttatttctactaaaaacatctccttggcaaggaaaatgccctttccattttcctgcttgtgtgtgcgtgtgtctgtatgtacgtgcacatgcacgtgaggatgtgtttttcctgcttgtatatgtgtgtgcacacacatcagcatgtttttcctgcgtgtatatgcatgtgcatgcacatcagcatgtgtgcttttcctgcatgtgtgtacacaaacatgcatgtgaacctgtttttcctgtgtgtatatgtgtgtgtacgcacatgaacatgtgtttcctgcatgtttatgtgtgtgtacgcacatgagcatgtgtttttcctctgatgatgtgtacgcacatgagcatgtgtgtttttcctgcatgtttgtgtgtgtacgcacgtgagcatgtgtttttcctgcgtgtttatgtgtgtgtacgcacgtgagcatgtgtttttcctgtatatgtgtatgcacatgagcatgtgtttttcctgcatgtttgtgtgtgtacgcacgtgagcatgtgtttttcctgtatgtgtgtacacacgtgagcatgtgtgtttttcctgtgtgtatatgtgtgcgcacgcacatgagcatgtttttcttgtgtgttatatatgtgtacgcacgtgagcatgtgtttttcctgcatgtttgtgtgtatgcacatgagcatgtgtgtttttcctggtgtgtatatgtgtgtgcatgcacatgagcatgtttttcctgcgtgttgtgggtgtgtatgcacgtgagcatgtgtgtttttcctggtgtgtatatgtgtgcacacacatgatcatgtgtgtttttcctgtgtgtttgtgtgtgcacacacgtgagcatgtgtttttcctgtgtgtatgtgtgtacgcacgtgagcatgtgtttttcctgtgtgtatatgtgtgtgcacgcacatgagcatgtgtttttcctgcatatgtgtgcacacatgtgagcatgtgtgtgttttaccctattattccatatctctttccttgctcttttttttaagtgttaaagacttttactttcagactattttagaggagtcatttcattaaaccttttggaatcccactgaagccgcagggcccaaggttaagctgtgctcttcccttaggaattgacagtcgtggc

SEQ ID NO: 475546 - DNA, 505 bp, Homo sapiens
gcttttctttttctcacacataaatgaaaagctacattaatattaaagctcacattactttgtccaacatctgtgaatatggaccagccagctgtgctgctagcaccccgtcacccccacatggaggatttcggaggcgggcacacaggtttgctctgcggcaaacctcacccgcttgccttgggagcccactgagcccccaggtgacctcagcatctcagttctggcttggaggcattttaggaaccaccatgagactggaacgcgtgctccctgagcgctgggactcgccttattccctggtgtctcccaggatcctcctcagtgctttgcacactgtcccagtgtgtgttgttcccctctttgtatccatgtgttcccatcatttagctaccacttgtaagtgagaacatgtgatacttggttttctgttcctgcattagtatgctaagagctctagctccacccatgttcctgcaaaagacataatcttgttcttttttac

SEQ ID NO: 475547 - DNA, 729 bp, Homo sapiens
ttctggtgtcacggtgatcctggtgctatggaaggtgctggtgctatggagggtgctggtgtcatagtgattctggtgctatggaaggtgctggtgctgtggaaggtgctggtgtcatgggaatcctggtgctatggaaggtgctggtgctgtggaaggtgctggtgtcatgggaatcctggtgctatggaaggtgctggtgctgtggaaggtgctggtgtcatgggaatcctggtgctatggaaggtgctggtgctgtggaaggtgctggtgtcgtgggaatcctggtgctatggaaggtgctggtgctgtggaaggtgctggtgtcatggggatcctggtgctgtggaaggtgctagtactatggagggtgctggtgtcttggtgatcctggttactggtgctctgaaggttgttggtgctatggaagatgctggtgctgaggagggtactgaggctctggaaggtgcttatgcacctagctatgctgccaggcctggttgtttccagcctgacgacagagcaagactcagtaacaacaacagcaacaacagaagaaccagtgtcagtgggctattattaaacaaacagcaacaagtaaaacaaaaataaaaccccagttgcagtttcaggctaacattagaaggtgtggatttttgctgtttcatccgctcaccgatccattccactctttgggctcctgcctgtgactagcactttatgtgcact

SEQ ID NO: 475548 - DNA, 827 bp, Homo sapiens
gctttcgccacctttgctgctgaagccaccttgcagggccaggcctggccttgtgagcagctggagggaagagagttgaggcacccgcgcacgttactgtgggaatggaactgaaatggcttcccatgggttcagcaattctatcttgagaatctgctatgtggtgggcacagctctgagcacagttaacccaacaggtgaaaagatgcatccctaccccaaagcactcaccttctggtggaaacacagagaacagaggaacacatccatgtataaggcattgggaggtcatgtttacaagaaaaacagagcagggaactgtagcattccagtgccaggagacccacacagcctgcgcacagcaagatcattcaagatagcaaaaccaggaacagcccaaatgtctacagagagtagaatgtgtgagaaaactgggctaccttcctccggggcagtgatgaaggtgaaattgtcagtggatgacattaatccttctctctccaccgttttccataggattgtaggtttaaagcaaaagagtgttccgtgggattttccatgggatttccccgcacttaaggaaggaacagccactgagctgtatgaacagccacccctgccctccaacagaggccctgttcttgacatgctcgtgcacctcacttttctcctggggtgagttctttcctctgctcttctgctgactgacacctagtcggccagtccaggcctgtctgaagccttgggtgagacccctggtgcatctcatgttgttgattcctctggccttttgctaagtcctctactcctctgccttttataaggtc

SEQ ID NO: 475549 - DNA, 878 bp, Homo sapiens
gcttttggaagggatattatgttaatatctcacacgagagtctccgatcatgcaggacgatgggcggccaggcctgggccatatgaaaaagagacttggtaattcactgagcatcacccaagaccgggcgcagacctacaccctggcgtataaaagacgtagtactcacgtcattcctgtttcacagatgcacagacttactcttggagaggctcctcccaaaagtcacccagctgagctgcgagacctggggcaagtccctttcttctctgggccacaggtattctcatgggcctccctcccaggcttttgtgccaatccaggaggcatgcaagcctctgggacggtgggccatcccatggaggagcctccctttgaggacaatgaaatggcaaagcaaaactgttctggaaccaaatggctgataacccacgctggggttatcctggcgattttcatccacttggctccccaagttgctgctcgaccgctctctgacctggattcactgaggacacatcaggcctttgccacgggctccatggagtggccggagcccagggctggttggatcctgggtgaagactcaggcctcgctcaagaagggagaccacccatatgtgctgtcacgtgtttccagggaggaggctggaagtccaagatcaaggtcctagtaggtttggcctctggaacagtgtccaagtcagtcccgactgctaatagaatcccacggactgagtggcttcaggaacaggaatttatttctcacagttctggaagtccaagatcagggtgctggcagatttgactcctggagcttaccatccatttggagtcacaagatcaagacccagaaaatggtcagtggtaactcacgt

SEQ ID NO: 475550 - DNA, 965 bp, Homo sapiens
gccacctgacatgctccaggcctcagcttggctccattccgggcccggggaccatggccatctcctgttgcccatctttcttgctctcttctgccccaggtgggagaggccttgcatctcaccagagggtcctattttacaactgcaaaccacaagacgttcccagcgtagacttaatgaggaaaagcagagtgccgtattacaatactccctttatgggggcttcatccaataatgtgccctgtgttttcatcacccctggcccaagtgtttatggagagatttgtgttgagaatggaaaccagacaaaatcatgcatctgccaggacgcagtgagaagagcacagcgtcacatccgggatgttcctgccaaaggtccagagtctgcattggatcatgaggaatcctcaggcaagcccaacttgagggatattctacaaaagatctggcctatagtcttaaaaaattccccaggaattgttctagattgaagaagacaaaagacacgtgacaactaaatgcaacgtgtgattctgaactggatccttttgttaaaaaggatgtagttaggacaactggcaaaacggaaataaggtctgaggattcgatggtagcgacacgctcacgttgctttcctgatgcttttgttgtggctgtgttgaggccatccttgtttgtacttggggatgatggggcatcgggtcggcaactgctttcaaatggctcaggaagaagttatttttatctgtattacaacttttctgtaagtttgaactcatttcaaagaaaaaagctttcagaaagttattaagtgtctactaacagttgggcatcttagatcagagttgtggttaaaagctagctttacaaaatacgatacatacatacaatggaatatattcagccttaaaagggaaggaaattctgacacttgccacaacacggataaaccttgaggacatttt

SEQ ID NO: 475551 - DNA, 722 bp, Homo sapiens
aggcacagatattctggcccatatggggaccaccatcatgatggccccaggacaaactcttttccttcccctagtggagaccaatattaacccagaagtttgggcaattcaagggaaaattggccaagccataaccactacaccagtcgggatccagcttaaggatcccacctccttttctaaccagagacaatatcccctgaaaccagaggttaggaaaggactagaagccatcattgataacttgaagatgcagggcctcctcacaccctgcaatagcctttgtaataccctgatactgggggaacaaaacacaaaggggaaatggaaacttgtccagaacctctgtctcattaatgaggctgtagttccaattcacctggtggttcccaatcgatataccctgccagctcaaatacttgagggaactaaattgttcacagtcctggacctgaaggatgcatctttctgcataccattataccatgactcccagtatttgtttgcatttgaggaaccctctaaccaaaccacccagctaacctggacagttaaagttttacaaaacatagatgacattctcttctgctcctcacctgaggaaatctctcaggaggacagtaaggctcttcttaattttctggccagcagaggatataatgtttcaaaatctaaagctcagctctgttagatttcagggaagtacctaggtttggtgttgt

SEQ ID NO: 475552 - DNA, 585 bp, Homo sapiens
aatggtagtcccactgacagcttgcatcatgtgcctggaaaagccactgacactcaatgccagcccatcaaagcagccaggagaggggactgtaccctgcaaagccacaggggcagagctgcccaagaccatgggcattaagcatgacctggatgtgagacatggagtcaaaggagatcattttggagctttaagatttgactgccctgctggatttcagacttgcatggggtctatcctacctctgagaggaaataaactaaacaggttctcttcagcaaaaaggaatttcactggaaggatattggaggctcaaagaacggaggaaaatgaaagctcacaaccaggcctgggaaatagaacatccaaagtcctgccctggaagagccagtccccatgtcactgtatccctcacagaaaagccaaagcccaagagtacattcttattgactctagctcatgtggaccacagatgagctccaagccaggtcaggctttggaggccacaagctcagtctcaggctcaggcactgattgtggcagaggggccactacccaaggtccagctaagcccaagacctagtt

SEQ ID NO: 475553 - DNA, 588 bp, Homo sapiens
accatcacaccgtgcaaccatcaccaccatctccagaacttttttcctctttccaaattgaaattccatgaccattaaatgataacttctccttcctcctctccccagcctgcccttggcagtgaacactctacttactgtctccatgaatttgactatcctaggtacctcatctgctcaatgtctgcatttgtgaagtatcaaagtacccaactaatgtttgacatgcatagactaaatctggggatgccaccagagcgaggacactattacctgtcacacagtcctgctgcagcttctttacctcacacggtcctgctgcagcttcgaggaggactctgcacctgcagatccttaaaaaagctctgtctgggtgtccagtggaagagcgaggccatagaaatgaacccttcaattggccaaatagattatgtcattttgactattgattctcccctacggctgctggttctaacccaagtttataacagtcactgcgttaacaattgcgtttaactcttgattgtcctagctttcatttgataattctttgagctggctgctgcttctttcttaagtgtttacttt

SEQ ID NO: 475554 - DNA, 562 bp, Homo sapiens
agatcaagttcttgtttcagtcgagaccatgatggtatctgattgtctattcagtcactatacaaatggactgcaaaagctaaagatttcttgttgctgggagcctgtaaaagactatgcctcaagctctgacagccattctcaaagaggaattctaaaagttaactttgaccaatgtcagagtcattacaatgtttttgcagcctccaagaagacgacttttgaaggagaaaacactcatttgaattcctccccaggtctgctggctgtcactgacacatctgtgccactcttggccaaagagaaagacattcccctgaatgctgcagtaccctggggcatctctgaactcggtctccctacttctaaaaatgcatacctccttaacagctctccacctccgacgcttagagaaccgaaacccaaacctacagcaggcacactgcccaggttccctcagtgacacagaaactgaatgaaaacttgttaaagcaggaagggttgcagatggaggggataccatattagtttaagtggtgggatgggtgggaaccacaggtct

SEQ ID NO: 475555 - DNA, 824 bp, Homo sapiens
gactgaatgtccttaagtgaagtgttttacacatagaaattattgccctacaaactctatcccaactcaagaacagaaaagattatcattttccaccttaaatgagggcacgagaaccagaggattattttttcagagtccctactggggcactgccgagtggacctgtaagaagagggccatggtcctccagcccccagaatggtaggtctatcaagagcatgcaccatgtgcctggaaaagccacggacactcaatgccagcccatggaagcagccgagaggggggctataccctgcaaagccacaggagcagagttgcccaaagttgtgggagcccacctcttgcatcagcatgacctggatgtgagacacggagtcaaagaagatcattttggagctttaagatttgactgccccactggatttcagactttcatggggcctgtggcccctttgttttggctaatttcttccatttggaatgactttatttacctaatgcctgtacccccattgtatctaggaatgccttttgccttccaccatgattgtgaggcctctccagatacgtcgaaccgtagaaattcagaaattcagtgtgtaaaatggtaaagtggattgaagttgaagatattagatcatttaagaagtcaataaatgaagtaataaacatgcgaatgagaagactgatgatgaagaggacctttaaaagtgtatttctgttacggttattttttttttaaagtgatttgaagccatttataatgattgctaagtggcatgctaaagttttaaaaacaaataaagcattaaaaaataagt

SEQ ID NO: 475556 - DNA, 570 bp, Homo sapiens
gctctctgcagtaaatcctactgctgctcactctttgggtccacactgcctttatgagcggaggaacgaacaactccagatgtgccacctgaagagctgtaacactcaccatgaaggtctgcagctttgctcctgagccagggagaccacgaacccaccagaaggaagaaactcggaacacacccgaacatcagaacaaacaaactccagacatgccgcctttaagaactgtaacactcaccgtgagggtccgcggtttcattcttgtagtcagtgagaccaagaacccaccaattccagacacactgaataaatgtgatgctatcagcactatagagcccatgggctctggcacctgcaagggcatcaaaatcagcagaggtcctgagtctgtccacatgacacctttattgcaagcacaaaaaacaatcgagaaaaccagtgcactaaacaaaactacaaccaaggaccttcacagaatccactgcattcccctgctacctccaccagaacaggtgctggattccatggctgagaggccttaagacaagtcatattataggactcttt

SEQ ID NO: 475557 - DNA, 1065 bp, Homo sapiens
agcagtcttcactacaagtcagtcccttgggtgatagagtatgtttctgacaatcgctgcagctgacctctctgatcccatactctatagcaatgtgaccttgccaagaaatgaggtctatttcttctcccttgaacctagatggactttgattgggaggttaaagagaagtacacaaacccagcaggatgacatcactggtatgcatgaaagagaatgtgcaggaaaatccttggtgttatctctagaggatcttcattgtcagagccttggagatcctgaactagataaaatgagccccaggacaggtgaggagagtgtggaacagaaatctgagaaaggactggaggagaaagattccagatctccagatccagattccattctctttcttcaaagaaaccacagagctcaggccctggacgtgagaggagatgaactggattgagatggtcagaaggttaaggtcaacctttccctaacctttcctctttcaaatatcgtgttctgagaacatcaaaatgctatattaactgctaatattttttctattgttaaagtgattttaagatcaaacacatctaaattctaagaacaatgtatttatgaataatcaaaagaacaacagagaaagctattttcctgtcttcctttttctcgtaagtattagatctaaaagaatcttaaaagggaaaacaaaccttgtaatttattactgcctttgttatgtgagtggttggttttgatgttgttgataggcttatttaatatcacatttttagcttcgctggaaaaaattctctgaatgttttggttccccaaaattattacgtataatataaaaacaagatttcaagtaagaacaaaatactgatctgaaccttcagtgcatgtagcttcagcaaatagaaacttttgtggtttttaaaatataattgtatcccttgcctgataaaattttcttataataccttatgcaacagcaacctgtgactgaaaatagaaaatggaatatacatttttaaagtaaaatatttctttttaaacatcgtgcatcaatacctc

SEQ ID NO: 475558 - DNA, 1674 bp, Homo sapiens
gcagctgactccttatggctagttgagataagatggaagactcttacaaggataggacttcactgatgaagggtgccaaggacattgccagagaggtgaagaaacaaacagtaaagaaggtgaatcaagctgtggaccgagcccaggatgaatacacccagaggtcctacagtcggttccaagatgaagaagatgatgatgactactacccggctggagaaacctataatggtgaggccaacgatgacgaaggctcaagtgaagccactgaggggcatgatgaagatgatgagatctatgagggggagtatcagggcatccccagtatgaaccaagcgaaggacagcatcgtgtcagtggggcagcccaagggcgatgagtacaaggaccgacgggagctggaatcagaaaggagagctgacgaggaagagttagcccagcagtatgagctgataatccaagaatgcggtcatggtcgttttcagtgggcccttttcttcgtcctgggcatggctcttatggcagacggtgtagaggtgtttgtcgttggcttcgtgttacccagtgctgagacagacctctgcatcccaaattcaggatctggatggctaggtgatgagggccttgttgtgagtgatggaggggagaaggtgtttatgggcaaattcctgaaccttaacaaccatgagctatgggtgcagggaggagggccatgtcatatggtactgggacctccagaccaggcgttatgccttaatacgcgagttctgagattgaaaaatactgtgatcatcacttttccagagcttctcatcctcagttcctaatcaaggggtgttagcatgcagacaagaaccagggtaaggagactcatcagtgacctgttagtagtcatggactacaaggtaaagaaagcatggaccacagagtctgttaccttagtgaggtgctgtcaggattggtgacaatgtacaaaaagcatctagtactagaacagtactaatcaatacatctcccactcattgtcaacctgctaccagaaagccaagtgactcaccttccaaaaatgccctgttccctcctttttcttccacagctgtcagtgctaatggtgtcctccaggatcactcagctttagtatctgccttttctgtcttttgcttccttcatattcccttgccttctctttctgttaatgtataaaaccagtgatggcctgatttgaatgtaagggaagatgatgaccactggggtcactgagagccacagatttaagagctcttaagcattcattgtttgaaacaggatttccctagaggaaatttgtgcatttattcaatgaggatggaatcactaggtggtattcagcatctgtctcagagctcatcctgagtgctacgctgcatcacactccagaccacacagagctgcatgcatagcagaatttgtactctgcagactctacggacacctggaacccttaagagtagatgtgaatgtttcacttccgccatgatagcatgagttctgtggacctgatccacagaaaaactgaaaattactaaagaacataaaactaaccacttaaagtatctggaaatggcctgtaaaccaaaaagtatctaagacaggtcttaatcaattttgaggtttatttgccaaggttaaggatgc

SEQ ID NO: 475559 - DNA, 847 bp, Homo sapiens
tacacgagagaatttgatataggcatttgattcgtaaaagccattctccaggctctgagattctttcctccacttggtctattctgctattaatacttgtgattgcattatgaaatccttgtgtgcttttcagctctatcagaggtggggcttgctgactgtgcccaccaaggcttcatctgcaatggtggttgctgggggtagcggcatacagcaccgttacatgctggcagggcaagtgaagcaaaatccacctatgcagacacacaccagcaaagtgatgtggggacttactgtgggcttgtgggaagctagagtatggggagggaatgtgagggctgctgcatggccacaggaaccacctcactggagctctccactggtcaggcatggtccactgacacagaaacctcaatgtgggccccctggacacccaagactaccctgtgagcaggcatggtgtgcccgagcagctgctctaccaagactccacatcactgtgtgtcagacagaaggccctgtggaatggattcacgaagctcaggtgggcatcacagtcctactgatacgtgatgtcacccctggaggcccagctgtaaaattcctctctttatactctctttatttctcagccggctgacacttatggaaaatagaaagaacttacattgaaatattggggtttttttgtagctgaattcagctcttggtgctttcaggggagaagggtgaagactctgtattttatgagttccttggttatagagagtctctgtatgatggctttctcaggtaattgttgcagtagcaatgtgctcactgtgtgagcaggctcactgtttcctat

SEQ ID NO: 475560 - DNA, 589 bp, Homo sapiens
tcacccctacaggatttactcaaaatgttgtttggtcaagcctatgtagtctgtcacggcttcccttggctaggaaagggaaatccccagatcccttgtgcttcctgggtgaggcaatgccccgccctgctttggctcaccctccatgggcttcacccactgtccaaccagtcccaatgtgatgaacctggtacctcaggtggaaatgcagaaatcacctctcttctgcatcaatcacgctgggagctgcagattggagctgttcctatttggccatcttctgtcagtagtcttcttaactggagaaagttaatgaaatcggtttcttgtccaatcaaagttgtagttatggctggtggaacagggtttcagttagtcatcatctgtgagtgtttgacagagaatttgagtccaatgacagtaacagctggccccttactgagaagaaaggtgacagctgccatgccactgggattggtaatttccatagaagatggttaggatgccaatctacaagttgattactttggtgaaaatgtatatttgttttcctcagtccttcaaataggcagtttacaaaaacttgtct

SEQ ID NO: 475561 - DNA, 758 bp, Homo sapiens
ccatttctagaaattctaactctctttatatgagaaagttgacatgccaaaaagtaaaggtatacttggagggctcagaatacagaaagatgtcggaaacttgggaattcctgaagacttgttgaatggctttgaccaaaatgctgttagtgatatggacaataaggtccaggctgaggtggtctcagatggagatgaggaacttgatggaaactggagcaaacgtgactcttgttatgctttagcaaaaataccggcaggattttgtccctgccctagagatctgtggaattttgaacttgagagagatgatttagagaatctgacacaagaaatttctaaatggatgtgtcctgatgtaattatgggtggcagtggacgggtcccccatgaacatggagaaggcactgaagcacctggatgcacagcaaataaagaaggagcacacctttgccagcagagttggatggacgtttttgattgtgctacaggaagcgcagtgtacactcagtccctgtgggatgcagggcaggaaactggccaaggtgcccagcttgggagagacaccagacaaccagaggccacatgtggaattgacaacccactggtcctacaccaatgtacagaaagtgctggtgctggttgacactggcacagattgtagcatcgtctatggaaacctagataagtttcaggaaagactgaatatatagacggctatcgaggacagtcagtcaaagtaaaaccaccttggcatt

SEQ ID NO: 475562 - DNA, 535 bp, Homo sapiens
tccaggaccccgctgctctgtgcagcctcaggacctggtaccctgcgtcctagcagcttcagctccagccatggctaaaaggagccaaggtgtagttcaggctgtggcttcagaggaggcaagttccaagctttggtcgcttccacatggtattggagcactgcctagtggagctgcaagaagagggccaccgtcctctagaccccagaatggtagatccattgacagtttgcaccgtgagcctggaaaagcctcaaaaactcaatgtcaacccatgaaagcagccatggggggtgtacctcacaaagcccctggggcagagctgctcatggccttgggagctcactcattggatcagcgtgtgctggatgtttggatacagctgcagctacccagccacggctgtggacttgggcattcctgtgctcttggactcccagaagttgcccctgcccctgcaggcttggaaatgcctattccctctgcccagcctgtccccactcctggtgcccactgagatttcagagcaaagttg

SEQ ID NO: 475563 - DNA, 1298 bp, Homo sapiens
gtttgaaggggacaaatgatgaagtcagatcaaagacatgctggggccctgtagccaacagggtgaacatgagaacagcagtggcaggtggctgaatgggttctcagactggcagcaccaagctggaagggactgggattcatacccggatgttgactgcctgcacttggccagtgctgatcacaacacccttcaaccccagcaggagaggtatgggagaactttccaagggctatgtgggcaaaggtggcttcaaaggaattccctatgtgtcctgtgctaacacacgtctgcctgagaatgtgcctgtcgtggaggctggttctgtttttgcctcctactctttccagacgtttttctttcaccttaacaaagaaagacccagccctatctccctggaagtaccaaacagtgacattcaaaacaccgatgtctgcaaagcctccatgtccccctcaacctgattaagacatatgttttcaatagattgtatgtatatgtttattactcatataccaaaatttgtaatatgtttacattgccttgatcaaatgtatacaaataatggttacaatgatattcaatccagaggaaaattattagcactcagatcctaatggtcccggaggtaaaaaggaaactagaatttcaacttatatacatttttttcttgcatagaattaggataacaatgtgattataaaagacttactagcacaaaattatattagaacaaataaatttgatttcaaagaggaaaaaggaaaaatgtaaaattttatgactcataaagaagagtttgttcttgtattttttaaaatagctgatggtgagtatcaaattactatggtatttagattccattggaaacatttaaaagagtaatgtaacagttttatttataaaatgtcaatatttacaatacagtgggaattgcatcgttcatattatttaaatttatgttaattttagatgtcaaccaaaaatgtgcaaggacttacttagtgtatcaaaattctttaggaggtaacatgagcttaaaagtttgaagactttaacttttaaagtgaaaagactgctttatgggaccttatgcacagtaagtgcttaaaaacgtttgtagttgaagtttgtaaaacattaggataaaaaaaatcagtgcctaaataacttcatgaaatttattagaaagacagtatgtatgtttggtactgtagtaccaacgtataccaagggtcatagtggaacagtttcattacatggcatttgttaatgaagtttatgtacaaaaatctgcc

SEQ ID NO: 475564 - DNA, 725 bp, Homo sapiens
aaaacggaccaatcagttctctgtaaaacagaccaatcggctctctgtaaaatggaccagtcagcaggatgtggtccccttccacactgtggaagctttgttctttcactctttgcaataaatcttggtactgctcactctttgggtccacactgcctttatgagctgttaacactcaccaagaacgtctgcagcttcactcctgaagccagggagaccatgaacccaccgggaggaacaaacaactccagatgcgccgccttaagagctgtaacactcaccgcgaaggtctgcagcttcaatcctgagccagcgagaccacgcacccccaagaaggaggaaactccgaacacatccgaacatcagaaggaacaaactctgaacacgctgcctttaagaactgtaacactcaccgcgagggtccgtggcttcattcttgaagtcaccagattgaactgagtttcctattacttgcatccagatgcaagggataataaagataacttaaggtaaggtatgtgaatgttccccagaatatagtgggagttcattaaatctatattttaaaattaacctgaactttgtaaaagggtaggttaaaatagccaatgaaaatattttaaaattctacctttcaaagtaaaatgaggtgtgattttcatgtatttaattagccaaaattaaataaattataatattcagtgttgccaagaggatagggaaat

SEQ ID NO: 475565 - DNA, 562 bp, Homo sapiens
catttcagctggagagaagacaaacatgaatgtcttcttctactattacaactctctttatgttcctctctacagtcttccagtattgaggggaaagtatactatggataaaataacaaagctgctgtatgtacactggctgccactcagagtaagatgcagcctgtgtctctattcatatacagaacgtaactccaatgtcaggctgctagaagagataagaatccctgaaagtaaaacaatgtgttttgaagataagaacttgcttcctgaattgcacccaagtctgagagtttcactctatatttgtgaatttagaattcatgtggaggcctctttcagtgtttttcaacttggatgcacattagaattacctggggaactttcaaaaatccagctgcacaagcgcatgccaggaatgagcagtgctttgccttccattggagggacattgtcttggccaccacaagtgtaaacagctcagctttataatgattcttatgtcaacagagcatttcattaccactgaacagtaaagcagaataaactattttttaaataa

SEQ ID NO: 475566 - DNA, 1085 bp, Homo sapiens
aggtaaacaaagcagcggggaggctcaaaattggtggagcccaccacagctcaaggaaggctgcctgcctctgtagactccacctctgggggcaaggcatagctgaacaaacaatggcagaaacttcggcagacttaaacgtccctgtctgacagctttgaagagagtagtggttctcccagcatggagtttgagatctgagaacggacagactgcctcctcaagtgggtctgtgacccccaagtagcataactaggaggcacctcccattaggggccgactgacacctcatactgccaggtgtccctctgagacaaagcttccagaggaaggatcaggcagcaacatttgccgttctccaatattggctgttctgcagcctccgctggtgatacccaggcaaacagggtctggagtggaactccagcaactcccaacaggcctgcagctgagggtcctgactgttagaaggaaaactaacaaacagcaaggacatccacaccaaaaccccatctgcatgtcaccatcatcaaagaccaaaggtagataaaaccacaaagatggggagaaaccagagcagaaaagctgaaaattctaaaaatcagagcgcctcttctcctccaaaggaacgcagctcctcgccagcaatggagcaaagatggacagagaatgactttgacgagttgagggaagaaggcttcagacgatcggtaagaacaaacttctctgagctaaaggaggatgctcaaactcatcgcaaagaacctaaaaaccttgaaagaagattagacgaatggctaactagaataaacagcatagagaagaccttaaataacctgatggagctgaaaaccatggcacgagaattatccaaactaagcttcctaagtaaaggagaaataaaatccttcacagacaagcaaatgctgagagattttgtcaccatcaggcctgccttacaagagctcctgaaggaagcactaaacatgcaaaggaacaaccggtaccagccactgcaaaaacatgccaaattgtaaagaccgtcgatgctaggaagaaactgcatcaactaacgagcaaaataa

SEQ ID NO: 475567 - DNA, 655 bp, Homo sapiens
gcagactgcctcctgaaattctactaagatgtttctcaggcatttcaaactttgtagtagcccaatagcgccacatcaatgatgggagcagccccagtcttgttttcagcagcatttgcccatgtctgctcgctgaccaaagtccacagtttgtcaaggttgacagttgggcagaagctctggttcctctttaagtgggtcatggctgtggatcacgtggccctgaagtttccgggtcttcctcagtctggatggcacgttggtggcccggacgaaagggcaattgctttcttctttgatggaacaggatggctacagtgggccaggatggagtctttcccttctccaagaatcattagggattttttctccagtacgtactgccggaacatggtcaagctcctggagatgattctcaataacttctgcaaacagattcctcttcaacagtttatatgcaagagaggcaatgggcatgcaaatgatgaatataagttcttgtgtcttgttagagagtagatattcttccttccttcatccttcttccctccttcatttcatttctttcttccctaatggtctccttcttaagcctccgaatttccggtcatcattgttaaagtcttatttgtctttactctaaatgttttacaga

SEQ ID NO: 475568 - DNA, 653 bp, Homo sapiens
tgacacagacatcatagagtgtttgaaatttacgatcatggcagaaggagaagcaaatatgtttttcttcatatggcagcaggagagagacatgccaagcaaaatgggaaaagcctcatataaaaccatcagatctcacgactcactcactgtcaagaaaagagcatgggattcactggacaaagtgataaaagaaaataatgagctcagagattctaactcccagcttcagaagcagatactgagcctcaactctgctaagattgccctgagtgagagtcttatctcctgtagagaaagagctgaaattgtggaaaaacagacactagctcctattatgggagcagctgacctgcagcaaaaggtgcatgcacagcctcaccagttgtcttttgttaaagtaaagccattgattgaaaaagtatgggactctgcaacttcgaaagtggatgtgtgggaggaccctgatgaagctgggtatactgagcttgtaaactatgatgaatctattttgccagaagaaacagcttctccatccccagtagtggcaacatcccctcctgacccatgctgttatcagcttttccacctttgtctgagggtataaaccctgcactgctgagagcaacagtgatggccttcgctgaggcagt

SEQ ID NO: 475569 - DNA, 1412 bp, Homo sapiens
tatccccagcagggagagcggcttccctggccatcctacgcaaagtagcccctgctttcccatctgactccctgtaactcctgccttggcagtccatgattccagaagagcctcttctcaagcatgagggagcatcggccctcagacccagcttacacaaaggagggggctgggggctggtccactcagctgtctcagataagatttctgaggttagagctgaccaggtcctgtgccgcttaaactggtcggggcttcccgttgccctcaagggcaagccaagcactggaggctgcccgggcctccattcccagcctcagctccctgggcgcctcacctttgccctagccttggacccagcaactacagagggtctgcaatgtgcaagtccctactacaccgaggctcggggaagcattaaagacctgaccacctacccaatggagcagctggaggaagatctgagaagagagtttaagacagagggagcagctcgtgcaaaggccctgagaaggtaagcaccatgaaggcagagacgatgcaatcacagtcgatgcctacttagcagttaccaagtgtcagactgcacctgctgcccctgcaccaggacatttaaacctcaggacaaccctacagacaaacactatcgttctcttcattttccagacaaggtccacagtcttagtcaacaagacacagaaattaaggagcagagctaagactgaactcaggcaggctgcattcagagccgagacttttatccagaggactcacctgcctctatttggtccaccactgcctggcacacagtaggtgctcagtaaatacatagcaaatgaaaggatgttctctagaggggcagtcacagggttaagaatttggtgtcccctgatgggaagggtaatgatgctggaagagcacagccgcatcattgaaataaaacacaaatgaaaatcaaaagataacaacatccaactatttgggctgtctatggcccaattgcccacctgttccctgtgccgccctgtccccattaagtgaaaagctctaggagtttcatctggttagagctgaaaccaagtccttaatagtgtttacagatgaggatagagccacctggagcaggagggctttcaacctgacagtttccccgcaaggaaatgaacgcgctggtcctgcaggaatcatcttcaaagccagacaacctggcttaagcacagcatttagaagaaacgaatcacgcccccaactcccaccaaccagatggctgggctgtctttctcttgtggaatgaggggcctgcttcacacagctgtccaagctgtgggctgaaatgaagatgctggaattcctcccctctgccctttcatcctgcagccttctggggcctgtggtcctgagtcagatgtggg

SEQ ID NO: 475570 - DNA, 1221 bp, Homo sapiens
ggatgagcagtttaggctgttctcccttcaccatgagccagaggaagggctccttcctttagcttccaccatgactagaagcttccagaggactcaccagaagctgagcagatgctggcaccatgctgcctgtacagcctgcagagctgctcatggcaaaattgagcagaaggtacagagatttcgcatatactcccgtcctcacatacacatagacttctccactgtcaacattccccaccagagcgagtggtgcatttgttacagtctgttaacgacactgacacatcagtatcacccaaagtccatagtttacattaggattcgcccttggtattggacattctgtgggtttggacaaatgtctagtgatagaataatatttcattctctggatgtattacagtttattcacttacctgctgaaggacatcatgcttgcttccaagttttggcaattgtgagtttggatgctataaacatccacatgcaggtttttgtgtggaaatattttcaattcctttaggtaaatgccaaggagcacaattgctaggttgcatggcaagagtatgtttagttttgtaagaagctgtcaaactgtcttccaaagtggctgtagcatttttcattttcaccagccctggatgagacttcctattgccccacatcctctccagcatttggtggcatccgagttttggattttggccatttaactaggtgtgtagtggtgtctcactgttgctttaatttgaatttctctgatgacacatgatgctgagcattttttcacaggctcgcttgccatctgtgtatcttgtttgtaagagagcaggcaggcagcctggggctgaatctaggaatgcagaggacagcttgacatttatatagtgaaaatgatatgctagccatgagcgcatgtgtgtggctgttttgggtgtgttgaagtgtatagaaggcagagagggtgtggctgtgtgttcccgtttgtagagacacccgtgaggctgtgggtgattgtccaggtgtggacgcgtgtgatggtgctgtgcttgcctgagtcaaggacataagcatgccagtgggtggaggaggggatgtctctgggtgggcggcccgggtggtcctggcctgataggcggtttgaggaagctgagtgggagctgacctcctctgcgcccttgatcagccagaccagcagagctcttggtcatttaaggc

SEQ ID NO: 475571 - DNA, 1362 bp, Homo sapiens
ccctgggcagggaggaagtctggcactcaccccactcccagcccacactcccctccctgtgcaacctgtcccctctgagttcagcaggccttcatgccccactcctctgagcagcatctccatcccctcctccgcctaaaatgggctgtccccaggacgcggtgccctgggtgtctcaggtggaagaagtttccccacactggggccctgggagctggagcggatggcactctggagcagctgagtgttgctgggtaaaatcccacctatcacagtcagcttggctgctctcacaaaatcccaccaactcagggcttaaacagcagactgttatttcctacagctctggaggctggaagtccaaggtcaaggcgctggtgacttggttcctgcgagaagtcaccgtctatgagaaagtggccctcaccagacacggaatctgctggcaccttgatcttagacttcccagcctgcagaactatgagaacttcgtctcccacctactgtgtcttccaaatgccgcaaaatcctccctccagccccagcgggcctgcctcttgcacttctccccttctgcccaccctccccagaaccctcccaaaaagtggagaggggagaagtggaacaaactaagccagcaggacagaggcaagaaaggctcagcatgcacccaggtggaaggaacgtcccaggcatggcctgacgccgatgtctgtagccgtcagaaaacttcctcttaggataccttccccaagtcctgtcttcctcatctgccatgtggtcatttgtttaagtgaagaaatatttgtggggtgcccactacgtgccaggcactgttctgagcaatagggatgccacagtgaactagatcttgtccctgttcttgaggagctgataggtactgaaggagacagagaagaaaatgcttacagattaatccagcccggtgatgtgggggcaggggtgaggtctgtcgggggaggctttctggaggaggtcatatggaaaccaaggtttggatggtgagcaggttagtcagggctcccacgatgtcctggttttaccctcgccagaacactggccattctgttgtaacatctgcttccatttctggccctggcccctggcaatgaggatggcctttgttgcattaaacaataataacttttttcttattataacaataaatgtttcttatagaatttaaaatttttcttacatgtagagaagcaaaagaagaaaattaaaccacttttatttcaccctcattgtacttccatccagatgacttttgttaacattttggtacattccttcagccttttattcccatgactaattgttcatgtatattttaatgtt

SEQ ID NO: 475572 - DNA, 928 bp, Homo sapiens
ccatcagttaaggcaggaagcagccatctggatgtgagtttctgctggagctagcaggccacgggggaaaagacctgtttcaaagtttgaaatgggtcgtaaagcaggggagacaactcacaacatcaacaatgcatttggccctggagctgctactgaacgtacattgcagtggtggttcaagaagttttgcaaaggagacagagccctgaagatgaggagtttggtggcaggccatcggaagttgacaacgaccatgagaccagtcatcaagctgatctcttacaactacacagaagaactacacgaatcgatgagatgcactgaaaactgcaatgcctgcagctggcattggtcaacagaaagggcccaattcttctccacgacaatgctcgtggagcacacattccacattccacgacacattccacaaccaacacctcaaaaattgaacaaattgggctaccaagttttgccttatccaccatattcaccggacctctcgccaaccagctaccacttcttcaagcatctcgacaactttttgcagggaaaacacttccataaccagcaggatgcagaaaatgcttttcaagagttcatcaaattccgaagccgggatttttacaccacagggataaacaaacttatttatcattggcaaaaatgtgttgattctaatggcatttttccccccaagaactggggaatcaatccacctttcctcttcgctatgagatttgggaaggaaaatgaaggagaaatgcttacagtcatataagcttgagttaaataattctagaaggtgcttcttacatcttgaagagtatccttcactgagaaagtaaatataaaagggaagcatgatttgagggaagaaggcctttggaagaatttagcttttgatatttttaagtgaattatcact

SEQ ID NO: 475573 - DNA, 1180 bp, Homo sapiens
ctgctagcacaacagtctgagatcgaactgcaaggcagcagcgaggctgggggaggggcgtccgccattgctgaggcttgagtaggtaaagaaagcagccaggaagctcgaactgggtggagcccaccacagctcaaggaggcctgcctaactctgtagactccacctctggtggcagggcatagctgaacaaaaggcagcagaaacttctgcagacttaaacgtccctgacagctttaaagagagcagtggttctcccagcatggaatttgagatctaagaatggaaagactgcctcctcaagtgggtccctgacccctgtatagactaactgtgagacacctcccagtaggggctgactgacacctcatacagccaggtgcacctctgagacgaagcttccagaggaaggatcaggcagtaacatctgctgttctgcaatatttgctgttctgcagcctctgctggtaatacccagacaaacagggtctggagtggacctccagcaaactccaacagacctgcagctgagggtcctgactgttagaaggaaaactaacaaacagaaaggacatccacaccaaaaccccatctgtacatcaccatcatcaaagaccaaaggtagataaaaccacaaagatggagagaaaccagagcagaaaagctgaaaattctaaacatcagagcacctcttctcctccaaaggaacacagctcctcaccagcaatggaacaaaggtggacggagaatgaatttgatgagttgagagaagaaggcttcagacaatcggtaaaaacaaccttctccaagctaaaggaggatgttcaaacccatcagaaagaagcgaaaaaccttgaaaaaagattagacaaaaagctaactagaataaacagcataaagaagaccttaaatgacctgatggagctgaaaaccatggcacgagaactatgtgatgcatacacaagcttcagtagccgatttgatcaagtggaagaaagggtgtcagtgattgaagatcaaatgaatgaaatgaagaaattcagagaacgccacaaagattctcctcaagaagagaaactacaagacacgtaatagtcagattcaccaaagttgaaatgaaggaaaaaatgttaagggcagccagagagtaaggttgggttacccacaaagggaagcccat

SEQ ID NO: 475574 - DNA, 728 bp, Homo sapiens
ccattactaattctgattttctaaattactcatttcaacaaatatttaacaaggtcctgttatggtcacggcatggcactatgccagatgactggaaagcaaaagctaaacattcttccgacaacaacaaaacaccacaagctatacatctcagcttgttcttcaacaagcacagtccatttctgagccagtgtttggaatttgaactgacaactcaacccaacaattttgctgctttgtctctctatctcgagttatttttttgtcacatcttagtccagggtgtgagaaacagagctcttacagattttttttttaatcttgctgaggaattatctctgtttcagctccacaacattccttttgaacattctcccactgagcatgtgttcagaggaacttcagcctcatcagtaatctatatctcagctgtcactacttttccagaaaaacctgaattctcagtttcaatggaacacacaaaataagttctcataagactaagatacatccaagtgtgtacacattcacacacccttattcattcatttgtttcagtgtgggcatatgtgtgtaaattttaaaataaataccttgctatatactctctctacaacttaacactttttatcaacaatgtgttgagggcatttttccctattagtacatataaaactaccttattcttttgagtatttatatagtattttgttatattggttgagcca

SEQ ID NO: 475575 - DNA, 1156 bp, Homo sapiens
ctctggcttggatcaaagcaagatgggacagagagctaaggctggtgctggcgaatgtaggctggtgctggcgaatgtctacaaagagtcctgtgatgtgatccatcttcaggtcttccagccatggataccagcacctgctctagtggagttggcaggggagcgaagtggactgtgtgagagtccttggatgaaatttgatccctctcttgatgttcagatttggggagccatattccaaaactcttggtactttcctccattgcgtaaagacacaattctaagaacatttgtgaaatgtaaaagacagagtccaagaccctgtaagcatggcctacacgttgcctctgcggtaatggctgcggtggaagtgctgggtcttggaattactccactattcctattgacaagcaaattctggagcacagccagagtggaaataaaggatgagttactatattgaaacaggaaatagaatttaagaaaataggtacaaaattcagatttttctctctggaggaagatgtttccgaaaagaaaataattagcctttggtgaggttggaatgtaaggaatgaaaagtttgcatgaggaaggtgaaaaggcatgcttggagggagcacagaaaagagcagacctatggatattccttggggtatagacatattgacagttcctatacagcctattgccataggtgtctataaaacattaagctctgatatgtggaaagaccagatttagaaaggcctcagctattcactcatgccttcctgagttcagtaaaacacatggagaaataacaatcttaaaaaaaattgttcatttattttctttttgtgcattcagtgtatgataattatagacacatcatttatgaatgacaaaactattctctgattatctgggttaaagccttggaataagttatcgtgtttacctgtgtttccttcatgatacaaactaaggactaaattgttattcaaaatgtcaatcgtcattccagaagaggctttgaaaaaattataatctagatagatccaccagacagataccagccaggacttttcttatgaagcatacaaaatatttaatggtgtctgtgcctagaattggattcaagtcagataataaggcaaattcagagaaaatgatt

SEQ ID NO: 475576 - DNA, 1470 bp, Homo sapiens
ccctaaacagaggaagctgcccagtgttacacaggtaatgacagggcaagtatccttgactaggtggcaagcagactacatcgggtcactgccaaagttgcaagagtatacacatacactaacagctgtgggcatggccacaggcctgttgttcgcctacccttgcagggtggccgaacagcggaacaccatctgggccctgcaacacttatgtgccctgtatggttgccctctggccattgggcgtgataggggaacatatttcactggacaacaggtacaacaatgggcacaaccaatggacgtaaagtggggattccgtgtgccatacaacccgcaagctgtgggtatgattgaacgatataatgagctcttgaagaataggttatgcttgcatgtcacacccccatctttttggggccgcagttcaaggttggacctggtgctccaaaccttgaatgaagagccacagaaatgtggctggtccagccctggtgaaggctttgttacactgggctgcccaccccccaaccaccttcagttgcagatacacaccaagaattacctcctccaaccaggtatggggatgaatggaaacctgttgttgcctgcccctgtggcctacccctgtggcccctgaaggcagggaacagaaaacctggctttggccatggaccctccaagaccccactgccagtggttggccatcatagctctcttgggggagggcctacatcatgacttgcatgtcactccttgggtgttcaatacatggcccctgcggttgaccgttcatagagaaatggccagggaaggaacccttctccaggggacatatgtactgtctgtgtggcctatcatgagcttccctgtgactttggcacagatacaagactcaaaggaaccatgcggagctgataaagtgtggcaccatctcccagggcaaaaactgttggcatctgcattgttatccagagatgaaaggttagactgtattttgcctgagggacatgatttaactctgttagtacctgtgcctgctctgtcatttcgaccgtaggttgacatgctccaactgcattgtggactgggcccacaccttcactgaggtgaccaatgtttccaactgttggatctgcaccatccttccaggagcagctgcagatggcttgccttggcacatacattcagcatctgcagagaaatggacatggctggagactttgagtcccatggccgacacctggaatgcgacagggcaagctgcagacaaagaattccgcaagacccatagcatgcctgccccatcttgcctgtagcatttatgatgggaggggctggctagtggggaaatatgtagtacccccagctcagggacggcagtgcatagaggaacactggggtaacaccactgtgggatggctaccctgcaaggcctgtgtaaacataacacatgtcaccacaccgaag

SEQ ID NO: 475577 - DNA, 789 bp, Homo sapiens
caccagaaaggacagcagtgtagggacgctagcccagagacctcttttaataaaactggggtggagaggttggtggaagggagggcgctgttaccaccgccacctgacattgataagtacttactggctgccagatcagtgctaagtgcctcacacgcatcgtcctttggactctcagagaaacgccatggggtgtgggtatgcaaggcacacttggtaccacgaagcggtctccatagaagctggcctcacctggctgttaagtcaagcagggagcggcgggtcttgctgctctaggacagtagttctcagccttatcagacataaaagcccctttctgtatgaaacatttcttctggaacctaagaagtccaagaggaaagtgccagatgattcagttcctggtgaggatcctgtttctggtttgcagacgactgcgttcttgctgtatcctcacatggaaaagagagttttctcatgtctcttcttaaaatggcaccaatcccaccatgaccgccctacactcttgacctcatgcaaacctaatcatctcccaaaggtcctgcctccaaataccatcacactggggctagggcttcaacctagaatttttgggggtgtcacaaaggagcccttaggaatgccgaagtcgagttaactgactggaacgggataatgtacttgttagcagaaaccagcaagggttgagttccttctgtttattccatttgagtctagcccccagttcatggatccaaataattttggatttctttaaacagaattgtc

SEQ ID NO: 475578 - DNA, 995 bp, Homo sapiens
gagttaatgggtgcagcacaccaacatggcacatgtatgcatatgtctgctggagtttgctggaggtccactccagaccctgtttgcctgggtatcaccagcagaggctgcagaacagcaaagattgctgcttgttccttcctctggaagcttcatcccagaggggcacccaccagatgccagccagagctctccttcaggaggcacagaggtcggggacccacttgaggaggcagtctgtcccttagcagagcttgagcactgtgctcggagatctgctgcttttttcggagccagcaggcaggaacgtttaagtctgctgaagctgcacccacagccacctcttcccctaggtgctctgtccctagaagatgggagttttatctgtaagcccctgactggggctgctgcctttctttcagagataccctgcccagagaggaggaacttagagaggcagtctggctacagcagctttgctgagctgcggtgggctccacccagtttgaacttcctggtggctttgtttacactggtcatcaggcagggacatttaagtctgctgaagctgcacccacagccgccccttcccccaggtgctctgtcccagtatatgggggttttatctataagtcccttactggggctgctgcctttttttcagagatgctttgcccagagtgtagaaaactggcagtctgcccacagcagccttgctgaggtgcagtgggctctgcccagttcaaacttcctggctgctttgtttacactgactccaagtttaagagttaagaatggcccctggactgataggggccagaaaactgaggccaaggagggttaataaatgttctaatgtcaaaaagtgaggcactggcagatccagtactcaccctgaggtctgatgtaatttcatgctctttcaactctaaagcctaaaggaacacaaaataaacttagtatttctttcacattatagtacatacttaaattca

SEQ ID NO: 475579 - DNA, 491 bp, Homo sapiens
tgaggaaaaactggagtgagctatgcactgccttaaatcagtgcctcgttatagcaccctgggggaggtcctcaagaccctgctccagaggtggctgctgcagccctgcccatggctggtagccagactcttgggaaagtcaagtctttactgcctattggagatcaggatggagcagctaaaattcctgctctacagcaaatctgctgactccctgggctgttttggaggagggaaaggaaggcgattttatcatgttgttctacaagaaagagaagaatcccccgagagtaaccagagaagctgcagcaagagtgccagccaggcagattctcttatctcctggactctgcttggagaggccgaggaacaaagaagaatggcaggggaggaacgggaccgctgcacagcctcgtcatcttttaaacatgtttcttggaaattcagaggcatataggagcaaatttagcttctaaatggcctattcccat

SEQ ID NO: 475580 - DNA, 815 bp, Homo sapiens
tgaataccagaagacaggtattaggggatactgctgttatctcctccttcacaatgagaggattgagacccagagagcttattgttccctgtttctggaatgttccttcttcatctctgatcatccacttcctactgagcacctttgactaccctcatccaaagggctcactctttcaagaacccttttatgattcttggagacttcccagctcacaggaggaggagttccagcttcaaggagagcaagaacttggcacctgtccctgggctgctgcagcagtagccttgcacaggctcctcctgcccagggacgccataaatcgctgggccacggacttgacagccagctgcgatgtgatcagaaagccaacaggagccactgcagaacctttggtggctgcttccttcatgggcctctcatccatcatactagatggaaaagccactgggatagtcaccttctttcccagtggggattcagggagcctaacagagtgcctggaattgagggttctcagtatatgttgcaataaaccaggcaacaagtcagattaatcaaatgatcaattatttaatcactgaatgccaagttagaaggcattttagctcacttcatacctaagctttaagcgttgaaaaaattataagctccttttcctgtcattcctttgtctctgaatcaaccaatgggcatctcatacactcaactctgtggcatctaagttatgttcctataaattatctgccagctctgatttttagtactgatgggctttctaaggctgtgtctcctctctctgctgccaagtgagt

SEQ ID NO: 475581 - DNA, 518 bp, Homo sapiens
ttcaacgaggccaggaacggggaggggttttttggatacacaaaaatgcataatgtgctcatagctgaaccttataagtttcaacaatgccagggctgcaaactactattaaagccaattattccatgtctgatcagtagtgacttaaaagcgtcaaacggtggcaacctaacttcaccaagatttaaagccctgcttcaacttcttgacagagatgcagataaatggaatgctgacagaagaaagcagaaagcaaccaaaaatgttgaattattatgtaatagtgggcacttaaatgtaccaactttgtgccaggccttggaaaaaggcagaggctgtgatgtcacagctcctccaatgacacagcatcaggggacagccagaaatagacatgtggaagcccttgccactggcactctcttgtactctgaaacaacccatttctctcagctcagacaccaggctgctggagaattggagaaccaaaatagactgaacgtctagtcaccctcctagaa

SEQ ID NO: 475582 - DNA, 806 bp, Homo sapiens
tgaataccagaagacaggtattaggggatactgctgttatctcctccttcacaatgagaggattgagacccagagagcttattgttccctgtttctggaatgttccttcttcatctctgatcatccacttcctactgagcacctttgactaccctcatccaaagggctcactctttcaagaacccttttatgattcttggagacttcccagctcacaggaggaggagttccagcttcaaggagagcaagaacttggcacctgtccctgggctgctgcagcagtagccttgcacaggctcctcctgcccagggacaccataaatcgctgggccacggacttgacagccagctgcgatgtgatcagaaagccaacaggagccactgcagaacctttggtggctgcttccttcatgggcctctcatccatcatactagatggaaaagccactgggatagtcaccttctttcccagtggggattcagggagcctaacagagtgcctggaattgagggttctcagtatatgttgcaataaaccaggcaacaagtcagattaatcaaatgatcaattatttaatcactgaatgccaagttagaaggcattttagctcacttcatacctaagctttaagcgttgaaaaaattataaggaatttatagtctggatgggaaagcagaaaaaatacacaaataattagtgtgcagttaaactaaactgagaatctttgcataatgcagtgggttctctgaaaagggaaacagccatgtgggtgagggttgggcatgtactgcaggaatgtgtgcac

SEQ ID NO: 475583 - DNA, 1522 bp, Homo sapiens
tctggccagtttcatccaagaatgctccagcgcatctggctggcagccatgaagctcctaggaatcaaggctcccaggggcaagccaggcatcagcctggtgcaccagacctacacatggccctgccaaaccctgccccgctcctcctgccccttgccccatccttggccctggttgtttagcagtatccccagcctctacctgccagatgccattagcaccaccactcccaagctgggtcagccaaaagtatcttcagacattgccaagtggtttcgggagttttccaccatgactattgccctgctgggttttgccatattcttgctccattgtgcgacctgtgagaagcctctagaagggattctctcctcctctgcttggcacttcacacactcccattacaatgccaccatctatgaaaattcttctcccaagacctatgtggagagcttcgagaaaatgggcatctacctcgcggagccacagtgggcagtgaggtaccggatcatctctggggatgtggccaatgtatttaaaactgaggagtatgtggtgggcaacttctgcttcctaagaataaggacaaagagcagcaacacagctcttctgaacagagaggtgcgagacagctacaccctcatcatccaagccacagagaagaccttggagttggaagctttgacccgtgtggtggtccacatcctggaccagaatgacctgaagcctctcttctctccaccttcgtacagagtcaccatctctgaggacatgcccctgaagagccccatctgcaaggtgactgccacagatgctgatctaggccagaatgctgagttctattatgcctttaacacaaggtcagagatgtttgccatccatcccaccagcggtgtggtcactgtggctgggaagcttaacgtcacctggcgaggaaagcatgagctccaggtgctagctgtggaccgcatgcggaaaatctctgagggcaatgggtttggcagcctggctgcacttgtggttcatgtggagcctgccctcaggaagcccccagccattgcttcggtggtggtgactccaccagacagcaatgatggtaccacctatgccactgtactggtcgatgcaaatagctcaggagctgaagtggagtcagtggaagttgttggtggtgaccctggaaagcacttcaaagccatcaagtcttatgcccggagcaatgagttcagtttggtgtctgtcaaagacatcaactggatggagtaccttcatgggttcaacctcagcctccaggccaggagtgggagcggcccttatttttattcccagatcaggggctttcacctaccaccttccaaactgtcttccctcaaattcgagaaggctgtttacagagtgcagcttagtgagttttcccctcctggcagccgcgtggtgatggtgagagtcaccccagccttccccaacctgcagtaggggtttgagggccaatggaacgaaaacgtacgtagaggcctaatat

SEQ ID NO: 475584 - DNA, 1217 bp, Homo sapiens
gacagcaccacccagaagttctgctcagagcgatgccgctggatgtcacgatggggactgactccagcaagaaagggctgactgatgcagatcctgctctgcagacccagaattggaggtgtggaggcctcgagctggaggaattggaggtgtggaggcctcgagctggaggaattggaggtgtggaggcctcgagctggaggaattggagcattgcttgcacaacgctcaagtgtcccaatgcgttcctgggtcacatggctgggggacataccccctgtggggctagtgccatgtgctgtggctgcaaacacagggcatctttgcgagatcatccagataacagcggcagccagctcttcaaacgtgccaggcccagggcccacagccatcttcccacacgttctcacagcaacccctcgagggaggaatccatgctgatgaggaaattgaagttcagagaggcagggagactgctcaaagtcacacagcagcaagcactgagaatggatttgaactcctgtctgcctgattctcaagtcaggcctcttgatcccatgctgtgctgcaaatggggctgactgagaagggacataggcacttcccactgcgcatgggcgacagctaggggctggcatacagtgtcctcagtgcgtcccgattaggggacagaggttgagaagtctactcgtggggcagggatggacagagcccgagtggcccaaggcccactggataagcagaggtccagctgcagagagggcttagggggaaagggtggacagaaaaggccctgtggcccaggctgggtcagaaagcctgtgatctggggtccagttgtgcctctttccagctgtgtgccactgggcacgttacctcccatctcgctgcctctgcttcaacatctgcacagcaggaaagttgtggaggactagcacctctgtccaaaagtacctggagggggtctggctggaggacaggcccggccaagcctgtgccctctcccttccttccctctctatgtccattctccctccctccctttcttctctccctttacctcccttcctttattttctccctctccaaccccctttttggaaattccttttcagaggctttgcagagacccagtcctccttccagggtgatctcagtgctcccagtggagcactgactctgaggccacctttcaaggggtttggggggtggggtgg

SEQ ID NO: 475585 - DNA, 841 bp, Homo sapiens
gtacatgtgcaggatgtgcaggtttgttacacagaaaaataaaaagatgcctttcaaaatattacttctcactgacaataagcctgatcacccaagagctctgatgcagatgtacaaggaaattaataccattttcatgccagcaaacacaacatctgttctgcagcctatgaatcaaggtgtaatttcaactttcaagtcttattacttcagaaatacattttataaggctatagatgccatagacaaggattcttctgttggatatgggcaaaataaattgaaaatcttctggaaacaagtcaccattccagatgccattaagaatattcatgttcatgggaggaagtcagaattctgctctgaacttcagctttctcgttcccaagttctaatcatttccagctggcaaaaattcatggtggttgaaacgagaaagagaatgaatttgattgaaagattaaaaatgtttcttggagacagtggtttcaaaggtgggataggatcacaggaagaaaggacaaatgctggaggaagtaacagcaacagccaagctacaaagaaagcaatgggggatgacttaggggacaggtcctatgttctccattttggctgctgtgttttggtgcatcttatataacacccaaattaatttgattagcctattttgatttcactgattcgtatctaaactttcttgaattcacttgtggatctatcaaaggcgtcttaaactctattttcatatttttatctctagcattgtaatttttctgtttcttatggctcctgaaattatccatatgtttatagattttgcctaccttttccagtagtcttt

SEQ ID NO: 475586 - DNA, 445 bp, Homo sapiens
tgcagttctcacataaccaggatgaaatgtatgaatgagtgtaggacctctgggattggtgagtggcataaggtgagtacttataaatgtggactcttactgatatgtggttaccactgggggccacagagaccttcccgctgtactttccagaaggcaaccattgtggacattgtggggctgttaggcagcctttcagttggtgaaaaattgctcctggaggcttcccaagttgtcagcatagagttcctgctactgtttcagtgtccacaaagctggccctggtcctatttgtggctgctggccccttcctatttggtcaccatcagtgatccacagataacatccctgagggccctgtccagaccttggactatgagtgaccctcaaggctactttgtttggctgacgaccctgacgaacccctgattttatattttctagg

SEQ ID NO: 475587 - DNA, 1577 bp, Homo sapiens
agcggatgcgaaagcgggagcagcagatgcgaaagcgggagcagcagatgcgggagcgggagcagcagatgcgggagcgggaggagcagatgcgggagcgggaggagcagatgcgggagcgggaggagcagatgggggagcgggaggagcagatgcggaagcgggaggagcagatgcggaagcgggaggagcagatgcggaagcgggaggagcagatgggggagcgggaggagcagatgggggagcgggaggagcagatgcggaagcaggaggagcagatggggaagcaggaggagcagatgcgggagcaggaggagcaggtgcggaagcaggaggagcaggtgcggaagcaggaggagcaggtgcggaagcaggaggagcaggtgcggaagcaggaggagcaggtgcggaagcaggaggagcaggtgcggaagcaggaggagcaggtgcggaagcaggaggagcaggtgcggaagcaggaggagcaggtgcggaagcaggaggagcaggtgcggaagcaggaggagcaggtgcggaagcaggaggagcaggtgcggaagcaggaggagcaggtgcggaagcaggaggagcaggtgcggaagcaggaggagcaggtgcggaagcaggaggagcaggtgcggaagcaggaggagcagacgggggagcaggaggagcagatgcggaagcaggagaagcagatgctgaagcagaagaagcagatggggaagcaggaggagcagatgggggagcaggaggagcagatgcggaagcaggaggagcagatgcggaagcaggaggagcagatgcggaagcaggaggagcagatgcggaagcaggaggagcaaatggcggagcaggaggaacagatgcagaagcaggaggagcaggtgcgaaagcaggaggagcaggtgcggaagcaggaagagcagatgcggaagcaggaggagcagatgcggaagcaggaggagcacatgcggaagcaggaggagcagatgcggaagcaggagaagcagatgggggagcaggaggagcagatgcggaaacagaaagagcagatgcggaagcgggaggagcaggtgcggaagcgggaggagcaggaggagaggctgtgggttgagtatgagaagatgcaggaggaggaggagaaggtccgggggcaggtggagaagatgcgggagaagaaggagaggatgggagagcaggaggagaagatgcaggaggagcggtgctcagagccctgcctccctccctccaaatatccttgtgatatgagccatgctggcagcctgaagcctgcacgagaggctgggaagggctattcccatgacaaccgcactgcacagcagatcacgcagctgccccctggaatgaagaacacccaggagcacccaggcttaggcagcacctcctgcatcctattcttctaccgaggagacaagaaaaagatcaagatcatcaatatctaaaaagaacggtcaacaaggcctacagaagtgtaagccgccacgtgaccttgtgaatacagtctgagaacaaacttgaaaaaaagaaaatttattttaaattgtggcaaaata

SEQ ID NO: 475588 - DNA, 581 bp, Homo sapiens
caggggtcacaaggtggaattcttgataaatcactcctatgattatggtcaacttcctgtttttcctcctggagatgtcagtttgttttcaaaacagaggtatcagtcaggagcgctattgcttggacaaagtctgctgtgggtctgggttcctgtccgggtgcctgccttacgggctgtggctcaggctttcagaccacttgcttggatcctggacatctccatgtgaacatgtgcacccaccatcgtcacaggagaataagagagaaatggagagacagcgccagcaaggacagctccagcctggaggagcacgtggtactgcgctttgctcttctgtagctagaaaaatggctgccattcactttgagggtggggagtttactcctggaagtagagaagaaaggatcctgctacctaggcttgccctttctttgccacagtcgtcttctgagaactatcatgtgaccctttcaaatgaaaacgtggtcacatgatactcttaaaaattaattttcctactccagcatcatttgatcgtgttctcacctgcaaagaaatggaatcgaagccctcacctt

SEQ ID NO: 475589 - DNA, 537 bp, Homo sapiens
gcaatttccctgtcttgataaatcagctctgtgtaggcggcctgcacaaatgacagctgatcaccacattgtactcctggaggaggagattaataggagcatgacagacaagtttcagaaactagagttcctcaagctgaagaagagagaaaggcagaatatttcagtagtgattttcaattcagggcacttctttaacaaatatggaaaagttgatcttggagtgctttcatccccgttcaaaggcagtgatagacaacaggaagaacaagaaagggaaggcttcttggaggcagtaactgagcaacatattccccgacaaaaaagggttgttgaaatgatcagctatagcacttatctcataatcaagaaaatatcatctttctgctctggaatttcctcagtcataaaaagatcaagaattcctgggggtatgctcaagttaactggtcaattcctcgctacaattgcctagtaagttgaaaactagaaattctaaccaatctgctagttgattctgttgtctgctggttgctc

SEQ ID NO: 475590 - DNA, 670 bp, Homo sapiens
gcaggggggtgcccacccccctgcaatatggattgtaatatccaggggaggagagggggcgttcgagttgggagtttgccctgcaagagacagtcaaccactgacttcagtcgaacgtacttggaaagggaagaacttaaaccagccatgaacagaagaaagccaggttttctggaaacatcgccaaaacccagcaatttctcagaattttcagaggcgccaggggggtgtttgcatttcaatggaaaaagttctgaaagctctggaaacttttctcagttttactttctcattgaaaggcaaaaaccatggctggatgcagctacaatccaaggaacaccaaggattgccagcaactaccataaactagaaaataagcatgaaacagactcttcctcagagctcctggaaagaatcaacctgaagacagctttgtttcagattcctggcctcctgaattgaatcagtagagagggtcagggcagtgatcagggaagagacaatggccaatgtgaggatgcaatatctagttggttgccttaaactacagaaccattagaagaaagaacgttaacaatgtttttatactgtctatttaagagagaaaggaggaataatatatccacatggtcacatttccctttgattaaaagtttacccatgggacatt

SEQ ID NO: 475591 - DNA, 596 bp, Homo sapiens
tcctcttggtcccccgccaagggaagctgtgagtgattgtgccatgagcaacggtgcattctggcccagatactacacttttcccactgtctttgcaacccacagaccaggagattcttttgggagacacctcccagcaggggttgacagacacctcatacaggagagctccaactggcatctggcaagtgcccctctggaacgaagctgccagaggaaggaacaggcagcaatctttgctattctgcagcctctgctggtgataagcaggcaaacagggtctggagtggacctccagcaaattccaacagacctgcagcagagggtcctgactgttagaaggaaaactgacaaacaggaattgcatcaacatcaacaaaaaggatatccgcacagaaaccccatccgaaggtcaccaacatcaaagaccaaagaacgcctcttctcctccaaaggacaacaattcctcaccagcaagggaacaaaactggacggagaatgagtttgacaaattgacagaagtaggcttcagaaggtgggtaataagaaactccctccaagctaaaggagcatgttctaacccaatgcaaggaagc

SEQ ID NO: 475592 - DNA, 856 bp, Homo sapiens
aaaatcaaggtgccagcagggccatgctctctctcatggttttaggagagaaatctgccttgacggctgtattaggccattcttacattgctataacgaaataccggagactgcatgtattagtttgttttcatgctgctgataaagacatacccaagactgggcaatttacaaaagaaagaggtttaattggacttacagttccatgtggccggggaagcctcacaatcgtgacagaaggcaaggaggagcaagtcccatcttacatagatggcagcaggcaaagagagaatgaggacgatgcaaaagcagaaacccctgatgaagccgtcagatctcgctgtacaggaagcatagcaccagcatctgcttctggagaggtcttaggtttttactcatggttgaatgcaaagagggagcaggcttcccacatggtgagaaaaggaacaagagaaggcagtgggggaggtaccccactttgcaataaccagacctaaaatttcttccttttatgcctatcttacctgtatattaaagacatacttaattttcatgaaattttttttaatgtttgttatctcatatgttgttagggtaactggcaataagcctatcttcccaattatgatgaatatttgaagtgactctgtaagtaatttacaagtaaagatttttatctaaaaaaaagttatccacttcatttcctttttatcagttctctgaatgtctttttccccccaaatatttacacttttttgggtttttttcaaggtttatactcctatggactttttagaaataaatattctataaactctgaaagtttcaaaagagggctaaaatgtatttttataat

SEQ ID NO: 475593 - DNA, 574 bp, Homo sapiens
tgagtttgacgaattgacagtagtagcttcagaagaaactttcgaaaacaaagacttaaccttctgagcaaagacagcttcagacctccaggatacctgcccttttgagaaaagaaagatgaaagcccctattacggagagctgttctgttcaagttatctattgctatgccatgaaagggactcagtgtcacttccagtgtactctattcattgaggcagtcacgaagatccactcagtttcaagaggaggggccatggactttacctcttggtgggagaagtgtgaaagaatttgtggacgtgttttaaaaccaccacaagagcatataagaaagaaggaggaggaggaggaggaggaagtgaaggaggaagaggaggatgaggaagtgaaggaggaagagggagaggaggaggaggaggagaagaaattacttgtttttcagttagattctttttctcctctatgtccacccatgaccaccaggctgctgagaactatctcccttgcttggaaatcctctgtaaagctctcctgctctcacttttggtcccactgtcccaaatcctgatca

SEQ ID NO: 475594 - DNA, 562 bp, Homo sapiens
ggctccactgacgcccatctggaagagagtgttgtggggagagcatggccgtgagggcctctctccactccacgctgggactttcttggaacaactctatgaaggaggcagaggccactcttcttcagggaagctcctttgaaatgcaagacaaacgttttgtctttgttaaatggggagatggcggggtgtttttgtcttctccccatggacttccccttgctccctatagaggctggcacattgcttttgcacaaagagatacttccctgcttgtctctgagacagtacatccaattctctgggtcctcatctttggaaggagaacatctaccatctatcatgaagaagacagaggaggaggagaaagaagagggggagaaggaaaaggaaatggtgtatttttaaagaaatggttacattatgggaatgaatacgcaaaaatgtcaataaagcatactgagtttgaaagttcctatgtcttaacaaggccacaatgagtagcatttaaatatttatgaatgcattaataccttggaaagtgaggtgacttatgtcacac

SEQ ID NO: 475595 - DNA, 937 bp, Homo sapiens
cgctgtgttaggagccaccggggtggctgcagtccaggtggatgtggaaatgtcactcagcctttctcaagtccggcccggcttggagcagattggcagcagggtcgacatctctcaaagtctctgatggaccccgaattttcccaaactggttgccaagacccaaggggcaggagttaggctggaaccacgcagaaacccgccctggggaacaggtttctccttcctgggatgaatccccttcccacgcccatgacccatgcgttcctgcggactccccgaccctgagtgaaatggactcacactggcgcttattgtctctgatctccatgcagatgatcagacagtcgggaacatcatatggaatcatttttgttccaaaacaaaacaataaatgtgctacagcttctggaggtgtgcagaggggtcttcactggaggcatagcagaaccatggaaattaggctaagggctacttctgttttgaaaccgaaagtcttctctcatgaaaatttatggtaaattttccagccctgcaaatgagtactcttaaaaacccttccagacagactaataaaatagaagctcattcaaaaaaaaaaaaaaaaaagctctctgctttcatgaaaaatgatctaccattaagactcctgagattctatgaaaaagatgaaaaaaagaggctaataaattctgggggaagacttaggtgtcagagatgtcaaagctgaataaaatggacagctgagcattcttgccaacaagaaatgatttacagatgagaaagggatataaaggagtaataatgaggccattatgcctgatgctttggaggcaaagatgcttatgctcaacgtattctagcaaggtggggccacagctggtgcacgggctgactgtgattgcaggttaattatagacaatcaataagtgtagac

SEQ ID NO: 475596 - DNA, 678 bp, Homo sapiens
ctgcagcaaaattcacagtgttgtccaagactacaataatcttaagaatggaatgggattggatctaattcccaactcagttacacagatgggccctaatccaattatgagtgggatccttataagaaaaggaaagagacacagacgtgcatcctcgcaggtccacttccgagcaagatcagacacaagggaagtgtaccacggaaagatgagccttcagaggcagcaaggccctactgacactttgatgttgggcttcagccttcagaagagcaagagagtacattccaattgttcaattgtacccagtgtgtggcacttccttagaacagttccagaaactagaacagtattcaggcaggctgctcagtcagggcagcataatactccaggaaccatcaagagaaacaaacctgaaaatgcagacattcagatctttctcccagtcctgggtttgttaatttctacgtgggccttactgaaagctgatgagatgctgtgtcctgtgtgcatccaccctatcttggccccatgctgtagatcacatagggaggtcttttccattcgtttctttcaggccagcatgtttgagatgcacacgcaattccacagcattctcacaggttcacctccaaggtggatcggccactggtgacactgagtcttttctgttaattt

SEQ ID NO: 475597 - DNA, 541 bp, Homo sapiens
gcattgtggggcattgctaaacctggccaaagtaatgagaaaggatgatgatgatgatgatgatgatggtgatgaagatgatgatagtgatgatgatggtgatgatgatgatggtgatgataatgatgatgaagatgatggtgatgatgatgatcatgatgatgaagatgatggtgatgatgatgatgagttctccagagtcccagacaatccaatggtgccaggatggcgggtctggaatacccgatccctacctgagttcagaggtaacgagggaggccccccagcaacagaactattttgtgatgtgaaaactaaccatttaaaagatttcttcctcagatgcctcataggtcaatgttcaatggatgaaatacaattttatgacaacatgttatcacaacttttagaaaaatatgtaatatctccttgtactaatagtttatgttctctggttgataccccactttcagacctaacatcaggaactgatgtgttcctggtagtgtagacagctctagtacccctggaagtctctttc

SEQ ID NO: 475598 - DNA, 847 bp, Homo sapiens
ggtccctgtctgcctagaatttctctgcctcctgcctctattaataggtacagaaatcctttgcaggccaagatggtggaaaagtcaggggtgggaacctcaaagcaaagtgacagccacattttctgcagcaagccttccctgagtaaaatccacaggcagcatagccaggaaggaagccaatggactctggccatgatcgctggcctggccccaggacctagctgcatacttggtgtgcctcagaagtcacagcttctacctgagtttgtagtagaaaatcagtgtgtttccctacacaggctgccgccagtctccaacgtccacattcagcatatcgaaatcaccctcccatgtcagcacatttggattgaacccactgtacaggagcagcacagtagcttgcagcagctgtacctgggaagcccaccaaattcaggccaggatgaagtcagtggaggcgccaaagctcctgttgaggacaggggtgtcttgctcattggcctgaacagaagtgagctagagggatcatctgtcaatcatggtggcttcttagaatacccatttgggcattccctcaaataaatggcaactgaaaccccattgtggctgagtagttatgcttcaaaaatggtcttcattccttttatgtgttatccttatgttgtaaaaaaaatataagaacatgaaaataaattcaaaagaaaacgattattttctcaccccaacactaggttgtttttgtatattccctcctagtctcatccacacatacacagatacttccctaagttgtaatcaaagagtataaatgtttctgtattctgcatttttatttaacataagc

SEQ ID NO: 475599 - DNA, 936 bp, Homo sapiens
aatggaatggaatggaatggaacggaacggaatggaatggaatggaatggaatggaacggaaaggaatggaatggaatggaatggaatggaatggaatggaattaacccgaatagaatggaatggaatggaatggaatggaacggaacggaacggaatggaatggaatggaatggaatggaatggaatggaatggaatcaacccgactgcaggggaatggaatggaatggaatgcaatggaatcaacccgagtacaggggaatggaatggaatggaatgcaatggaatagaatcatccgtaatggaatggaaaggaatggaatggaatggaatggaatggaatggaatggaatggaatggaatggaatcaacccgattgcaatcgaatggaatggaatggaatgcaatggaatggaatggaatggaatggaattaaaccgaatagaatggaatggaatggaatggaaaggaaaggaacggaacggaacggaacggagtggaatggaatggaatggaattgtatggaatggaatggaatggtacggaatagaatggaatggaaagaattggaatggaatggaatggaatggaatggaatggaatggaatggaatcaaaccgagtgcaggggaatgtaatggaacggaatgcaatggaatggaatcatccggaatggaatggaatggaatggaatggaatggaatggaatggaatcaacccgtgtgcatggaatggagtggaatggaatggaatggaatggaacaaccacgaatggaatggaatgtaatggagagtaagggagttgaatagaatcatacgaatataatggaatggaacggtatggaatggaatggaatggatgcatggaatggatcaccgagtacatggacggatggatggaagtattaatgaatgatgaggaccagctcatttccgc

SEQ ID NO: 475600 - DNA, 1222 bp, Homo sapiens
gaatacaatggaatggaatggaatggaacggaatggagtggaatggaatggaatcgacccgagtgcaggggaatggaacggaatggaatggaatggaatggaatggaatggaatggaatcgacttgattggaatggaatggaatggaatggaatggaatggaattaacccgaatagaatggaatggaatggaatggaacggaacggaacggattggaatggaatggaatggaatggaatggaatggaatggaatggaatcaacccgactgcaggggaatggaatggaatggaatgcaatggaatggattcaacttgaatggaatggaaagaatggaatcaacacgagtggaatggcatggattggaatggaatggaatggaatcaacccgagtacaggggaaaatcgagcggaacggaacggaacggaacggaatggaatggaatggaatggaatggaatggaacggaacggaacggaatggaatggaatggaatggaatggaatggaatggaatcaacgcgagtgcaggggaatggaatggaatggaatgcaatggaatggaatcttccggaatggaatggaatggagtggaatggaataaacccgagtgcaatggaatggagtggaatggaatggaatggaatggaacaacccgaatggaatggaataatcgatccgaatgtaatggaatggaatggaacggaatggaattgaatggaatggaatggaatgcaatggaatggaatcaacccgagtgcaatggaatggagaggaatggaatggaatggaatggaaactacccgaatggaatggaatgtaatggagtaatgaatccgaatgtaatggaatggaatggaacggaatggaatggaatggaatggaatggaatggaatggcatgcaatggaatggaatcaaccgagtgcaatcgaatggaatcgaatggaatggaatgcaatggaatggattcaacttgaatggaatggaaagaatggaatcgacacgagtggaatggcatggaatggaatggaatggaatggatcacccgagtacaggggatggatggatggatgcatggaatggatcacagtatggatggaaggatggatggatggatggatggatggatggatggatggatggatcactcgttgcatcgatggatggatggatacccgatagatgatgatgatgacgacgatgatgatgatgatgtccgccc

SEQ ID NO: 475601 - DNA, 4512 bp, Homo sapiens
tgaatagaacggaaaggaatggaatggaatggaatggaatggaatggaatgaaatggaatggcatggaatgcaatggaatcaacccgagttcaatggaattgaatggaatggaatggaatggaatggaatcaactcgattgcaatggaatggaatggaatggaatggaatggaatggaatggaatggaatggaattaaccctactagaatggaatggaatggaatggaatggaatagaatggaatggaagggaatggaatggaatggaatggaatggaatgaacccgaatagaatggaatggaatggaatggaatggaatggaatggaatggaatggaatcaactcgatttcaatggaatggaatggaatggaatggaatgcaatggaagggaatggaatggaatggcatgaaattaacccgaatagaatggaatggaatggaatggaatggaatggaatggaatggaatagaatggaatccacccgagtgcaggggaatggaatggaatggaatgcaatggaatggaatcatacggaatggaatggaatggaatggaatgcaatggaatggaatggaatccacccgattgcaatggaatggagtggaatggaatggaatggaatggaaacaacccgaatggaatggaataatcaatacgaatgtaatggaatggaatggaacggaatggaatgcaatggaatggaatggaatgcaatggaatgggatcacccgagtgaaatggaatggaatcgaaaggaatggaatggaatggaatggtttcaacccgaatggaatggaaaggaatggaatcaacccgagtggaatggaatggaatggaatggaatggaatgggttcaactcgaatggaatggaaaggaatggaatcaacccgagtggaatggcatggaatggaatggaatggaatggaatggaatggaatggaagggaatggaatggaatggaattaacctgaacagaatggaagggaatggaatgcaacggaatggaatggaatggaatggaatggaatggaatgcaatggaatgggatcaacccgagtacaggggaatggaatgcaatggaatgcaatggaatggaatcatccggaatggaatggaatggaatggaatgcaatggaatggaatcaatcaacccgagtgcaatagaatgcagtggaatggaatggaatggtatggaaactacccgaatggaatagaatgtaatggagttgcaggggaatggaatggaatggaatgcaatggaatggagtcatccggaatggaacagaaaggaatggaatggaatcaacccgtgtgcaaaggaatggaaaggaatggaatggaatggaatggaatggaatggaatggaatggattcaacacgaatggaatggaaaggaagggaatcaacccaagtggaatggcatggaatggaatggaatggaatggaatggaatggaatggaatggtaccgaatagaatggaatgcaacgaaatggaatagaatggaatggaatggaattgaatcaacccgagtgcaatggaatggagtggaatggaatggaatgacatggaaacaacccgaatggaatggaatgaaatggagttgcaatggaatggaatggaatggaatggaatggaatggaatggaatggattcaacccaaatggaatggaaagcaatggaatcaacccgagtggaatggcatggaatggaatggaatggaatggaatggaatggaatggtacggaatagaatggaatggaacgaaatggaatggaatggaatggaatggaacggaatggaatggaatcaactcgattgcaatggaatgtaatggaatggaatggaatgcaattaacgcgaatagaatggaatggaatggaatggaacggaatggaatggaatggaatggaatggaatcgaatggaatcaacctgagtgcaggggaatggaatggaatggaatgcaatggaattggaatggcatggaatggagtggaatggaatggaatggaatggaatggaatggtacggaatagaatggaatggaaggaaatggaatggaatggaatggaatggaatggaatggaatggaatgaacccgtgtgcaatggaatggaatcaaatggaatggaatgtattggaatggattcaactcgaatggaatggaaaggaatggaatcaacccgagtggaatggcatggaatggaatggaatggaatggaatggaatggaatggaatggtacggaatagaatggaaaggaacgaaatggaaaggaatggaatggaatggaatggaatggaatgaacacaatgcaataatggaatggaatggaatggaatggaatggaatgaaatggaatggaatggaatggaatgaaatggaatggcagggaatggaatggaatcaacccgagtgcaaaggaatggaatgtggaatggaatggaatggaatggaatggaatggattcaacccgaatggaatggaaaggaatggaataaacctgagtggaatcgcatggaatggaatggaatggaatggaatggaatggtacggaatagaatggaatggaacgaaatggaatggaatggaatggaatggaatggaatggaatcaacctgagtgcaatggaatggagtggaatggaatggaatggaatggaaacaacccgaatggaatggaatgtaatggagtagaatggaatggaatggaatggaacggaatggaatggaatggaatggaatggaatgcaatggaatgggatcaacccgagtgcaggggaatggaatggaatggaatgcaatggaatggaatcaatcaacccgagtgcaatagaatgcagtggaatggaatggaatggaatggaaagtacccgaatggaaaggaatgtaatggagttggaatggcatggaatggagtggaatggaatggaatggaatactacggaagagaatggaatggaacgaaatggaatggaatggaatggaatggaatggatggaatggaatggaatggaatcgaatggaatggaatggaatcgaatggaatcgaatggaatggaatggatggaatggaatggattcaactcgaatggaatggaaaggaatggaatcaacctgaaatggaatggaaaggaatggaacggaatggaatggaaggaatggaatggaatcaatctgagtgcaggggaatggaatggaatggaatggaatgcaatggagtggaatggaatggaatgcaatggaatcacctcgattgcaatgcgatggaatggaatggaatgaaatggaagggaatggaatggaatggaattaacctgaacagaatggaatggaatggaatggaatggaatggaatggaatggaatggaatggaatggaatggaatgcaatggaatggaatcaatcaacgcgagtgcaatagaatgcagtggaatggaatggaaaggaatggaaatttcccgaatggtatggaatgtaatggaggcaatggaatggaatggaatggaatggaatggaatggaatggaatgggttcaattcgaatggaatggaaaggaatggaatcaacccgagtgcaatggcatggaatggaatggaatggaatggaatggaatggaatggattcaacccaaatggaatggaaaggaatggaataaacccgagtggaatggcatggaatggaaatggaatggaatggaatggaacggaatggaagggaatggaatggaatggaatggaatggaatggaatgcaatgcaatgggatcatcccgagtgcaggggaatggaatggaatggaatgcaatggaatggaatcaatgaacccgagtgcaatagaatgcagttgaatggaatggaatggaatggaaagtacccgaatggaatggaatggaatggaaatggaatggaatggaatggaatcgagcgcaatggaatggaatggaatggaatggaatggaatggaatggaatggattcaacccgaatggaatggaaaggaatggaataaacccgagtggaatggcacggaatggaatggaatggaatggaatggaatgcaatggaatggaatggaatggaatggaatggaatggaatggaatggttcgattcgaatggaatggaaaggaatggaatcaacccgagtgcaatggcatggaatggcatggaatggaatggaatggaatggaatggattcaacccgaatggaatggaaaggaatggaataaacccgagtggaatggcatggaatggagtggaatggaatggaatggaatggcatggaatggaacggaattaaccctaatagaatggaatggaatggaatggaatggaatggaagggaatggaatggaatggaatggaatggaatggaattaacccgaatagaatggaatggaatggaatggaatggaatggaatggaatcgactcgatttcaatggaatggatggatggatggatgaatgaatgaaggaatgaaagaatgaatgaaataccaaatagagtgg

SEQ ID NO: 475602 - DNA, 560 bp, Homo sapiens
tagaatcaatacgaataatggaatggaatggaatggaatggaatggaatggaatggcatggaatggaattaacccgaatacaatggaatggaatggaatggatcggaatggagtggaatggaatggaatcaacccgagtgcaggggaatgtggaatggaatggaatgcaatggaatggaatcatccggaatggagaatggaatggaatggaatgcaaagaaatggaatcaactcgattgcaatggaatggaatggaatggaaaggaatagaatggaatcaacccgagtggaattgaatggaaaggactggaatggagtggaatggaatggaatggaatggaatgcaatcaactcgattggaatggaatggaatggaatggaatggaatggaatggaatggaatcactcgattgcaatcgaatggaatggaatggaattaacccgaatagaatggaatggaatggaatcgaacggaacggaatggaatggaatggaatggaatgaaatgaacgaacgaacgaatgaatgaatgggggatcctatagatcgacctacagcat

SEQ ID NO: 475603 - DNA, 1590 bp, Homo sapiens
tggaatcaacccgagtgcaggggaatggaatggaatggaatgcaatggaatggaatcatccggaatggaatggaatggaatggaatgcaaagcaatggaatcaactcgactgcaatggaatggaatggaatggaaaggaatacattggaatcaacccgagtggaatggaatggaaaggactggaatggaatggagtggaacggaatggaatggaatggaatggaatggaatggaatcaacttgattggaaatggaatggaatggaatggaatggaatggaatggaatggaattaacccgaatagaaaggaatggaatatggaatggaatggaacggaacggaacggaatggaatggaatggaatggaatggaatggaatggaatggaatcaacccgactgcaggcgaatggaatggaatggaatgcaatggaatggattcaacttgaatggaatggaaagaatggaatcaacgcgagtggaatggcatggattggaatggaatggaatggaatcaacccgagtacaggggaatggaatggaatggaatgcaatggaatggaatcatccaatggaatggaatggaacggaacggaatcggaatggaatggaatggaatggaatggaatggaacggaaaggaagggaatggaatagaatggaatagaatggaatggaatggaatcaacgcgagtgcaggggaatggaatggaatggaatgcaatggaatggaatcttccggaatggaatggaatggaatggaatggaatggaatggaatggaatcaacccgagtgcaatggaatggagtggaatggaatggaatggaatggaacaacccgaatggaatggaatgtaatggagaaatcatccgaatgtaacggaatggaatggaacggaatggaattgaatggaatggaatggaatgcaatggaatggaatcaacccgagtgcaatggaatggagaggaatggaatggaatacaatggaaactacccgaatggaatggaattgaatagaatcaatccgaatgtaatggaatggaatggaacggaatggaatggaatggaatggaatggaatggaatggaatgcatggaatggaatcacccgagtgcaatcgaatggaatcgaatggaatggaatgcaatggaatggattcaacttgaatggaatggaaagaatggaatcgacacgaatggaatggcatggaatggaatgcaatggaatggaatcggaactcgagattgaggggaatggaatggaatggaatgcaatggaatggaatcgatccaatggaatggaatggaatggaacggaacggaatggaatggaatggaatggaatggaatggaacggaacggaacggaatggaatggaatggaatggaatggaatggaatggaatcaacgcgagtgcaggggaatggaatgtaatggaatgcaatggaatggaatcttccggaatggaatgggatggaatggaatggaaacaacccgagtgcgatggaatggagtggaatggaatggaatggaatggacacaccgaatggatcgattaatgagataaggagtgataggaccggctgattacgg

SEQ ID NO: 475604 - DNA, 620 bp, Homo sapiens
ctgagggggtgttggtcaaagggcacaaagtttcagcagtaagatgtcctgtggaatatctgagctacctgctcagacctacagggagtctgggaggaccaagctggacaggggtgcactgggcagccatgcctacatttccccagtgacaagcataagcacgagatccaagttggagactgggggcagttgccgagcacccagagatgtgctggggtatgaagtggagaaacttctgctgttgaacgttctctgctggaagggaggactagcatcaattcctaacctagaagagtgggtaaacgaatgcaccaaatgcctggaaatattcctgggcatggagcagacagggcactgctgcaccaagatctctgcacagaaagggaggggtgactcaagttgctcatccacacaagcagttgcaccaaatgtctggaagtacgttgcccagagaacagcagagtagccactgcagagcagagttaccaccattgcaacagggtctttgtagcggaagtgaagggcagttcaggcccctattcctggcagtgagtgcacctaatgcctggaaatatgcccaggtggtgagtggagggggcaccattgcatctggttcttgt

SEQ ID NO: 475605 - DNA, 597 bp, Homo sapiens
tggcttaagcttcaattgccaatactgtgaaaagttctcttggtccagttggcttggataaaatgttggtggatgatgttggtgatgtaaccattactaatgatggtgcagccattctgaggttaccggaggttggggctatggcaattagaagagctttaaaaagggaccttaaatgcattgctgaaacttctggagggactgttctgtcaaccctggccaatttgaagggtgaagaaacttttgaaactgcagtgtcgggacaggtggaagaagtggtacaggagagaatttgtgatgatgagctgatcttaatcaaaaccagtaaggcttgtgcatctgcatcaattatcttacatggggcaaatgatttcagcagtgctgtccaaacagaactttctgcgatgatggaattgctctatatcttcactgtccagtaaggtgtccattagccacaggtaactattgagcaattaaatatggctagtgcaactgagaaccttaatttttattgtactttatttaatgaatttaaacttaaatatcaacatgtggctgtgagtttttacatgtggtttttgattaactagtatgatc

SEQ ID NO: 475606 - DNA, 750 bp, Homo sapiens
tgctgattggtttctgagcatgcaaaaaagttaaaacaaagaacccccatactaccagtacagaatggctatactggtatacaattgcaccaacagtggcttcacattcagtttttctttccagctgcctgcccgactggcctacagagacaataggccacaaccaaacacagcaataacatccttccatagaattgtatcccaactcctacaaatattcagtgccctgtatcagttcccagaggcaactgacagcctctctgccactgttgctgcagccgtacctgtcccagcaagactaatggcagcaagggagggtactgctacaaagctttggcagagagcctgtggattgtctccgggaagtccagcccagagaaatgcagagccacacctggctgaagtgatccacttgttaattactgtgataaactcctggattgcaaatgcacagacttcaagactggtcaattttcttgggtcattaactgcttgcaatgcctatcagctgcacaaggcatccattaatgactcttctttgccttaaacaggcagggactaattggtgaactcatctgggactgaggagaagtctaaaaaatcttagtatctacacaataaaatttctaagtgataagaaagtaaacaaaatcatagtgcattttaaaattgatgctgtcttaacatttaaagaaaatacgataataacacttaaatgtttcatataaagtgtgtcttgctgaaccctaa

SEQ ID NO: 475607 - DNA, 1001 bp, Homo sapiens
ggttcacaaaacacaggtcatgttggaggcagcatcggttcaggaactagccctgaaagtctgtggagcctggcttcccagccctgcccttcttgccgctccctccagtcagcggcagaagtacaggtcccataccggacaccttggaggttcgcgcctgggctgcactgagaacggcagtcagttctgcggaacccaaacgagggcgctgcccttgtcctgtgcccatctcacagccatggcaaccctgtggtgttactgctgctgtgcccattttatagctgagaaaaccaaggccaggagaggcaccaaacccagtgggggtccaagggcacaaggccagctgagtcagcaactacgccctcggactaaaaactttaataagaaacagaaaacctggaggaaacggcgctcctgccaagtgtataaattgtgccagctcccagccacatcggagcccagcaccactctcctgggcaacactctctcgaagtgcctcccagcacgccccgctgtctgccagccccctgcgtcagccccgtctttggagtcacccctgctgccccatcaccttatttcttccagaggaaccagaaatccagagttgtgtgtgaaattgcctgatttttaactctgggctatgagttcccgtgttttaaaacactctgcagaccagacaaaacatctgtgggtcacggctgtcactgtgcagcctctaatctagaaaggatcctggatttcctatcgcagacttggccaggctcaatttttcttttctaaaatccttcttaactaacttgttagatttcagagctgtagttcaagctgagtcagaaggatttcactctagttggcaacagctagaaaatgaatgcttagaaacatttctgccctcagattcacttcgtggagccccctggggcggtgggggctcagctgggtggccgagagtagatgacaggaagggaaggcgcttctacattggtgggaagctcaccatc

SEQ ID NO: 475608 - DNA, 827 bp, Homo sapiens
cttaggacctacattttcctgcaaggatgaataacatcgtgtttgttgatggggtgtgcgggcacaaggtcatgctgtctgagtggttccttgaagctcctctcacttggctcgggggtaacagtctccactaccccatagcaagacatggagtgagggaaacagggagaagagaaacaccacagcattccaaactgcctccaaagaaaatgtctaaaaactcttcatcagtttcacagaactatgccatcttcttagcctgccctgcagattggggtctaacatctttggcagcttatccacagacccaagcagcagtaggagagaaagacattcgtaccaatgcctggagactcgaagaaagacccatagacattattaatagtgaaactcacacccagccctctttaatcgtcataacattagcacagggacctagaccgtgcaccagatataagaaagccagtgggtcctgggaggaactggaggagccggagccggtgctggcagtgcggggcttcaaggagctgaatcgcagaggggtttccaggctgttccattgtatgttatatgatgtaacccccttcaaacgacttcagtgcaacagtgtgataagcactggagtaaagacttgtaaaaaaggaaaaccatgagcacaagagggaatagttatttttatttaaagacagaaagcaggacacaatgtcaagagtataattctagagtcatatttatagggttggaatcttgttccaccacatattagctaatgattctgaatctttgtgcctgaattccctcacctggaggtgttgaaagcccttccc

SEQ ID NO: 475609 - DNA, 2738 bp, Homo sapiens
ctgttttggtgtttgtttatttgtttgtttagcagtcatcattgccccttctctggaaaaaactaagaaactcaagaggagtcatcagaattcctgccatgtgggagtcatcaacccaatgggtgacttcttttctgctccacatataagagccaaggagcgggagctgaaggtggagggggcagaagaactcgggttgtggtcatcacccacatcagatgcctgtgcaactggggcccctgctaggcctactgaagagcctgcccatgccctgcccttcagcagtgtccagacatctgccacaggcacagttggccatcccgtgtgcaccacagcagcagcagctaagcagatgcctgtcctttccttcatccctgctccaagaccccaacactccaggagatacagaaaagacgaaggaagagcgggaagcagaggagcaggagagaagcaatgtacacacaattcccccagggtaggaccactggcccctggtcacacctggactgacaggaagagtgaaaaagtggatataatctgacactcgagatataaacttaactttttaaacctgaaagtgtctgaaatgccacagacgcttcctgagacgtcgtgaagggacagaaaactctcatcaaagcatgcctgaaaacaatgtaggagaaatcaaataaaagggcttcatgttagtatcccactgactctccaataaactggttacacagcaaaagaaactgacttccatctccatcttaaagataaattcacatgatcttcgaattcgaaaggcagcagtaaggcagaaattatttctcttctttctctggcagcagtagaaggcatagcatgggcctcctaaatgattacttagaccgagccaggacaatgagattcaatcctgaaatttttttcaaacttggaaagaggatctcttttccatgggattgaaaatagagctcctgagaacctgcctgatggagagtgcaacatagagaaaagcagaacgaagacacagagagaaggagttccattttgacttctagatccaaccttgcctgcagctgagcttgttcactgagtaagattatcactatacttttcagttttatgagccaataaatccctcacttttcttcagctaatttgaattggtttctgtctttcacacctaaaacagtgctatcaaaatgtaacaatcaaaagtacatagaatttgggatcagacaaactagattctaatatatctctgatacagtttccacctctagagataataattccctcttcctaggcctgttatgaggattaaatgagatgctatgtctagtacttttatgtttggctttttgggtatggtttaaggcatatgtctaaatgtatttctttcaaaatggataaccaatcacccctaactgtattgctttgaaaatggataaccaagcttcaccctaatttgtaaagtaattcattttcctacttaattgtttgccatttttattattaatagcagcaagcacttacgtagttctgaccacatttcaggcactcttctaagtgctttctgtatattaatgtatttaatcttcacaacaaccataagacgtaggtagtataatgatccctcttttacgcataaggaaaccaaggcacaaagagtttaagtaacttcaagaacgcacagctactgtgtggcctggcttgagatccagtgctctttactatactaaaccctgatgtgcatactgctcctcctagattccatccaatcttattaaccaatatctctgcctatacctgcgcaaaccctatacttttatattttcaaatttgttttaatttttgaaagacaagtttccctcattttttcttctaggagttttccaggttacttgctattttgtctaccatttgaccaataaaatagcatgttaagtttcataaataatgattaggattgcattacatttctaaattaacttgaggaggactgatatctcaacaaaaattgtcttctgtttagaaaagtcctgcatatctgcattattggatttttttctatattttacagttttcaacatatgaatcttacaactgttagggttttttattattattgtaaataggtttttttctctgtttcattctttagtatattattgataatatataggaaagcattgatttttttctatgttaattttgtatctgtcgtactgaattttactgattctaataattttttcagataattccttggatttgcatggcaatctttagtttccaaataattatatctgtgtcttttctttataatatttatgtgtcatgttattcttttttggtctgtatatatttgcattggttagagttaggacctctattacaaggttaaaagacaacagttctggcagcaagtttatcttgtctctaactttagtaggaatgtttctaatgatttacatcacacatggtgtttgttcttgttttatgctaatctttattagttcaatgaagtttccttctattgctagcttaccaacacttattgtttacttgtttttaatcacaaatgattattgaattttagcaaatacatttttgcccatattgaaatgtcataaattttttttatctatttatatagtaaattatattaatggattttcttgtgttgagtcatccttgtattaataatagctacatttaatgtattcttcctatgtgccagaaatgatgtt

SEQ ID NO: 475610 - DNA, 1352 bp, Homo sapiens
ggtgaagagggaacagacaaatgagattcagagcaggtagaatgaacagaaaaggccctgggaatgcttttggtacatgggcacaccttgccttcttcctgaggagttccgcgaagctcttgtttacccctggaaaagctgtcttcaccagacaaacaaaagctgaggatttccatcacacgggtaatttgtctacgagttgttgctggattgatgtgtttgtaggagaagacggagctctccagtgggctggcagatactttgtccgatcagcatcatggtctgacagcgcctcacgtccaatccttactttccccttttctcttcacaaacgttactctccagtgcagaccttgaaaacagctgtcatggagcagacaggccatttagcaagaggcacagatacggggactggcttgggccatttgcttcttttcatttccagaaaagctccagcagcccctccacagcacaacgctgctcacacaagccacgaaaccaggaggctactgccaccagtgccagttccaacctatggcctctgccatcaccaggaagttgacaaatcaggtgctatggttgcacatttagactccagagtcctgctgtactgccgggcccagagctgcaccagcaaagtaacaacctcagaccctggctttttcccaaataattcagttctggacccagattttgaatctggcacagatgcagttgactggtggaatcaaaaccacatgtctgcaatctcacaactggaaaatgacctgaaaaatcttcatgctcagatgtgtccggagtttcttccttctgctgggtttgtggtcttgctaacctcaagaatgaagctgcagaccttcaccgtattgcagctcttaaaggtagcgcatccagaggtgttcattcctcctggtgggttcgtggtcttgctggcttcagaagtaaagctgcagaccttcacagttagtgtcacagttccaaagcgcagacccaaagagggagcagcagcaaaatttattgcaaagaccaaaagaacaaagcttccacagtatggaagggtacctgagcggtttgctgctgctggctcccgtggccagcttttattcccttatttggtgccgcccatgtcctgctgattggtccattttacagagcgctgattggtccattttacagagtgctgattgggattttgtgagctgattgttaaacatagccattattacaaaataaattatatcaacttaaaatgaaataaatcatgttagaaatgaagttaataaatattcacaacttatcattcatattactttgatacattttactactatcaagacttctgaggttattta

SEQ ID NO: 475611 - DNA, 665 bp, Homo sapiens
tgaggggggcacaacaaagacaaggaaaacgccgggatccttcttgccttcccaccttagaatgaaacaggatcctcatctctcaccttatacaaaaatcaactcaagatggatcaagaacttaaatctgagacctgaaaccataaaaattctagacaataacatcagaaaaacacttctaaacattggcttaggcaaagatttcatgaccaagaacccaaaagcaaatgcaacaaaaacaaagataaataggtgggacttaattaaactaaagagtttttgcatggcaaaagaaacaatcagcagaataaacagacaacccagagaatatacagatggccaacaaacatatgaaaaagtgctcaacatcactaatgatcagggatatgcaaatcaaaaccacagtgcactaacaccttactcccacaagaatggccataataaaaaaataatagatgctggcgtggatgcggtgaaaagggaacacttctacactgctgcttgatttatattgtacttgcttcagtttcttctaagagtggagttttgttttgaaatgaaacttctgtttattaattttaagagtttataaacccaggtagctccagaatagtcagactttattgtaattatagcacacttgcattctcttacaaattgaacct

SEQ ID NO: 475612 - DNA, 624 bp, Homo sapiens
ggactgcagtggcgcaatctcggctcactgcaagctccacttcccggccttcactggtggtgatacctcctggtatgggaaaaactaagatgaccagggtctggagcagacccccagcaaactgcagcagccctgtggaagaatcaaaggtagataagcccacaaagataagaaagaatcagtgcaaaaacaatgaaaactcaaaacaccagtgtgccccttttcccccaaatgaccacaatacctctccagtaaggactcagaactgggttgaggctgagatgactgaaatgacagaattaggcttcagaatgtggataaaaacaaactttgctaagctaaaggagcatattgtaacccaatgcaaagaagctaagaatcatgataaaacaatgcaggagctgacagccaaaatatccagtttaaagaggaacacaaccgacctgatagagctgaaaaacacactacaagaacttcacaatgcaatcacaagtaataatagcagaatagaccaagtggaagaaagaatctcagagtttgaagactatctttctgaaataagacaagcagacaaggatagataaaaaagaatgaaaagtaatgaacaaaacctccagtaagtac

SEQ ID NO: 475613 - DNA, 659 bp, Homo sapiens
gatatgaatattgtataagaccatataattttccatgatatttcattaagatttaaaaggacacatatcaagatgaagaaacaacccaaaggttacggcctccactgccacagggccatcatcaccatctgcagtatcatttgcatcaaagacatgtatgccaaggtctctgggtccgtcaatatgcccaacctcacctggggcctcttccatgggctctccagacagaaaacccatcaacagctggctgttaagaagggcctccatgctgtggaaatccaggaggaatgtggccctctgcctatcctggttacctcctcccggggggccttaagtaaagatccggagacaaatgatgaggttccagacatcaaactggactggaaagatgtgaagactgcacagggagagaaacgctctctctgcatgcttcttttgacggtgctggtgtgggatggggcactgcctcgttactgcctgggtaaggtagttatttcctaaaagttacctgtcttgttagtttatcttctttccttaaatacctaataaatatcaagacaatgagctttaagcaacaaaggacaatgatcctgtggagaggggaaacaaaattatctgtacttactatctggagaaagtccatggctccaggaagggct

SEQ ID NO: 475614 - DNA, 660 bp, Homo sapiens
ggtttatatgataaaccatgtgcctaggagatggaaatcctgtatgaatgtggaagccattagcagagtaattgctgtctgttaccatgacaaccagccgctgcagtcacctgcccgaagtcctgccagactgcaccagctcagctgcacccgtggtgaagacggtggaggattgtggcagcctagtgaatgggcagccgcagtatgtcatgcaagtttcagccaaggacgggcagctgctgtcaacagtagtgcggactcttgccacccagagagggccatccacttggtggaggtttccagcccagtgaccagcaggtgcccctccttctcttgcagccccttcaatgaccggccgatgtgcaggatctgccacgagggcagcagccaagaggacttgctctctccatgtgaatgtacagggaccttggggacaattcatcggagctgcctggagcactggctgtcatcctcaaacaccagctactgtgaactctgccacttcaggtttgcagtcgagcgcaaacccaggccgttagtggaggtcagtaagtggggcacgtcctgaaaacttagctctaatgagcaaatgatgtctgtttttatgcctggatcacaagccctgtacagctttactgaagcacggtaatagctatgtga

SEQ ID NO: 475615 - DNA, 1311 bp, Homo sapiens
aaaatatttgacttaacatgtattttatctgatatgactctctgtaaaatggaccaatgagcaggatgtgggtggggccaaataagggaataaaagcaggccacccaagccagcagcagcaacccactcataaggaagtaagcaaagaaatctccaaaggcccacaaaaacacctgggctatcggttatgtccccttcaagctgtagggggagaggaatttggcccaatctgggtacacatccctttctccctgtctgatttaaagcagatcaaggcagacctggggaaattttcagatgatcctgataggtacatagatgtcctaaagggtctagggcaaaccttcaacctcacttggagagatgtcatgctactgttagatcaaaccatggcctttaatgaaaagaatgtggctttagctgcagcccaagagtttggagatacctggcatcttagtcaagtaaatgatagaatgacagccaaagaaagggacaaattccctaccagtcagcaagccatccccagtatggatccccactgggaccttgactcagatcatggggactgtagttctcatgtcatcaccctccctgagtcctgggtttgcttaaccattgagggccaggaaattgacttcctcctggacaatggcatggccttctcagtgttaatctcctgtcctggactactgtcctcaagatccgttaccatccaaggaatcctgggacagcctgtaaccagactcatcaatgaggcagtaattcctctaaatccagttgtacccaacccctataccctgctctgtcaaataccagagaaagtagaatggttcatggttctggacctcaaggatgccttcttctgtattcccctgcactctgactcccagtttctctttgcctttgaggatcccacagaccgcatgccccaacttacatggatggtcttaccccaagggtttagggatagccctcacctgtttggtcaggcactggcccaggatctaggccacttctcaagtccaggcactctggtccttcagtatgtggatgatttacttttggctaccagttcagaagcctcatgccagcaggctactctagatttcttgaactttctagctaatcaagggtacaaggtgtctaggttgaaggcccagcttggcctatagcaggtcaaatatctaggcctaatattagccagagggaccagggccctcagcaaggaacgaatacagcctatactggcttatcctcaccctaagatattaaaacagttgcaggggatccttggaatcaccggcttttgcc

SEQ ID NO: 475616 - DNA, 583 bp, Homo sapiens
agagtgtgttctttaatgaagatggctgcacaaagtggatgcacacaaacgcatatccagaatggttcagagggcatggtgttcttgtccttggacccccaagcagtatatgtgggcacccatgatagcaggtccaggtgggctgattcatggtcccctacatggcttgctcaggtgccagtagtggcagtggttgaccagatgagtgagcagctcctcagagccctggcagtacatgtggtagagacaatgggaatagtggtggcaggacaatccttgggctcccaggtagcactgcttaatgttaacagtggccaaaatgggctagaggagtgcacaaatgccagaggcagtagactaagcagagtgattcccagtttcacaagcagtgtgctcaggcctggggaggggagagagttttacaatttcaggttttatgtttacatctttaatccatttagagattggctgtacaactttgcgcctaaacttaatttaaaaaagaattactaaatatgtgtatgtgtatatatttttatttataatatctaatttttatattgattacaacttgaaatacttt

SEQ ID NO: 475617 - DNA, 1020 bp, Homo sapiens
tgagtcagggcagagcaggccatgttagagaccttcacagctgtccctcccaatcacaggcctggaggcccaggaggaaaaagtggttttgtgggccaggcccagggtccccatgctgtgtgtagcctcgggacttggtgccctatgacgcagctgctccagctgtggctgaaaggggtcaacgtacagcttgggctgtggcttcagagggtggaagccctaagcctagacagcttccatgtggtgttaagcctgtggaatgttagatccaacaacagcttgcactgtgcacctggaaaagccacagacactcaatgccagcccatgaaagcagctgggagggaggctgtatcctgcaaaaccacaggggcagagctgcctaagactatgggaacccacctcttgcatcagtgtgagctggatatgagacctgaagtcaaaggagatgattttggagctttcaaatttgactgccccactggatttcagacttgcatgggccctgctctaattgtgagtggacgagatgggatctggtatacaagtggaggaatttgcctcagcaaggagcatgtggagttcacctatggtgacaaaacgtaaggcagagtattttgggcacagatgttggtgggtggatggatagacaataagaatgtgtgtaaatactcttgcaatggattccattttatcaatgacataagaaaattattggctaagaatgaatatgagacagtagatattggagatatgagggaaaaatgaagtgtgaaatggttatccacagtctttcagtgtaagaattcttagattctttcagtctaaggatgtgtctcattctcatatttgagttctgggttgttgctggcgaaaatcttcgtgctgtatatttgttttaggttttctttggggagtagtgaagcccgtttacttctacactgctattttaaaaccttcttcctggcttattcacaaatgagccaagggaagctgtgacagactacctggaaaaacaggaca

SEQ ID NO: 475618 - DNA, 786 bp, Homo sapiens
cctggtggtgtaggcacctgagggaatctcctcgtctgcggaatgcaaaaattgtgggaaaagtgtagtatccagggcagtcaggcccctctgctgcaggtctgctggagtttgctggaggtccactccagaccctgtttgcctgggtatcaccagtggaggctgcagaacagcaaagattgctgcctgttccttcctctggaagctttgtcccagaggggcacctgccagatgccagccagagctctcctgtatgaggtgtttgtcaacccctgctgggaggtgtctcccagtcaggattcacggggagatgccctgcccagagaggaggaatctagagaggcagtctggctacagcggctttgccaggctgtgatgggctctgcccagttcaaacttcctggtggctttatttataacgtgtggggaaaaccacctactcaagccccagaaatggcggacacctctccccccaccaagctggagcatctcaggtcaactttagactgctgtgctggcagcgagaatttcaaaccagtggatcttatcttgctggtctctgtggggcgcctcaaattacctgtgaaaggaagcaagctataaacctgaacataatatcaaataactccaaatataatactttttcccctctgctgcagctgcctgtcatggtagtctgtgatatatagaaaaggtaactcagtttctgtagtctttgattcaacattcaaaggaggctgtgatacattttttaaaggtttacttttaaaatggttaaaataagca

SEQ ID NO: 475619 - DNA, 581 bp, Homo sapiens
ttatcactggaattgaaagcgatgtcggctgggggatgtgcgtctcgaagactcttttttcaagggaggcttttggcttcgtgtcttgctggaagtggaattgctgggccacggaagaccactaatacaagattgaatagaattaataataggcaatcttctctcatttctgactttaaaaggaaggctctcaacaataccattaattatgatgtttcctgtggatatacgttatcaggttcagtaaactttggttcctactcatggtgggtgcactactcagatccccattcaggaatgaagcacattctgcagctgctgggagtgctccctgcagaaagccctctgccatccacccctcatgtggatggtcttgctggagagagagccaccccacccctcctcctggggcagcctcctccactgatggattatgacagccaagcgaccctgatacatcatatagttttgactgcttgtaacagaatagtcaattaagggtaggtagtagcaagcacatttattttctcatacaccaagaaggaatgatctgactactccttgaaaccatctgtaacagc

SEQ ID NO: 475620 - DNA, 1010 bp, Homo sapiens
acatcaaagaccaaaggataacaactcctctccagcaagggaacaaaactggatgaagaatgagtttgacaaattgacagaagtacgcttcagaaggtgggtaataacaaacaactccgagctaaaggagcatgttctaacccaattcaaggaagctaagaaccttgacaaaagattagacgaattactaactataataaccattgtagagaagaacataaacgacctgatggagctgaaaaacacagcaccagaacttcgagaagcatacacaagtttcaatagccaaatcgatcaagcggaagaaaggatatcagagattgaagagcaacccaatgaaataaagtgtgacatcaagattaaagaaaaaagagtgaaaagaaatgaacaaagcctccaagaaatatgggactatgtgaaaagaccaaatctacatttgattgatatacctgaaagtgacaaggagaatggaaccaagttggaaaacactcttcaggatattatccaggagaacttccccaatctagcaaggcaagccaacagtcaaattcagaaaatacagagaacaccacaaagatattcctcaaaaagagcaactccaagacacattaattgtcagattcaccaaggttgaaacgaaggaaaaaatgttaagggtagacagagagaaaggtcaggttaccaacaaagggaagcccatcagactaacagcggatctttctgcagaaaccctacaagccagaagagagtaggggccaatattcaacattcttaaaggaagaattttcaacccagaatttcatatccagccaaactaagcttcataagtgaaagagtaataaagtcctttacagacaagcaaatgctgacagattatgtgaccaccagggctgccttacaagagctcctgaaggaagcagtaaatacggaaaggaaaaaccagtaccagccactgcaaaaacatgccaaattgtaaagaccatccatgctatgaagaaactgcatcaact

SEQ ID NO: 475621 - DNA, 3257 bp, Homo sapiens
ttcttgtctcccgcaggttgcgacatgtgcgcggacaaccgcaacggcgagtgccctatgcatgggccactgcactcgctgcgccggcttgtgggcaccagcagcgctgcggccgccgcgcccccgccggagctgccggagtggctgcgggacctgcctcgcgaggtgtgcctctgcaccagtactgtgcccggcctggcctacggcatctgcgcggcgcagaggatccagcaaggcacctggattggacctttccaaggcgtgcttctgcccccagagaaggtgcaggcaggcgccgtgaggaacacgcagcatctctgggaggccatggagatacagtatgaaaaacagacctggtatccggaaccctcctgtgactgttggggatggggtcctgaggcctgggtctgcaaagcctcttttgatggaggaggagctgagtgtatgagtctacagcccagcagcccaaaatgaggacgtggaagccaatgaactacctaccctatagttatctgctggagtgccccggctcaaagcatctggtttggaaacattttggtttttgtttctgactaattaattgtaacctccaatgtggtttaaagtttataaaacacttttaggacataatctattttttttaattatctgtaacaacagttagaataaggtacatttgggaattgaagggattttaaaactttagccatacaaaatgtgtcagtctcctgggagatcacgtgaaatgcgactaactggggccaggtaacttagtgccaatatccatttgtaaaataaaatacttactttataaaataggtttcagatttttattagcataatgatttttaagatatagaatatgagtttaaaatttttaagcattatgatttatttttatgaaacatgaccgtttgaattgttacatttataatacaatattccaaatgttagattgttccttaaattttagttctttctttcaaagctaaattttcttctgaaatttaaaaaaatcatcatattattcacattagaatcagtaagtagaatacattgtaggtctatcggaaatgtttggcaataattgtttaatgactcatgtaataattatccatttcaaaaacttattcttttagatgtcttccagaatagcaagtcaacaaaatgtattaaaaaaattaaaagcagttgaatcatgattattttattttaaaaggcaactgtaatcatttctcttcctcacattttttcaagtcatttgctgatgaagaaaagtctttttatttcaagttcaatactcaggtcctgatggatcttaccagggttacttatctttatttcagtacaataaatggattgctaatcttttcctgtcactatttccaagtagatgatggatttttgtttcagtttacacttcattgtttttagtatggttgtactttattatacacatgaaggcttattacagaaacaatcagattcaccttagttactccttttatttaatcattagaagctctattttctttgtagaaaaatgactttttgttatttaacatacatcagccatggagagcttgtttggtttgtaagcatgcaatcattgttttagttaatattttctttgtgtataatcatagttcttcaaaatacagcaatttaaaggaagttaaatatcatttcattatattcagtacattttgactcttctaggtatttataggaaattccaagagagttgttttttctctttttgcaataagccaaggtaattttttattttttatagtttaagaagattacaagctaaaagccaaataattagtcatttatttttgctagtttcttttagaatcagaattttaatgtgttttttaaacaataataaattcagatactttaaaacaaaacattacaaggtgcatcagacaatgacttgccttggttatatatatttattccaagacttggatgcatgatacatttctagctatttggacatcatatgaaataaaatctttctcaatgttttccaaagaaaacaatctttctcagcaattaggtcttattgatgagaatgagataattttatcctgatgtgttttccaataaagaagtgaaaaggcacatttgattccaacatttatgaaaacattatctcaattattaatgtgccccctttctcttgagataaattaatctagttgcacacggtttcctctttctgcttaacatcagaatttaatatgactggacctgaggaatgtacccagtgtatacttaaaattctactggaataaaatacggaagtttaaaataaggttacagtttaagataggctagaattactcaggcctttcaactcagtgcctgacttgacaagaaattttagcaagaatgacaaaataaattgcacttattttcaccctagaaaaattatcctgctaattgaaataatgtagtgacttgttagtaatacagttaagatactagaaagggctttaattttacagaacctgtcttctctttgcctgagtaaatttgagtgtctcgttttcatttgcactatgtggaaaccttcattatttttcttcagaaaatcaagggggataacataatgtgagcctttttgtgatttggttttgtgccataatattttagatttaataagagttttgctgttaagcaaatggtctatttttcatcattactgcttagcttaagtcaaaatatattaatgaaaaccagtattaaaaatatattacacattgctaaatgtttatatttcaaaaccatcataggtaattggttctagaagaaaatgaattgatttcatattttaaatatattatgtatgtttctataaatgactcaatttcatatatacagtactatacccacttatatgtatttagatgttgaaaaaattattttaaattaatcattttcaattaaattagaatcacttaaaagttgtcgcagtgatagtactgtaattatatattccatattctgctttatagactttggctcattttggcgtgattcaccaagacactaggggatagaattatgtagctgtcgcagttatattgaagtaaaaatcatgtttttcagcaatttatcatttaatataatagtctgcctgtcagtttggttttgaatatgtcaaatttgtgaaattcaaataatttctccttaaaaataaaccatagtaatgctactattatgttttaaattatgcagagtaa

SEQ ID NO: 475622 - DNA, 869 bp, Homo sapiens
gagaaagaacacatgcatctcgcaggcagactgactctgaaaaaggccaacaaggcctacgtcaagcacaccaagctttttctttcaaacttatcactcagtgcctgctgtcctttttggagagaggaatattcaaagttctctgtggatgttgttgttttcctgaataaaaaggtagtaacagccttgagagatagtggtataggagagaacccctgtggagatggcactggtggctcctcaacccactgcattgcacactgctatatgtgtcatcagaaagtaatgacatcctgtgggaatacgaatgatgtgagcaatgaacccctgattgcagaaatcaagaaaggcttcatggaggagatgttaatagtgagccttccgggtacaaaagcaagagggaactccttcagtacatacccatcttttgaggatcctcacccagctgctacccccagtgaaccctccagctgtgtagtcatttggcagggtgcactgttatgcataacttaaagctatgtgtgtgtgactctaaaacaactggtgaatacagattgttcacatgaaaacccccaaatgatctgcaagtgaaaaaaaaaatgtaagcaatgatttgatgaccatgaaaatgacccaaatttcagatttagcattggctgactctatccatcaccaacatatttatttgtttcttatctgcctttgctctaggtaacccaaaaatgctatctggttagccaaaaagttgtgacttagagaaatatatgctaatatggatcatatattaattaatgcaaataacatcaacagctatgtaaaaacagagctaataagtactgtgttttataagatttaagtacaataaatct

SEQ ID NO: 475623 - DNA, 831 bp, Homo sapiens
cagagcctaagaattaaatctcagagatggggtggagatcaaagacataatgagtgtcagaattagttcaagccttaagaaattgttgaaggttaataatggagttaacttcaaggaagaactgaagctcagtgatgaggactcagaagaagataggaaaatgtgggaaggtttggaacttcctagagacttgttgaatggctttgaccaaaatactgatagtgatatggatagtaaagtccaggctgaggtggtctcagatagagatgaggaacttgttgagaactggagtaaaaatcactcttgctgtgcaaagagactggcagcattttgcccctgccctagagatctgtggaactttgaacttgagagagatgatttagggtatctgggggaagaaatttctaagtggcaaagcattcaagaggaaacacagcataaaagtttgaaaaatttgcaacttgacaatgcagtggaaaacaaaaaatgattttctggggggatattttggccagcagcagaaatttgcataagcaatgaggagtcaaatgcgaattgccaagacaccggggaaaatgtctccagggcatgtcagagaccttcacagcagcccatctcagtgggaaaacgtcaacatttccccattcagtattaatgttggctgtgtgtctgtcatagatagcttttattaccatgaggtatgtcccttctatgccgatcttgctgcggttttaatcataaagcgatgctgaattttgtcaaatgctttttctgcatctattgagataagcatatgacttgtgtttttaatcctgtttatgtgatgtttca

SEQ ID NO: 475624 - DNA, 1808 bp, Homo sapiens
tctaaaatcttgaacagctgagcatgatgttttggtatagctgcaaaattcaacctctgctccagaggtcactgcatgcttctgtcctgacagcccaaattgttaagcatgtgactaatatgcatacagaacacaggctgcctgacgtctgctacaagcttgatggctgtctccatcttcctgtccccaccctgatttctaccaaatgtaaatctctgatgaagatgcactttctccttccctgcccccagtgtgtggattgggagccctattatattcttccactctgtgtctctccacctttaccaacagaaaaattaggagctaggagaaacactaggggaaatagaaaatctacatattgtaatcactcgtatctcaaagttggcagtggttctgataatcaaagaggcacttactgttcttgtctccaagattttccataacgcaaatataaatgaaattttttcatgaagtgcttctatgtctgcagatgaatatctttgagtatcaacaagggtattacacaaatatgaaatgaacccagttcatcgagagagagctttgtttgtttccaagccgaaacggtctcacctaagataaggctgcctggttatttcacttttcacaactatcctaaaaggaagaagcaaaaacaatttacagtatgtgctgggtttaattcaatattttaaataatggaaatagcatcgatggcaggtttttattcctgacggttaggtagttttacattagtatctacctaaaactttcaagaccatgtttcgagtattttattattcgaattaacaagaagtaaagtaaattatagtatccaggccataaacacattttgatattagtgagtggattcttatataacttaaaatttaatcacacattatttactgtaaaatatagctcatcagctaattttaaaaacaaatttgagcatttgtgttgtactttagcaatgatattaatatagaaaaataagaaaatgagaaatgaatattaaaagttagctgtgtgttgcacaaaagtggaattttacaaaattgcacttatattaactatcaggatatttaacttttaattttaatgttattaatacattttagaagcatcagtaatctgaaaataaagataaacatcataattttatgttttgtttatattcagtttattgtatgacatttgcaatacatctaataattcttatgtgagaattgcataacagaatttctatcagatcttgccaaattaaaaactaaatattcctacattccacatttttcttattataattttggctatattaacattttacaaagttactcaaattcattactttattaaattttcaatgtagaatttggacaattttaatatgaaaataaaacgggaattaaaaggaagagcagaatatggaaatttttatactccttttattttcccccttaagttataagtttttatacggcataaagaaaacatacacagggttaatcttaatacgaatatttttctttaatatatttaagcaatgtgttaaactgtgtgttggataaaaacaaaatcaaaatgcttcttgatgcatatataagagagatttaaatatatagacaaatagggggaatggttttaaatactggcaagttatgtgttaggagcaattgttctgcaacacaactttttgaacaggttttatgtactttgtgaataaaactttgagctgacagtctttctgtctataaatgcagtcccaacattctatccaaattttactgtatttttgagaaagcaag

SEQ ID NO: 475625 - DNA, 905 bp, Homo sapiens
ccccatcagcgcctccctgctgcagcccgtcacgctgatgcaacatgtgggatcccatggccttgggcagctccacccctgtagctttgcagggtacagcccccctcctggctgctttcactggctggcattgagtgtctgcagcttttccaggcacacagtgcaagctgtcagtgggtctaccattctggggtctgaaggatggtggccttcttctcatagctccagtaggcagtgccccagtggggactttgtggagatcaggaatgagtggaggagcggaaagcagagtgattcactgaaggactgtttccagagcagctgctctggtcatctctctatcctttctctcaccctctttacccaaaccaactggctgtcttctgtttaccctgaggcaggacatggacaactgttctctacagaaaatgaaccatctgtctcagaaaagctaggactgctggtgagggtactggagccccagagagaaaacctctttattttagcaaaagaagggctttctccatatccacactaactaaagagttatgaatagatgattcctttctaatatttgtgcttaaaaatgcctacaagattataagctcttaaaagacaaaatctgcgtctaatttatttttacattcctttctgtcattagcatagtatctctaagcagtacgtggttgaaggtaattgaataaaattatgagtagaagggaaagcaaaatgaaacaaaaaaggttaataaaaacatatgtgttaaaagaaagaggaaagatgactaaaacttaggactgctaatgttaaactctaaaaagcattgggaatggctcttattgaaagatttaaaagaatatcaataggtataatagactagaatggtaaaacaagtggaaaataaa

SEQ ID NO: 475626 - DNA, 512 bp, Homo sapiens
ttctgcaactttgtagttctttcctacggactatggcggtttttcagactctccttgtttttgatgacgttggtagttttgaggagtacccatcagggaaacggttctcacccaatgccagatctgctggcaccttgatcttgggctttgctgtctccaaaacaatgagaaataactgtcagttgtttaaggacataggcatgggcaaagacttcatgactaaaacaccaaaaacaatggcaacaaaagcaaaaattgacaaacgggatctaattaaactaaagagctcctgcacagcaaaagaaactatcatcagagtgaacaggcaacctacagaatgggagaaaagttttgcaatctatccatctgacaaaggtctcatatccagaatctgcaagaaacttaaacaaatttacaagaaaaacaaacaaccccatcaaaaagtgggcgaaggatatgaacagacccttctcaaaagaagacattcatacagccaacaaacatgaagaaaa

SEQ ID NO: 475627 - DNA, 546 bp, Homo sapiens
caccgagtattttttgttgcgactgaatgttattggtgcccttaaaaatgactcttgagagctctttctgtccaccatgtgaagctgcattgagaagccagcagtctgaaacccaagagagctctctcatcagaacccaattacgctggcactctgctgttggacttccagcctccagaactgcctggacccgagagcagagagctattcagttgtggatgtgtgctattctattcttcaaaattaaggaaggggggctcaaaggggatttggagacaattacagctgctacttttagcaaaaatccagagggtatggcaaggtgggccatggttgcctccattctgatttcaaaggacagaaatgatgctcagaggagctgtgtgggagggccatccagtgaagccctgggtgagtgacctcagccctgacaaaaaactgtgccataagtgggtccagtgcatagagtcagcagcgagcagtgcctcactgagctgtcggggactgtctggaagaagcttaactctttttatttgtttcttcaaa

SEQ ID NO: 475628 - DNA, 931 bp, Homo sapiens
tgctcatgtacatccttaccgaggaaggctttctggatattccaaagggttttggtgttgtgatataagctgtatctgctttagggtatgccccaagcccaggtggcactcaaaccaaagacacagtccttcccattattcctccaccccttggcaaaagcagagcagtcttatcctgtggccaccatcaccagaggcccatggggaatactgccagactactgtcaatgttccctcaaggcccaagggctgttaaatcagtctgtggtgagtaatgtctggcctaggattcacccttcagggaagtggactctcctctggccagggccaagggtcaagtcctggaatcaggtaccccaagacatgacttggtattctattcccctgtggccaagctggtacctgaggtcagcaagtctcagaagcccatccaaggcccttgctgtattacctgggtatcgctgctgcttattcagggtccaagattcttcagatagcaggtgatgaatgttgccaggactgggtccttcccttcaaggcagtgggttcccttcttccctaagatatgtctagaaatgtctccctggagctaggaggttttgctttatatattttgaggctgtggtgttagttgtaactatgcttataattatgtctttctgttaaataaatcattttatcactgtaaaatgtttgattctaacagcaattttgtgttaatgtctattttttcagatgtatttatagcatcttcagctgtctcaggcctgattgattgagataaaagcagcactgtttatctaaaaagatgcacagccttcctttttcagcagtgagcaaattaagacctctgtgattttgaaggacaactgcggctaaggagtctacctgtgattggagggttgaaacagtgttagctatgtctttttaa

SEQ ID NO: 475629 - DNA, 640 bp, Homo sapiens
ctgttacccctcacccattatggtctccaccttcctttttctccatgtatcggtatccagaatttgccctttggatgttctaactctcagcacctctcaggttgctagaaaaagatctcaaaatggagaaagattaggccaagttacaccacataaaaggaatgaaaagggagagaaaaaggagacaagaaaaccaagggcaggagagagagggagagaaagagtacaagaagtgaagtgggacactgggagagaggtgtctcctggggagctccaaggacaccaatacaccaaaggagacatggcagcgctcatcaacattgaatttcactgtgaaagtgtgtcagaatatgtgagatatggtttggctgtgtccccaccagaatctcatcttgaattcccacgtgtagtgggaggaacccaggggcagatccctcttcatcttttcccctcacctccagaaggctatatgaattgaatcatatagtatgtacatttttaagattacctttttttccattcactcagcataattcccttgagagccatccaagttgttgcatatatcaataatttatttgtttttaagtagtagtctatggtatggatataccaccatttgtttaagcattcatctatt

SEQ ID NO: 475630 - DNA, 2130 bp, Homo sapiens
ctgccagcatgctgtcacctctcacttccaaaggcttcacttggctctgcattttcttacgtacaatgaaagacagaagacaacaaagagaaacccctttaaagttctcagatttctactggctgctctccatcccttcacactacagattagccatccagacagttttaacttcacttccattcaaagaacacccaagcgcatctgcagatcttgtgagacttactatcatgagaacagcacaggaaagaccggcccccatgattcaattacctccccctgggtccctcccacaacatgtgggaattccgggagatacaattcaagttgagattttggtggagacacagtcaaaccgtatcaccttactacagttgtctttctccgatattaataggaacgtttctattgtttccccattaaggaagacgctagcttcagtaatagggcatacatgttttatcatggaaaaaaatattcatcaattgctatttgcttgactgcattttttcaggaatgcagtgaattgtgttggaagctttttcagtttctatagagacaatcctttgatttttttcttagatattatttatattatattgatggatttttaaatattgaaccatccacacattcctaaaataaatctcatggggtctttatgtattattttcttatagtaatgccagattctatcaatatttcacttggaacttttgcatcaatattcattggtgatagtggtctataaatttctttttcaggtactgtcttattaactttataatatcaatgttacattcacttcataaaagcatcagctaattttcctgttttcagtactccaggataattcatggagcactgggatcatctgctctttgaagtttgctaaaattcccctgtgaatttccacctggacatgttaaccttttgtagagtagttcttggataactttctcagtttctgctctaattgagtcaatttggtaaattataacttcccaggaaattacccatttcgtcaacattttcaaattcattttcttagactctccaaaatagtctcatgacattttaaaattatgtctgactcaatttttttccatgtcatttattattttgtatatttgtgattttttccttttgtttcttgattatcttatctacaggtttgtctatattaatgtttcaaataagttttattaattagatctactcttattaatttctgctttcatcattttaatttctttgagctttcttctgatttacattggggttttctctaactttttgtgctttgaatttattttcattctttcatttttatcaagtagagtgttttgtgctacaaatttcactctaatacactctgaatgtattctgccagtttaaatatgtcgtgttttcattagcattgttagaaattatataattttatattgtatttgctcttttaatcaagagtggataacagaaggttatgaaattgaaaggttaaagaattcttttaagttaaataaagtaaaaatgaaagtttaagcaagttttggaaggttaattgtaaaggaaattctgtgtgtaaacatattgactaaagatgaagggttatcgtctagtttttctgtaaattgatcattaaaataaaagcacaactggtttctcttaaagcactaacctgttctttaacaaaaattataaagggttaaaagggtctataaaaaatcttaacttacagtgaaacattaaaattcggtaactttgtctacaaggtttcattaaaaattgagtttaacattaaaagcacactaatataaaggtaaaatttggcttatttggtatgaaatcatacaggaagtattgtcaaatataaaatggtgtttggctttctttgggctatatttgtataaatatgttattggtatgtgttccaaagttatgggagactcctataattctgatatatcttggcgtacattaacatcaataattataattattatgttaaaattattgtgtgtcacaaaggtaacagatatccttgtcaattgtgtctttaactatggctaccctaaaactttttgtcatccataaacaattgtcttcttttggtcctctttagaaggc

SEQ ID NO: 475631 - DNA, 1751 bp, Homo sapiens
gcagcgacctggatgagactggagactgttattctaagtgaagtcgctgagacacaggtccagttcgttgcagtccagcttgtcgcggaggttcccccccttgctactgccttggtcatggtgacaccggctgggcgggtccctgctctggggttccgactggtggaagaaaggagctgaaatgccgcttgtcagttcagcgggcccccacccaaccgactacccctgagccctccgtcgccgccggtgcgatactgcctccgccggtccgcccgcctgccgcactccgagccccgcgcctacctcccaccggtgcccactctatgtctttttattggagagacagcaagctccccctatctctgggcaggtccagtgatgacgtctgtgacaagggcctggagttggaaaccttaggaatctacctggtgctctcttctactgaagctgtgctggcacccatactgcaagacaaagttcttctcactcttccctcccctttccataaccagaggaatctctctccatggccatcaccaccccagtcctgtggtgagtactccctggctattgctgatggttcactcatggcccaagggttcttctgtcagcttgcggtcaatgctgccaggcctgtgtctctcccttcaaggggattgtgctcccctctgtcccagggcaggtccagaaatcttgtccaagagtcacagcttagaattgggagccccaagaggctgcttgttgttctacctcactgtggccaagctggtacctaagctcaagacaaagtttccttcactcttactgtttctttccgaaagcaaaaagagtctctccctgagccaccgcagctgggaatgtgctgggtcacaactgaagccagcacatctttgagtcttactccagcccatgatgattactgcctaccattgctgattattcagtgaccaagggctcttttttaaaactttcaagttttgggcatataggtggtttttagttatagtatcttatcttaggataagttctttagtggtgatttctgagattttggtgtacctgtcatccaaatagtgtacactgtagccaatatgtagttttttatgcctcaccaaccccaacccttctccccgagtccctaaagtccattatatcattcttatgcctttgcattctcatagcttagcttccacttataagttagaacatatgatatttggttttccattcctgagttacttcagttagaaaatggcctccagctccatccaggttgctacaaaggctattatttcattcagttttatggctgaatagtatcccaaggtgtatatgtaccacattttctttatccactcgttggttgatgggcatttaagttggttccatatttttataagtgtgaattgtgctgctataaacaggtaagtgcagtgtctttttcatgtaatcattttcctctgggtactcagtagtgggattgctggatgattggtagctctatttttagttctttatcaccatagtttccatagtggttgtactagtttacattcccactagcagtgtaaaagtgtttcctttttaccacatccacaccaacatctattatttcttgatttttaaattatgaccattcttgcaggaatatggtgatactgcattgtggttttaatttgcatttcccttataattagtgatgttgagcattttttcccatatgtttgttggctgttggtgtattttatttc

SEQ ID NO: 475632 - DNA, 1043 bp, Homo sapiens
gttccctgagactccccaactagtcaatttgccagccagggacctctggctggtgacgcccctcactgggactcactcagacccgctacctgctgcaggaggcaccctgcccacttgcctgacctgggctaagtttggctttgtggctgagtccagggcttttgtgggcttagactatgggagtatgtgctgactggtttggctcagaagacaggaagatgtgggaaagtttgaaacttcctagagacttgttgaatgtccttgaccaaaattctgatactgatatggacaatgaagtacaggctaaggtgctctcagatggaaatgaggaacttgttgggaactggagtaaatgccactcttgctatgctttagcaaagagactggtggcattttacccctgccctagagatctgtggaactttgaacttgagggagatgatttaggatatctggtaaaagaaatttctaaatggcaaagcattcaagaggaagcagagcataaaggtttggaaaatttgcagcctgatgatgtagtagaaaagaaaaacccattttctggggaggaattcaagctggctgcagaaatttgcgtaagtagttgggagctgaatgttaatcaccaagacaatggggaaaatgtctccaaggcatgtcagaaacctttacagcagcccctctcatcgcatgcccagaggagaaaatggttttatagaccagacccaggcaccccctgctctgtgtagccttgagacatggtgccctgcatcccagctccttcagatccagctgtggctaaaaggggccaagtatttagtgaagaatgtaaatactggaaaacagaactcattcagattatctaactattccttcctgaacttaactcatctttttgtcagaaatataaagtgaacaagagttgaaaatgtcattgaagcataccttcacttctccctctcatttaattttttttaaaaaaatctcccctttactgttaccctctttaccttttctttggaataatttcttggttcaaaactatt

SEQ ID NO: 475633 - DNA, 2400 bp, Homo sapiens
agactgaaggaggagccaagatggccgaataggaacagctccggtctacagctcccagcatgagtgacgcagaagacgggtgatttctgcatttccatctgaggtaccgggtttctctcactagggagtgccagacagtgggcgcaggccagtgggtgcgcgcaccgtgcatgagccgaagcagggcgaggcattgcctcacctgggaagcgcaaggggtcagggagttccctttccgagtcaaagaaaggggtgacggaggcacctggaaaatcgggtcactcccacccgaatattgcgcttttcagactggcttaaaaagcggcaaaccaggagattatatcccacacctggcttggagggtcctacgcccacggaatctcgctgattgctagcacagcagtctgagatcaaactgcaaggtggcagcgaggctgggggaggggcgcccgccattgctcaggcttgcttaggtaaacaaagcagccaggaagctcgaactgggtggagcccaccacagctcaaggaggcctgcctgcctctgtaggctccacctctgggggcagggcacagacaaacaaaaagacagcagtaacctctgcagacttaagtgtccctgtctgacagctttgaagagagcagtggttctcccagcacgcagctggagatctgagaaccggcagactgcctcctcaagtgggtccctgacccctgaccctggagcagcctaactgggaggcaccccccagcaggggcacactgacacctcacacggcagggtattccaacagacctgcagctgagggtcctgtctgttagaaggaaaactaacaaacagaaaggacatccacaccgaaaacccatctgtacatcaccatcatcaaagaccaaaagtagataaaaccacaaagatggggaaaaaacagaacagaaaaactggaaactctaaaaagcagagcgcctctcctcctccaaaggaactcagttcctcaccagcaacagaacaaagctggatggagaatgactttgacgagctgagagaagaaggcttcagacgatcaaattactctgagctacgggaggacattcaaaccaaaggcaaagaagttgaaaactttgaaaaaaatttagaagaatgtataactagaataaccaatacagagaagtgcttaaaggagctgatggagctgaaaaccaaggctcgagaactacgtgaagaatgcagaagcctcaggagccgatgcgatcaactggaagaaagggtatcagcaatggaagatgaaatgaatgaaatgaagcaacaagggaagtttagagaaaaaggaataaaaagaaatgagcaaagcctccaagaaatatgggactatgtgaaaagaccaaatctacgtctgattggtgtacctgaaagtgatggggagaatggaaccaagttggaaaacactctgcaggatattatccagggaacttccccaatctagcaaggcaggccaacattcagattcaggaaatacagagaacgccacaaagatactcctcgagaagagcaactccaagacacataattgtcagattcaccaaagttgaaatgaaggaaaaaatgttaagggcagccagagagaaaggtcaggttaccctcaaagggaagcccatcagactaacagcggatctctcggcagaaactctacaagccagaagagagtgggggccaatattcaacattcttaaagaaaagaattttcaacccagaatttcatatccagccaaactaaacttcataagtgaaggagaaataaaatacttcacagacaagcaaatgctgagagattttgtcaccactaggcctgccctaaaagagctcctgaaggaagcgctaaacatggaaaggaacaagcggtacccgccgctgcaaaatcatgccaaaatgtaaaggccatcgagactaggaagaaactgcatcaactaacgagcaaaatcaccagctaacatcataatgacaggatcaaattcacacataacaatattaactttaaatgtaaatggactaaatgctccaattaaaagacacagactggcaaattggataaagagtcaagacccatcagtgtgctgtattcaggaaacccatctcacatgcagagacacacataggctcaaaataaaaggatggaggaagatctaccaagccaatggaaaacaaaaaaaggcaggggttgcaatcctagtctctgataaaacagactttaaaccaacaaagatcgaaagagacaaagaaggccattacataatggtaaagggatcaattcaacaagaagagctaactatcctaaatatatatgcacccaatacaggagcacccagattcataaagcaagtcctgagtgacctacaaagagacttaga

SEQ ID NO: 475634 - DNA, 743 bp, Homo sapiens
cattttcctcttgatacttatatcgctgatttattgaaatgagcaaaagcttgtaccgcagagcagcctaccacgtttggctctggcgaggggaggtgcggaatagggtagagggacaggggaccactctggacagagtcttgcagggcgttcaactcaagggcttcccagcaaggcctcctcagctgcttctctcagacaccccagcttcagttttgctgctccaaacaggccaggtggcatctatatcttcacatcacagctcacaacactggctgaatgccaagtggacccagaaaactgacagtttaggctcagtctcaggatttctttgcgtaaaatttcagaatgaaaatgtagctctgaagagatgttctcctgggtgcaagttcacccttcccaccacagacgtcagacctctccaagatctgcgccacgtgaggacagcagtgagaacagcttcccgtgaatctggaaacgggctgtcaccagacactaaacctgctggcatctcaatcttggactctccgacctgaggaactatgagtaataaatttctgttgcttataaattacccattttaaggtattttgttatgtaacagaccagatggacaaaaacacagcctgagcttctagccagggcatttcattcccatggagtatggactatttcatggttcctgcatctgtacactgttctattgcaaacttttgttgctgattcttacagaggtcatcatg

SEQ ID NO: 475635 - DNA, 682 bp, Homo sapiens
acagcaacaacaggccaattaaacaggaaattcttgtcctcttcaaagaggagaagatgagaacagagactaagaaggataaaggagagaataagaccaggaaatacttcccagaaagaggaggcaggatttcgcgttcaacagatgagaaagaggacagagaagagcagaaaactattaaaagatccaccaaggatgtgcagctaggcatctgcaaggatcttagcatacttgagcttagtgcaccgcctagtgctgaaacagctgcagtgaccgcaagcttagaaaaacagaatccaccaagccgactaaataaggcaccagtgcccaatgctggagtgatggagatgtgtgacatctcagacagggaattcaaaatggcagttttgagaaagcacaacaaaccgcaagatagtacagagaagaaattcagaattttatcagtgttatttgaaaagacacagccagagggagaaaaggaaatagtataaaaaagaaagtagtatgcctataagagctagaaaacaacattaaaaaagtaaaactaatagttactggccttaaagcagacatagaaaaagagattgaggttaaaagtttattcaaataaatagtaacatagaactttctaaacctagaaaaagatatgaatatttaggtacaagaaggtcaaagaacgtca

SEQ ID NO: 475636 - DNA, 525 bp, Homo sapiens
attcacaggagagtaccatctgcaccgtgcgtctgaagactctcagtctgagtgagagagttagaatattctgtggataaaaccgggggcacaggactcagcagcgatgcacgtttgtcacacaggtgccctgacccaaattttccagttagaaggcagagaatatgagtgtgggtaccacgggacaaccacaaaatcctcccgagacttggatcaggtcagcaccaagcagggtcctgtgaagtgtgcggagcctgctagccctttgccttcatactgcatcctgtcaggagggggacttggagggttaagccacatgctcggacgggagctgaggaagggtgcagctgcaactgatgccaagctctttgctccaagcctaggaccccaagtgagtcatatagtgggcgttcagccacgttgccgtgcagctcagaaggagcctgacacaaggaggggctggccatctgtggaggtggacggggcagccaagtcagactccagagtgagggacaggggttaggt

SEQ ID NO: 475637 - DNA, 618 bp, Homo sapiens
ttttcagtggaaaggattgtaatgattctaaatgaacacttgccagttatggatttattacctgtcaacttcaaattcaacctttgtgccttgcttcttgaatatggatctggggcctttaaatatttcccctttgccagtagacatgatgttaagctttgtctagggacagcactagagagacgctgcaggaggaaaggggttttgcgtctcggttcaggtgttcttgcttctcatgttcccttagcatgggcattttctccagcagttgacaactggggcatgggtggcttcttcagcactaaacttctgaagcactcacagatgctccggtacatggtccccacaatgtcttcatgcacccacctcaggaaattttggactggagtgcttccagggaaaaagaattggatatggttgttttcacgtagaatacagcgctagagctgacagcagagcaaatttatttgctcgtttatgtaatcatttccaggtattagcacattacttattaacaaatgatttaaggacgttggtggaaaaggggcctgcatggggatatttatttagattttcaaatagtttgaaaaattaaagcataagtctaaacttggtgtc

SEQ ID NO: 475638 - DNA, 932 bp, Homo sapiens
agttatgaagacctgctcaacgtgtgccaatcttcttgatggtccagtctcttgtatatcatgatatcagagaatatctggagctttagggaagagaagaaattcaactttagggaagagaagagaatttcaacttgcaataaacacagtgacagagagaggcaccggaatgcatgttccacgaagagacagaaattttttctatcattcatcagtgtacccaggaccttgccagataaacagtggagactacatgcatctgctgaaatctgcatgcaaagtcctataaggagtctctcctcacggccaccactgcccatgtggcaagtgggttcccttctgccccaggatgggtctagaaacgctgtccaggaaaaggagtgtctctgtggccactacagctgggaatccactgtcacaccggaaggcagcacagtacagggtctcacccaagtaagcgcccatggcactgcttcttggatactgctgatgtttattcaaggcccaatggctccttaataagcaggtgatgaatcttgagggaactggctcctcctgtccaaggcagcagttcccttctggccgacagtgtgtctagaaatgtcagattgcctttctaaaacacgaatctaatcatgttcctctcttcctgataaacagccatcaatgtttcatatatatgtctacaagaagtctgtgttcataaaccacttggcattcctcagcctcagtatgtgaactgtgtaatacatattttcaaaaaacatcttctgcttgtttctgtgacaaattagcttactgttgatatactgaatcaagaacagtttatttataagcttctttttatctattattgagcatttaggaaaaatcaaaacctgaactgagaaaaatctttttaagtgcttggctgcctcagaaatgaggacagt

SEQ ID NO: 475639 - DNA, 1105 bp, Homo sapiens
gttcatcagctcctggtactcacgcagctgccgcgctatgtcctcctgctgggccggctgcggggcagcctccagctcggacagcttgcggttggcatccttaacggacagctccccactctgctcggcatctgtgatggtggcctccagggaaacttctggcctttgaggccctcaatctcagcctgaagctagctgatgttccggttcatctcagagatccgagtctttgtgcgctgtaggtcacccccatgcttcccagacagcgtctgcagctactcatacttgatctggtacatgctgtcagcctcagcctggctgcggttggccatctcctcctactgcgcctttacctcagccatgatgctgtccatgtccgggagtggctgttgtccatggacagcaccacagactcagcccttccacacgagactccagctctaccttgttcatgtaagcttcatccacatccttcttgatgaggacaaattcattctccgtctctgtacgcttattgatctcatcctcgtacttgttcttgaagtcctccaccagcccctgcatgttgccaagctccgcttccagcttcagcttctcctggcccagagtctccaactgcctcctaaggttgttgatggtcttgatctgctccttctcctgggtgcgcacggcctggatgttggggtccacctccaggttaaggggactcagcaggctttggttgaacgtgatggcggtgatgcctcccatgccgctggccccaccatagcctccacccagaccacccaggaagctgctgctgctgcccactcaggagaagctcaaggagctgatgcgggcactgggcccacttgtgtaggaacagctgctgaagtcctgggagccagaggtggacaccttgtaggacttctgggtcaccctgatggacaaggtggaagcaggagtggaggcaggcgggtgggctaaaccagacggagatcccagaaagagcagagaagctgcttcttggtggaaaatcgttttatactttaggatttgtattccaaagtatcagtagttttcaaaaatgttaactatgacccatgataagaggtaatattacagc

SEQ ID NO: 475640 - DNA, 2189 bp, Homo sapiens
aggacaggaactgcctattttcacctcttttgtggttcttcagttgcttcaggacatctggatgtatattatctgattcggaaggcgaggtctaaagaatctgtgtttctaacaagttcccaggcgatgctgctgctgctgctggtcttggactgcactgtgagacccattggtctatatcccagtataccccactatattctaaccccactaaagattcctctcagcctcctggcagatttggaaaagttgaaacaaatgggtgctagagttaaacaggatgaagaggtgcagagatgctctgggctgattgctggcgctgttgttgaagttcagaggaatagctcatctgtctctatttcaggcatctggcaaatggagaactgtttcagcattctccattccactaaacgcttacagatgacttccatattctggagcatctgctggttatctcattttgagttacttttcccgttgtgttttgaaaagactctctctctagcttttatttttcttccagctttacccaatgataacgtcttaataactttaaaagaataatctaatacagaaaattgacaatggtttaatactattaactacataccttaatttggatttcaggagtttttactggagctatttttggcatattataaaattttatcacatttgtagatttgtgtaactaccaccacaatcaagacacagaatggtttcatcaacctcaaaaactcccttgtgttagcttttatacttacactctattctccttggtggccactaatccttggtggccactaatctcttgtctacttccatagttttgtcatatcaagagagctatataaatagaatcataaagtatgtaatcatttgggataggctttttttttactcagcataatctcattaagatcaatccaagttattgtatctatcaaaactttgctccttttattgctgagtagtattctattatatgaatgtaccacaatttgtttatctatccattcacccattgaagtgtatttatttccagtttggtattattacaaataaagcagcagtgaagatttgtgtagagtagctcctcagtatctatgggggattagttccaggacaaaatgaagaaatcataaagcaaagtaattggttagtcaatctaggtgtaattattagaggaaattgctaaaagtagaagcactgaaaaattactacaattagcagacatttgtgcctttaaggtgataggcgaggcagaccatggatttttaaaacatgaaatgaaataataacttttgtacttttatgatatgttgaacacaggccatcctggcaacttgcgaagtattaagattctagtttcttgggtaggtgaagtataatagattttagatgattacaaatcacttcacttgtgatttggcacttacttctcagattaacaaatcatgtaaaaatgattcaaccattgcatattaaaagcttggagataaagttgattgtatctatttcactgagtttaaaaagattttctataactgttcacacagtcctgcaacattacacacaattttcacaagttattgtggaaatacaaggtaaaggcttatttcattaatacatcatttggagaaaacatgaaaagtgctttaaaatgctaattttgttcaggcatgatctgaacaagaatgacttagatgttagacattgtggtcattctcatttttaaagaataccagtgagtcatatttttgcaagttgatctcaaagaatttgtctaagagattaaaaagtatatattacattggttattaagaacttgattatttagtagagttggctgtgttttacagaatatcactctaaaagataggacagataataatgataagaataaataactgttagtttctatgttccatcttcttttcattcaagcctctcaacacacattgaacatgatggctctagctaagtaatcaaaagacaatttaaaaaattgcctatttagcaatgtttctatcaaaatagtaggctatctcctagaacattaaaaaaaagccggctaattattgaaataaacagctcttaaatatcgatcttatttcagtgaagatttgttgcttgctcacatcacatagtccatggcagtctggcatatctcttcaaaatagtgatgc

SEQ ID NO: 475641 - DNA, 1115 bp, Homo sapiens
gaatggagttgaatggaatcatcatcgaatgagatcgaatggaatcatcgaataacatcgaatggaatcatcgtcgaatggagtctaatggaatcatcaaatggactcgaacggaatctggaatcatcatcgaatgcaagcgaatggaatcatcatcgaatttcatcgaatggagtcatcatcatatggaatcgagtggaagcattgaatgggctcaaaagaaatcatcggagaatggaattgaatggaatcatcaaatggactcgaatggaatcatcatcaagtggaatcaaatggaatcatcgaatggacacgaatcaaatcatcgttgaatggaatcgaatggaatcatcgaatggactcgaagggaatcattatcgaatggaattgaatgaaatcataatcgaatggagtcgaatggaatcatcatcgaatggagaaatcatcgaatgggatcaactggagtcatcgaatggaatcgagtggaatcatcgaatggatttgaacagaatcaacatcgaatggaatcgaatggaatcatcgaatggactcgaatggaatcatctaatgcactcgaatggaataatcatcgaatgtaatcgaatggactcatccaatggaatcaaatggaatcatcaaatggaatcgaacggaatcatcatcaaaaggaaccgaatggaaaatcatcaaatggattcgaatacaatcatcgaatggactcgaatggaatcatcatcgaatggaatcaaatggaatcatcaaatggactcgaatgaaatcatcatcaaacggaatcgaatggaatcattgaatggaatggaatggaatcatcatggaatggaaacgagtggaatcactgaatggactcgaatgggatcatcatcaaatggaatcgaatggaatcatctaatgaacttgaaaggaatcatcatcaaatgaagtcaaatggaatcaccaaatcgacatgaatggaatcatcattgaatagaatcgaatggaatgattgaatgggctagaatggaatcatctttgaatggaatcaaagggaatcatcatcgaatggaatcgaatggaaatgtcaaccaatggaatcaaatagaatcatcatggaattg

SEQ ID NO: 475642 - DNA, 785 bp, Homo sapiens
atcaaattgtcaatgaacggaattgaatggaatcatagaacggaatccaatgtaatcatcattgaattgaacccaatggaatcattaaatggactcgaatggaatcatcgaatggactcgaatggaatcatcatcgaatggaatagaatggaatcatcgaatggaatcgaatggaatcatcatcgaatgaaatcaaatggaatgatcatatggactggaatggaatcatcctcgaatggaattgaatggaatcatcgaatggaatcgaatggaatcatcctcgaatggaatctaaggaaatcaccgaatggacacgaatggaatcatccaatggatttgagtggaatcatcattgaatggaatcgaatgaatggaattcaaaggaatcatcaaatggacttgaatgaaatcattgaatggactcaaaaggaatcatcatcgaatggtattgaatggaatccgaatggaatcgaaaggaatcatcatggaatagattcgaatggaatcattgaatggaatggaatggaatcatcaaagaaaggaatcgaagggaatcatcaaatggaatcaaacggaatcatcgaatggaatggaatggaatcatcatcgaatggactcaaatggaataatcttcgaaaggaatcgaatggaatcgaatggaacaatcaaatggactccaatggaatcatctaatggaatcgagtggaatcatcgaatggactcgaatggagtcatcatccaatgaaatcggatggaatcaatgaagggactcgaatgaaatcatc

SEQ ID NO: 475643 - DNA, 1506 bp, Homo sapiens
gaatggagttgaatggaatcatcatcgaatgagatcgaatggaatcatcgaataacatcgaatggaatcatcgtcgaatggagtctaatggaatcatcaaatggactcgaacggaatctggaatcatcatcgaatgcaagcgaatggaatcatcatcgaatttcatcgaatggagtcatcatcatatggaatcgaggggaagcattgaatgggctcaaaagaaatcatcggagaatggaattgaatggaatcatcaaatggactcgaatggaatcatcatcaagtggaatcaaatggaatcatcgaatggacacgaatcaaatcatcgttgaatggaatcgaatggaatcatcgaatggactcgaagggaatcattatcaaatggaattgaatgaaatcataatcgaatggagtcgaatggaatcatcaccgaatggaggaatcaaaggaaatcatcgaatgggatcaactggagtcatcgaatggaatcgagtggaatcatcgaatggatttgaacagaatcaacatcgaatggaatcgaatggaatcatcgaatggactcgaatggaatcatctaatgcactcgaatggaataatcatcgaattgaaatcatcatcagatggaatcaaatggaatcatcactgaatggaatcaaatggaatcatcgaagggaaagagatggaatcatcatcgaatggaatcaaatagaagcattgaatgaaatcgaatggaatcataatagaacacaattgaatagaatcatcatcgaatggactcgaatggaaacatcgtcaaatggaatcgaaaggaatcatcatcgaatggagtcgaatgaaatcatcaatgaatggaatcgaatggaatcatcagagaaaggaatcaatgatcatcaaagggaatcacaggaaatcatcgaatgggatcaaatggagtcatcgattggaattgagtggaatcatcgaatggatttgaacagaatcaacatcgaatggaatcgaatggaatcatcgaatggactcgaatgcaatcatctaatgcactcgaatggaataatcatcgaatgtaatcgaatggactcatccaatggaatcaaatggaataatgaaatggaatcgaacggaatcatcatcaaatggaaccgaatggaatcattgaatggaatcaaaggcaatcatgggaatcatcatcgaatggaattgaatggaatctttgaatggattcgattggaatcatcatcgaatggacttgaattgaattatcgaatggatttgaatggaatcatcatcgaatggaatccaatggaatcatcgagtggaattgaatggaatcatcattgacttgaattgaatggaatcatcaaatggactcgaatggaatcatcatagaatggaatcgaatgcaattatcgaatggacttgaatgaaatcacctttgaatggaatcaaagggaatgattgaaaggaatcgaatgccatcatcatctaatggaatcggaaggaatcatc

SEQ ID NO: 475644 - DNA, 1568 bp, Homo sapiens
atcaaattgtcaatgaagggaattgaatggaatcatagaacggaatccaatgtaatcatcattgaattgaacccaatggaatcattaaatggactcgaatggaatcatcgaatggactcgaatggaatcatcatcgaatggaatagaatggaatcatcgaatggaatcgaatggaatcatcatcgaatgaaatcaaatggaatgatcatatggactggaatggaatcatcatcgaatggaattgaatggaatcatcgaatggaatcaaatggaatcatcctcgaatggaatctaatgaaatcaccgaatggacacgaatggaatcatccaatggatttgagtggaatcatcattgaatggaatcgaatgattcgaatggaatcattgaatggaatggaatggaatcatcaaagaaaggaatcgaagggaatcatcgaatggaatcaaacggaatcatcgaatggaatggaatggaatcatcatcgaatggactcaaatggaataatcttcgaaaggaatcgaatagaatcgaatggaacaatcaaatggactccaatggaatcatctaatggaatcgagtggaatcatcgaatggactcgaatggaaatcttctaacggactcaagtggaatcatcatcgaaagcaagcgaatggaatcatcatcgaatttcatcgaatggagtcatcatcatatggaatcgagtggaagcattgagtgggctcaaaagaaatcatcggagtatggaattgaatggaatcatcaaatggactcgaatggaatcatcatcaagtggaatcgaatggaatcatcatcaagtggaatcaaatggaatcatcgaatggacacgaatcaaaacatcgttgaatggaatcgaatggaatcatcgaatggactcgaagggaatcattatcgaatggaattgaatgaaatcataatcgaatggagtcgaatggaatcatcatcgaatggagaaatcatcgaatgggatcaaatggagtcaacgaatggaatcgagtggaatcatcgaatggatttgaacagaatcaacatcgaatggaatagaatggaatcatcgaatggactcgaatggaatcatctaatgcactcgaatggaattatcatcgaatgtaatggaatggactcatccaatggaatcaaatggaatcatcaaatggaatcgaacggaatcatcctcaaaaggaaccgaatggaatcattgaatggaatcaaaggcaatcatgcgaatggaatcgaaaggaatcatcatggaatagattcgaatggaatcattgaatggaatggaatggaatcatcaaagaaaggaatcgaagggaatcatcgaatggaatcaaacggaatcatcgaatggaatggaatggaatcatcatcgaagggactcaaatggaataatcttcgaaaggaatcgaatggaatcgaatggaacaatcaaatggactccaatggaatcatctaatggaatcgagtggaatcatcgaatggactcgaatggagtcatcatccaatgaaatcggatggaatcaatgaagggactcgaatgaaatcatc

SEQ ID NO: 475645 - DNA, 819 bp, Homo sapiens
gaatggagttgaatggaatcatcatcgaatgagatcgaatggaatcatcgaataacatcgaatggaatcatcgtcgaatggagtctaatggaatcatcaaatggactcgaacggaatctggaatcatcatcgaatgcaagcgaatggaatcatcatcgaatttcatcgaatggagtcatcatcatatggaatcgagtggaagcattgaatgggctcaaaagaaatcatcggagaatggaattgaatggaatcatcaaatggactcgaatggaatcatcatcaagtggaatcaaatggaatcatcgaatggacacgaatcaaatcatcgttgaatggaatcgaatggaatcatcgaatggactcgaagggaatcattatcgaatggaattgaatgaaatcataatcgaatggagtcgaatggaatcatcatcgaatggaggaatcaaaggaaatcatcgaatgggatcaactggagtcatcgaatggaatcgagtggaatcatcgaatggatttgaacagaatcaacatcgaatggaatcgaatggaatcatcgaatggactcgaatggaatcatctaatgcactcgaatggaataatcatcgaatggaatcaaaggcaatcatggtcaaatggaatcaaatggagacatcattgaatagaattgaatggaatcatcacatggaatcgaatggaatcatcgtaaatgcaatcaagtggaatcatcgaatggaatctaagggaatcatcgaatggaactgaatggaatctttgaatggattcgattggaatcatcatcgaatggacttgaattgaattatc

SEQ ID NO: 475646 - DNA, 1590 bp, Homo sapiens
atcaaattgtcaatgaaaggaattgaatggaatcatagaacggaatccaatgtaatcatcattgaattgaacccaatggaatcattaaatggactcgaatggaatcatcgaatggactcgaatggaatcatcatcgaatggaatagaatggaatcatcgaatggaatcgaatggaatcatcatcgaatgaaatcaaatggaatgatcatatggactggaatggaatcatcatcgaatggaattgaatgtaatcatcgaatggaatcgaatggaatcatcctcgaatggaatctaatgaaatcaccgaatggacacgaatggaatcatccaatggatttgagtggaatcatcattgaatggaatcgaatgattcgaatggaatcattgaatggaatggaatggaatcatcaaagaaaggaatcgaagggaatcatcgaatggaatcaaacggaatcatcgaatggaatggaatggaatcatcatcgaatggactcaaatggaataatcttcgaaagaaatcgaatggaatcgaatggaacaatcaaatggactccaatggaaacatctaatggaatcgaggggaatcatcgaatggactcgaatggaaatcttctaatggactcaagtggaatcatcatcgaatgcaagcgaatggaatcatcatcgaatttcatcgaatggagtcatcatcatatggaatcgagtggaagcattgaatgggctcaaaagaagtcatcggagaatggaattgaatggaatcatcaaatggactcgaatggaatcatcatcaagtggaatcaaatggaatcatcgaatggacacgaatcaaatcatctggaatcatcaaatggattcgaatggaatgatcatcgaatggaattgaatggtatcatcgaatggactcgaatggaatcatcatcaaatggaaccaaatggaatcatcgaatggacacgaatgcaatcatcattgagtggaatcaaatggaaccactgaatggcatcaaatggaatcatcatcgaatcatcaaatggaatcatcgtcgaatggattcaaatggaatcatcgaatggactcgaatggaatcgtcatggaatattcgaatggaatcattgaatggaatggaatggaatcatcatagaaaggaatcgcagggaatcatcgaatggaatcaaacggaatcatcgaatggaatggaatggaatcatcatcgaatggactcaaatggaataatcttcgaaaggaatcgaatggaatcgaatggaacaatcaaatggactccaatggaatcatctaatggaatcgagtggaatcatcgaatggactcgaatggagtcatcatgaaatgaaatcggatggaatcaatgaagggactcgaatgaaatcatggaatggactctaatggaatcatcatcaaatgaatttgaatgggatcatcatcaaatgtaattgaatggtatcattatcaaaagaaatccagtggaatcaccaaatggactcgactgtaatgattaaatggactcgaatggaatgatcaaatggaatcgaatggaatcatcgaatggactcggatggaactgttgaatggactc

SEQ ID NO: 475647 - DNA, 1711 bp, Homo sapiens
atcaaattgtcaatgaacggaattgaatggaatcatagaacggaatccaatgtaatcatcattgaattgaacccaatggaatcattaaatggactcgaatggaatcatcgaatggactcgaatggaatcatcatcgaatggaatagaatggaatcatcgaatggaatcgaatggaatcatcatcgaatgaaatcaaatggaatgatcatatggactggaatggaatcatcatcgaatggaattgaatggaatcatcgaatggaatcgaatggaatcatcctcgaatggaatctaatgaaatcaccgaatggacacgaatggaatcatccaatggatttgagtggaatcatcattgaatggaatcgaatgattcgaatggaatcattgaatggaatggaatggaatcatcaaagaaaggaatcgaagggattcatcgaatggaatcaaacggaatcatcgaatggaatggaatggaatcatcatcgaatggactcaaatggaataatcttcgaaaggaatcgaatggaatcgaatggaacaatcaaatggactccaatggaaatcatcgaatggactcgaatggaatcatcatcgaatggaatcaaatggagtcatcaaatggactcgaatgaaatcatcatcaaacggaatcgaatggaatcattaaatggaatggaatggaatcatcatggaatggaaacgagtggaatcactgaatggactcggaatgggatcatcatcaaatggaatcgaatggaatcatctaatgaacttgaaaggaatcatcatcaaatgaacgaatggaatcatcatcgaatttcatcgaatggagtcatcatcatatggaatcgagtggaagcattgaatgggctcaaaagaaatcatcggagaatggaattgaatggaatcatcaaatggactcgaatggaatcatcatcaagtggaatcaaatggaatcatcgaatggacacgaatcaaatcatcgttgaatggaatcgaatggaatcatcgaatggactcgaagggaatcattatcgaatggaattgaatgaaatcataatcgaatggagtggaatggaatcatcatcgaatggagaaatcatcgaatgggatcaactggagtcatcgaatggaatcgagtggaatcatcgaatggatttgaacagaatcaacatcgaatggaatcgaatggaatcatcgaatggactcgaatggaatcatctaatgcactcgaatggaataatcatcgaatgtaatcgaatggactcatccaatggaatcaaatggaataatgaaatggaatcgaacggaatcatcatcaaaaggaaccgaatggagtcattgaatggaatcaaaggcaatcatggaatcatcattgaatgcaatcacatggaatcatcacagaatggaatcgtacggaatcatcatcaaatggaattgaatggaatcatcaattggactcgaatggaaacatcaagtggaatcgattggaagtgtcgaatggactcgaatgaaatcatcatcgagtggaatcgaatggaatcatcgaaaggactcgaatcaaatcctaaaatggactcgaatggaatcatcgaatgcactccaatggaatcaacatcgaacggaccctaccggaatgatcaaatggactcgaatggaatcattgaatggaaatgaatggaatcattggttggactcaaatggaattatc

SEQ ID NO: 475648 - DNA, 1085 bp, Homo sapiens
tcgaacggaccctaccggaatgatcaaatggactcgaatggaatcattgaatggaaatgaatggaatcattgattggactcaaatggaattatcgaacgggctcaaatggaatcatcgaatggactcggatgtaatcattatcgaatggaatcgaatggaatcatcgaatggaattgatcgaaatcattatcgaacggaatcaaatggaatcgaatccaatcatcatcgaatggaatcgaatggaatcatgatcgaatgcaatagaatggaatcatcaaatggaatcgaatggaatcatcatcgaatggaatcgaatggaatcatcaaatggaatccaatggaatcatcatcaaatggattcaaatggaatcattttcgaatagaatcgaatggaatcattgaatggaatcatcatcaaatggagtccagaggaatcactgaattgaatggaattatcattgaatggaatcgaatagaatcatcgcatggaatcaaatggaattatcatcaaatggaatcgaatgatatcatcgaatgcacttgaatggaagcatcaacgaatggaattgaatggtatcatcgaatggactcgaatggaatcatcttccagtagaatctaaaggattcactaagtggactccaatggaataatcatcaaatggaatcgagtggaatcatcgtacatactcgaatggtaacatcgaatggaatagaatggaatcatcaaatggatttgaatggaatagtcatcaaatggaatcaagtggaatgatcgaatggactggaatggaatcatcatcgaatggatttgaatggaatcatcgaatacacttgaatggaatcttcatcgataggaaatgaatggaatcatcaaatggacacgaatggaatcattgtcgaagggaatcatatggaatcatcaaatggactcgaatgcaatcatcgaatgaactcgaatggaatcatcatggaatggaatcgaatagaatcattgaatggactcgaatgtagtgatcaaaaggactcgaaaggcattaacgaatggactcgaatggaatcattgaatggacccctaatggaatca

SEQ ID NO: 475649 - DNA, 674 bp, Homo sapiens
tggactcgaatggaatcatcatcgaatggaatagaatggaatcatcgaatggaatcgaatggaatcatccatcgaatgaaatcaaatggaatgatcatatggactggaatggaatcatcatcgaatggaattgaatggaatcatcgaatggaatcgaatggaatcatcctcgaatggaatctaatgaaatcaccgaatggacacgaatggaatcatccaatggatttgagtggaatcatcattgaatggaatcgaatgaatggaattgaaaggaatcatcaaatggacttgaatgaaatcattgaatggactcaaaaggaatcatcatcgaatggtattgaatggaatccgaatggaatcgaaaggaatcatcatggaatagattcgaatggaatcattgaatggaatggaatggaatcatcaaagaaaggaatcgaagggaatcatcgaatggaatcaaacggaatcatcgaatggaatggaatggaatcatcatcgaatggactcaaacggaataatcttcgaaaggaatcgaatagaatcgaatggaacaatcaaatggactccaatggaatcatctaatggaatcgagtggaatcatcgaatggactcgaatggagtcatcatcaaatgaaatcggatggaatcaatgaagggactcgaatgaaatcatc

SEQ ID NO: 475650 - DNA, 1671 bp, Homo sapiens
atcaaattgtcaatgaacggaattgaatggaatcatagaacggaatccaatgtaatcatcattgaattgaacccaatggaatcattaaatggactcgaatggaatcatcgaatggactcgaatggaatcatcatcgaatggaatagaatggaatcatcgaatggaatcgaatggaatcatcatcgaatgaaatcaaatggaatgatcatatggactggaatggaatcatcatcgaatggaattgaatggaatcatcgaatggaatcgaatggaatcatcctcgaatggaatctaatgaaatcaccgaatggacacgaatggaatcatccaatggatttgagtggaatcatcattgaatggaatcgaatgattcgaatggaatcattgaatggaatggaatggaatcatcaaagaaaggaatcgaagggaatcatcgaatggaatcaaacggaatcatcgaatggaatggaatggaatcatcatcgaatggactcaaatggaataatcttcgaaaggaatcgaatggaatcgaatggaacaatcaaatggactccaatggaatcatctaatggaatcgatgatcgaatggaatcgacggcaatcatcatccactggaatcaaacggaatcattgaatggaatcgaatggaatcaatgtcaagtggaatcgagtggaatcatcgaaagaaatcgaatggaatcattgtcgaatggaatggaatggaatcaaagaattgaattgaatagaatcaccaatgaattgaatcgaatggaatcctcatcgaatggaatcgaagggaaatggaatcatcatcatatggaattgagtggaatcatcgtatggactcgaataatcatcgaatggactcgaatggaatcatcatcgaatggaatccaatggaatcatcaaatggactcgaatgaaatcatcatcaaacggaatcgaatggaatcattgaatggaatggaatggaatcatcatggaatggaaacgaaatcgaatggaatgattgaatgggctagaatggaatcatctttgaatggaatcaaagggaatcatcatcgaatttcatcgaatggagtcatcatcatatggaatcgagtggaagcattgaatgggctcaaaagaaatcatcggagaatggaattgaatggaatcatcaaatggactcgaatggaatcatcatcaagtggaatcaaatggaatcatcgaatggacacgaatcaaatcatcgttgaatggaatcgaatggaatcatcgaatggactcgaagggaatcattatcgaatggaattgaatgaaatcataatcgaatggagtcgaatggaatcatcatcgaatggaggaatcaaaggaaatcatcgaatgggatcaactggagtcatcgaatggaatcgagtggaatcatcgaatggatttgaacagaatcaacatcgaatggaatcgaatggaatcatcgaatggactcgaatggaatcatctaatgcactcgaatggaataatcatcgaataattgaatggaatcatcacatggaatcgaatggaatcatcgtaaatgaaatcaagtggaatcatcgaatggaatctaagggaatcatcgaatggaactgaatggaatctttgaatggattcgattttaatcatcatcgaatggacttgaattgaattatc

SEQ ID NO: 475651 - DNA, 588 bp, Homo sapiens
tgggatcaaatggagtcatcgaatggaatcgagtggaatcatcgaatggatttgaacagaatcaacatcgaatggaatcgaatggaatcatcgaatggactcgaatgcaatcatctaatgcactcgaatggaataatcatcgaatgtattcgaacggactcatccaatggaatcaaatggaataatgaaatggaatcgaacggaatcatcatcaaatggaaccgaatggaatcattgaatggaatcaaaggcaatcatgggaatcatcatcgaatggaattgaatggaatctttgaatggattcgattggaatcatcatcgaatggacttgaattgaattatcgaatggatttgaatggaatcatcatcgaatggaatccaatggaatcatcgagtggaatcgaatggaatcatcattgacttgaattgaatggaatcatcaaatggactcgaatggaatcatcatagaatggaatcgaatgcaattatcgaatggacttgaatgaaatcacctttgaatggaatcaaagggaatgattgaaaggaatcgaatgccatcatcatcgaatggaatcggaaggaatcatc

SEQ ID NO: 475652 - DNA, 3003 bp, Homo sapiens
atcatcaacgaatgaaatcgaatggaatcactaaatggtcatgaatggaatcatcatctagtagcaacgaatggaatcatcgaatggactcgaatggaatatcatcgaatggaattaaaagcaatcatcgaatggactccagtggaattattgaatggactaaaatggaatctttatcgaaaggactcaaaaagaatgattgaatggcctcgaatggaatcatcggttggactcaaatggaattatcgaatatccgcaaatggaatcatcgaatggactcgaaaggaatcattatcaaatggaatcaaatggaaccatcaaatggaatcgaatggatcatcgaatgcaattgatcagaatcatcatcgaatggaatcaaatggaatcatcaaatggaatcgaatgcagtcatcgtcaaatagaatcgagtggaatcatcatcgaatacaatcgaatggaatcatcaaatggaatcaccatcgaatggaatcaaatggaatcatcatcaaatggaatcgaaaagaatcatcatcaaatggaatcgaatggaagcatcatcgaatggaatccaaaggaatcatcatcgaatggaaccgaattcatcatcgaatggattctgatggaatcatcattgaatggaatcgaatggaatcatcatctaatggaaaatattggaatcatccaatggaattgaatggaatcatcaaatggtctcgaatggaatcctcatcaaatggaatcgaatggaatcatcgaatagaatcaaatgtaataatgatcgaatggactcgaatggaatcaacatcaaatggaatcgaatggaattatcaaatggaatcaaatagaatcatcgagtggactcgaatggagtcttcgaatggaattgaatggaatatcgaatggaatcatcatcgaatggtatcgaatggaatcatggaatggaatcaaatggaatcatcatggaatggaatcgaacggaatcatcgaatggagtcgaatggaatcttcctcgaaaggaatcgaatggaatcatccaatggacacgaatggaatcatcatcgaatggaatcaaatggaaccatcaaattcaacagaatggaaccattgaatggacttgaaatgaatcccctcatcgaatgtaataaaagagaatcaccgaatgcactaaaatgggatgatcgaatagcctcgaattgcatcatcatgaaatggaatcgaatggagtcatctcatggactcgaatgtaatcatcaaatggactcaaaaggaatcatcatcaagtggaatcgagtgaaatcatcgaatggactcgaatgccatcatcgaataatcatcctcgaatggaatctaatgaaatcaccaattggaaacgaatggaatcatccaatggatttgagtggaatcatcattgaatggaatcgaatggaatcatcaaatggactcgaatggaatcatcttcgaatggaatcgaatgaaatcacaatcgaatggaatggaatggagtcatcatctaatggaaaacatcaaatcaagtcgaatggaatcatcatcgaatggaatccaatggaatcatcgaatagcatcaaatggaatcatcgtcgaatggattcaaatggaatcatcgaatggactcgaatggaatcgtcatggaatggaatcatcgaatggaatcaaacggaatcatcgaatggaatggaatggaatcatcatcgaatggactcaaatggaataatcttcgaaaggaatcgaatggaatcgaatggaacaatcaaatggactccaatggaatcatctaaaggaatcgagtggaatcatcgaatggactcgaatggatggaatcaccaaatggactcgactgtaatgattaaatggactcgaatggaatcatcaaatggaatcgaatggaatcatcgaatggactcggatggaactgttgaatggactcgaatggaaatcatcgaatggactcgaatggaatcatcatcgaatggaatcaaatggaatcatcaaatggactcgaatgaaatcatcatcaaacggaatcgaatggaatcattgaatggaatggaatggaatcatcatggaatggaaacgaatcgaatggaatcatcgaataacattgaatggaatcattgtcgaatggagtgtaatggaatcatcaaatggactcgaacagaatctggaagcattgaatgggctcaaaagaaatcatcggagaatggaattgaatggaatcatcaaatggactcgaatggaatcctcatcaagtggaatcgaatggaatcatcgattggactcgaagggaatctttatcgaatggaattgaatgaaatcataatcgaatgtagtcgaatggaatcatcatcgaatggaggaatcaaaggaaatcatagaatgggatcaaatggagtcatcgaatggaatcgagtggaatcatcgaatggatttgaacagaatcaacatcgaatggaatcgaatggaatcatcgaatggactcgaatggaatcatcgaatggactcgaatggaatcatctaatgcactcgaatggaataatcatcgaatgtaatcgaatggactcatccaatggaatcaaatggaatcatcaaatggaatcgaacggaatcatcatcaaacggaaccgaatggaatcattgaatggaatcaaaggcaatcatgggaatcatcgaatggaattgaatggaatctttgaatggattcgattggaatcatcatcgaatggacgtgaattgaattatcgaatggatttgaatggaatcatcatcgaatggaatccaatggaatcatcgaatggaatcgaatggaatcatcattgacttcaattgaatggaatcatcaaatggactcgaatggaatcatcatagaatggaatcgaatgcaattattgaatggacttgaatgaaatcacctttgagtggaatcaaagggaatgattgaaaggaatcgaatgccatcatcatcaaatggaatcgaaaggaatcatc

SEQ ID NO: 475653 - DNA, 2063 bp, Homo sapiens
tcatcatcaagtggaatcgaatagaaggattgaatgaaatcaaatggaattatcatccaacggactcgtatggaatcatcatcgaattgactcatatggaatcatcaatggaatccagtgtaatcatcatcgaattgaacccaatggaatcatgaaatggactcgaatggaatcatcgaatggactcgaatggaatcatcatcgaatggaacagaatggagtcatcgaatggaatcgaatggaatcatcatcaaatgaaatcaaatggagtcatcgtatggactccaacggaatcatcatcgactggaatcgaatagaatcatcgaatgaactcaaatggaatcatcatcgaatggaatcaaattcaacgaatggaatcatcgaatggactcgaatggaatatcatcgaatggaattaaaagcaatcatcgaatggactccagtggaattattgaatggactaaaatggaatctttatcgaaaggactcaaaaagaatgattgaatggcctcgaatggaatcatcggttggactcaaatggaattatcgaatatccgcaaatggaatcatcgaatggactcgaaaggaatcattatcaaatggaatcaaatggaaccatcaaatggaatcgaatggatcatcgaatgcaattgatcagaatcatcatcgaatggaatcaaatggaatcatcaaatggaatcgaatgcagtcatcatcaaatagaatcgagagtcatcatcgaatggattctgatggaatcatcattgaatggaatcgaatggaatcatcatctaatggaaaatattggaatcatccaatggaattgaatggaatcatcaaatggtctcgaatggaatcctcatcaaatggaatcgaatggaatcatcgaatagaatcaaatgtaataatgatcgaatggactcgaatggaatcaacatcaaatggaatcgaatggaattatcaaatggaatcaaatagaatcatcgagtggactcgaatggaatcttcgaatggaattgaatggaatatcgaatggaatcatcatcgaatggtatcgaatggaatcatggaatggaatcaaatggaatcatcatggaatggaatcgaacggaatcatcgaatggagtcgaatggaatcttcctcgaaaggaatcgaatggaatcatccaatggacacgaatggaatcatcatcgaatggaatcaaatggaaccatcaaattcaacagaatggaaccattgaatggacttgaaatgaatctggaatcatcaaatggattcgaatggaatgatcatcgaatggaattgaatggtatcatcgaatggactcgaatggaatcatcatcaaatggaaccaaatggaatcatcgaatggacacgaatgcaatcatcattgagtggaatcaaatggaatcattgaatggcatcgaatggaatcatcatcgaatcatcaaatggaatcatcgtcgaatggattcaaatggaatcatcgaatggactcgaatggaatcgtcatggaatattcgaatggaatcattgaatggaatggaatggaatcatcatagaaaggaatcgcagggaatcatcgaatggaatcaaacggaatcatcgaatggaatggaatggaatcataatcgaatggaatcaaacggaatcatcgaatggaatggaatggaatcatcatcgaatggactcaaatggaataatcttcgaaaggaatcgaatggaatccaatggaacaatcaaatggactccaatggaatcatctaaaggaatcgagtggaatcatcgaatggactcgaatggagtcatcatgaaatgaaatcggatggaatcaatgaagggactcgaatgaaatcatggaatggactctaatggaatcatcatcaaatgaaattgaatgggatcatcatcaaatgtaattgaatggtatcattatcaaaagaaatccagtggaatcaccaaatggactcgactgtaatgattaaatggactcgaatggaatcatcaaatggaatcgaatggaatcatcgaatggactcggatggaactgttgaatggactc

SEQ ID NO: 475654 - DNA, 619 bp, Homo sapiens
ccctttgttttggccaatttcttccatttggaacagctgtatttacccgatacatgtacccccattgtatctacagccgacacagaatcctcgttctccttatccaagtgacctgccctggcatttgggcatttggctgtatgctttttcttacctatgcacatgtgcttgcccttctggtgggccaaggtgtttttccagaattgagcctgggaatggacagtcacaggcttccagatgatcagcccatctttgatcagcttccggatctactgacgagagttggcattggcgatttcattgatctcatcggggtccaaccagaccttcttcttgccccagtggaggacactagaggcgagcctcttctgaagccgaagcatactcatggcttgtatcttattcacatccgtagtttaaactaccatctgtatgataagaaccctgaaatggatatttttatctcttagctccaattttgcaaatccacattgtgcttattgaaaagtttctctttagatgtttcaaaggtgcctcaaactcaacatgtctaaaacggcaccaatgacctcccatcccaaactcagtcttctgtgtttcctgttgctgtgaacactac

SEQ ID NO: 475655 - DNA, 2222 bp, Homo sapiens
ggcctgcaaccacttggtgttggctgatttgtccctcctgaaatgggtgtatttactcaatgcatatgcccccattgtatcttggaaaagaagataagatgtgggaaagttctgaatttcctagagatgtattgaatggttttgaccagaatgaagacagtgatatggatgatgaagtccatgctgaagtggtctcagatagagataaggaacttattgggaactatgttatttcagaaaggagaaatcagaattctgtccatagaataagggcaagggtggttggaggccacaactggaaggaccaacccaataaggaggaatggatcagggtcccacttaaagaagcagtctggccatgctgtggcaaagcagctgtgctgtgctgggggttctttcctcatatggggggtcctttcctcatttggagagaccatttgggcaagttccttagcctctctgggcctctgtggcttcactgggacaatggggagaattgtagctcgtacctctgggtggctgtgtaaaaatgaacaccagtagattattaccaagtctatttttaattgccttctcacatcaaattactaaaagtaatcagcagatttcaaaatatctatctcatacaaaactttgcaatgtttatctgactaattctctcgtatattcagaacagtcaaaagtttgtgaaagtgcataatagggattcaccttagataaagtgaaaagagaaaataaattgagaaaatataaaaactgctgactagcacctctgtctttcagtaagggaagtaggagaaaatatgaaaggaatttcagcatgaaggatttggaattacttcctgtcagcaagggcactaaaatatatgtttttttgattgaacaataaacttaggcaataaagaagtaaaaaatccaataacgtctgattacacaaatattttatgtaccataggtaagtcaatacccaatttaaagcaaaaacaaaaccaccaaattttactgtaccttaggttaaatattttgaccattacactttaccataaatagcacattaataattgttaatcactgtacaatgtagtctttgacaaaacttttaaactatttcatttggttgaggggtgtacaatgcttaatagaagctaatttatcttatgatgcttccataaacctttcactgaaggtgataccaaatctatatcagagataaaatgtttaacactatatttctatttgctacacaatagttcattctcccaattaacgaagggaaaatattgtctgcaattatctgattgctgggtgttctgattgctgatattctgatattacagacactacctaactgaaagaaaatgatcctatttgtttttaatagcctctgagggatatactaatctaatgaaattgaaacaggaaagaaaatggctagcatacagtttttgtagtaaactattttaagaagaaaaaatatgatatgattaatcttctaaaccttcttcaatggtgccaactcagtgaggggcattaaagtgcaattaagggcctaaataatctcttatggtaatatccttaagggaggctactgattaaactactaaatgtggacatacagaatataaaactggaaataatcaagagcttgctaaactgctaatttgagcttatatttagattaaataattggctgaaacattatgttgttcttaaatttgttttttttttttttttgtagctcaagaacacataattgctgatttggggtcttaatttttttttcaaagaagaaatattaaaactttctatcatatattttcatgagcttttaaaactcattctattctattaaataaatctcagaattgaaatgtctgtactaaggaggcacacatggtaactgggggcccataattgagtgttttgtttctactaagctccagtagcaagcctaaagctgtttcttgaatcattatctgttaaatgagaggatttttctccaaaatcctaaaggtctacacttgattcacctataaaaggctgccaaagatccagaacagtgtacttgcctctgatacttcaatcacagtcagatctgctgtatcaatacggatcaagtggaagatggcttgcatagcaaatggcaatgcagactttttggacagcctttttatgtcctgggcctccatcaaattatcaccttttcaagtcactaggaaaac

SEQ ID NO: 475656 - DNA, 584 bp, Homo sapiens
gttgctctggcaacccttcaacctggatttgagcccccacaatggacgccacttgcctagaccagctcggtcagggagatcctaacccattggtgctagaggaattaaagacacacacacagaaatatagaggtgtgaagtgggaaatcaggggtctcacacccttcagagctgagagccccgaacagagatttacccacatatttattaacagtaagccagtcattagcattgtttctatagatattcgattaattaaaagctttgagctgatactgaggagtgtctgcacagtgtccagtgatgtgacccatcttcagatccctcagccatggatatcagcacctgctccagtggaggtagtaggggagacacagaaaatcaaaatcccaaagaaatattacttcacatctgttagaatggctattatcaaaaagacagaagataacaagcgttgtgaagggtgtggagaaaagagaaatcttgtgcactgttagtggtaatgtaaactaatacagacattattatgaaatatataaaagttcctcagaaaagtaaaaataggatgaccatatgatccagga

SEQ ID NO: 475657 - DNA, 549 bp, Homo sapiens
aaaagtcataaacttcaatgatcaaagaaaatgagtttgatgaattgacagaagtaggcttcagtaggtgggtaataacaaactcctctgagctaaaggagcatgttctaacccaatgcaaggaagctaagaaccttcagaaaaggttacaggaactgctaactagaataaccagtttagagaagaacataaatgatgtggtggagctgaaaaacacagcaagagaacttcgtgaagcatacacaaaaatcaatagccaaattgatcaagaagaagaaaggatatcagagactgaagatcaacttactgaaattaggcatgaagacgagattagagaacaaagattgaaaaggaacaaaaaatgcctccaggaaatatgggactatctgaaaagaccagatctcctattggggtctctgaaagagacaagaatggaacgaagttggaaaacacacttcaagatattatccaggagaacttccccaacctagcaagacaagccaacattccaattcagaaaatgcagagaagacaactaagatactcctc

SEQ ID NO: 475658 - DNA, 1270 bp, Homo sapiens
aggaggaaagaagaaaaagacgatggggaaacagtttttgggtagatggagggggaaggagggtggcgagcagcaggagtggagagaaggctttgctgtggtcatggacatgttcacccatgtggacatcttttatgccggcttcaagaggaaagcagctttgtacatcatcgtggacgggagtaaagtcaagtacgttctgcatatgtgtgagcagacccgcatgcacctggggcacctcaaggctgaggccagggaaggcttccttgatgtctgcacagttgaagtggatttgaggcacatgagcagagtagaacctttagggtggggagaaaccacggaacagaggtggatcagagacggctgccagtggggtcaagctggggcctcatatccacctggggcctccatgccaaactgcgacctgatgtccagcggaggcctgatgtccatgcaggaactggagtccctctgggacctgttgtccacccggggcctggtgtccaacgtccaccttgagtccagtgtgcacttggggcccgacgttttcctggggcctttgtgtccgctggggccttatgcccacctggagggggtggatatatggcctcagggggccatcgggtcccgggtgcgcactggacttgacgtatacatcaggcacgaggtttacacccaggccccaggtgcactgaatgtcacagatggacttcaggcccaaggaggataccaaggcttcaggcggacacccaggcctcacgtggatatcaggtcttaggtgaaactcaggctctagttggataccgagtcttcaagtggacataacaatgccccaggtggaacccaggctttagatggataccaggctccaggtggacattaggccccagggtgacaccaaggctccacgtggacagatgtttattttttaaccttctatttgtctgatgtctgggctctatggggagtggcaagggaaagtggtatacacttaatgacacagaggagactttgacctaaatggtgagaccctgaagtgtgaatgctttggaggagaatatagatcagaagtttatgatcaaagtaattatttacaaatagatattttccattactttatttttaatttaaagttctatataacattggaagtaatattctttatgtacaactacaatagattttatcctttttctaatacttctgttctagttacagaaccatgaatgacctctttgataactggaatgaaaatgttgtagctgcttat

SEQ ID NO: 475659 - DNA, 1278 bp, Homo sapiens
gatcctacccgcaccccgcgcctacacgcttctccccaccagtaccccgccctgtcatcctgctcctacccacaccccgctcctacctgcgtccagccccggagcacctagctcctacatggacctttctcctacctgctgccctgcccggcagcaccgcatcctacaggcgccccaatccgccagcacccaactgctaccagtcctacagcacctcctacccaactgctaccatcctacacatgctcgccccgccagaaccccagtcttacccgcactccactcccacccatgccatgccccgccagcaccctgcttttacctgcgttctgctccttccagctccgtgccctgccagcaccccatcctacacatgcctagcccagcaatcaccctactcctacttgaacccggctcctactcgcagcccactgctacacatgccccaccactccagcgccagcccctacctgaaccctgctcctacccacaccctgccctaccagtaccccataccacccatgccccaccccaccagcaccccaatattacccacacctagctcctacctacaacctgctcctatctgtgccccaccccaccagcacccgactcctaggagcaccctgctctgactcgccccccacacctacccccacccctgccccaccagcaccccactcctactggagcccatccgcactgcaccctggtcctgcctgcaccatgatcctacccctgcccagctcctgcgcgcttgatgtcttcagactattaacgtttagacaaccacacaatccattagatccattcaaaatgtttcttgataaactatttatgacatgaaagtcacacacaacatgttgcaggaaactgaggactggagagactgatatgagagtacaggaggattgtttattttaggtacacattggctcagtggattcgcatccaaaaagctgagcattaaacaaagacagagtggggtttttgtaagtggacttacaataaataaaacaaaagcagctaatcatatgacaggtcacataatctagagcatagcacaacttgtggccttgcatagccagtggccttgtagctgcattgaaagaaaaacaggaactggctaaatacggacatttgtaaaacataatcatgcttaagaaggctggggaaagagtaacagtaaaataaattgtctttttcttttttttccttcatccttgctctggaagagggggtgtctggagcccattcctttggccttggcttctcaaa

SEQ ID NO: 475660 - DNA, 638 bp, Homo sapiens
tcttcatctatagcccagagaggggctgggggtagaggtgcagcatggcctccgtgggctgtgagtgtcccctgcagctgggaaccacagcacatggccagacgcttgggcctggagctgccctcctcacagacaccccagcagaccgtcacatgctacccacaggccttaaattcctggagctggccaagcaggtgggggagttcatcacctggaaacaagtggagtgtcccttcgagcaagacgccagcatcacccactacctgtacaccgcccccatcttcagtgaggatggtaaggtagccctgcagccctcctgcctactgggccacggaactctgggagcttacgtggggagtgccaagcacagcactgactgtgtaggcgtgtacgtgtgtgcaggtgtaacagacacaggcacgagtcaaccatatgtcttcagagactgctgtgtgccaggcaacaatctagcagttaacacagacaaaactgtggccctcctggagccccgttagagaggggcatcttccatttttactgtctcttccttctgtccctcccacaaccccaaaaaagtggagggaagtaaggcttccctggcagggcccacctggcaattagtcagacttgaatctcct

SEQ ID NO: 475661 - DNA, 842 bp, Homo sapiens
taccggaagaggatgcatcagctcctacaggctctgcaccagaagctggcggctctgcgccaggggccagaaggtctggtgggtgccgacaagcccatctcctacaggaccaagccaccagcctccatccacagggagctccttggtgtctgcagcgacccctacacactggcccagcagctgacccacgtggaactggagcggctgcggcacatcgggcctgaggagtttgtccaggcctttgtgaacaaggaccctctggccagcacaaagctcgggggcgcaccacgacaaccgagtcccgagtccccggaaagcctggacgtgcgggacgtgggggtcacccacccagcgagggaggaggagtgggccaggaaccaggccgtgggccgcgctgctcgggtgggccaggaccctgggcagggaggagggtggagggccccctggcgcgctccgggaccccgtgcgccttcccggtgcgtttcggtgggcgccggtgccctccagcggccacgcggggaagcgcgggttgctgcccgctgcccgggatgggacacagcccacgcacccggatttcgatcccgcccttctgggagcccaaccagcagggtgccggtgcctcccacgggctaaatccaagccagaattgcaaacattgtgccttctgccctcacacctaataaaagtacaaactatgagattgcattttcacttctcagataagcaaaaatcacctagttaagtttcatcttttaaatggtggtatattatacagtggaaagttctaaatccatttaaaaattttttttccaaaggatatgttatggcacagggaaaggttc

SEQ ID NO: 475662 - DNA, 1095 bp, Homo sapiens
tctgtcctttatcctcctggaggagtcacaggtccacggctctacccccaacacaaactgcccagctgggtcccatggctgtccaggtagatgaggactacacctgccatcccttggccacaggccctgttcagctgcttttccctgtgacatttccactacggtctggggagggttatgtggcccatgatggcttcaccaccggcccccaccaccaccccggggctgaggccacccagtctgtggtgtcctgttgtggcagccaaatggacggggaagatgctgatgaagtgctcaacccaggcctggccatggagttcaaccctcagcagagggtgtctgcactgggccgcttgagggctgtatgtgatggacctgtatacggctgctgttggcagggggtgaggagctcacacagtcaatgggaagccctgagaacctggctcaggaaatcagcagggttccagggcagcctggtgtccagagtcctccaggacagcagcctaggaagggggctctggctggctgcacaagagctactgtggccagcaaagggccgcgtctgcatgctttcccaggaagatgcacgtgtgctctggggttacagcagccctggccaggagccctgggggaaggagccccgactgggcacccccttacacctgcacactcccatcaagaaatgctcctcaatcactgtgtccaaggctgcagcctcggggcaccagctgtctgtgtctgtccaggactgtcctggttctaacactgaaattcccacgtcccagggaacccctcagtcctggacgaaccggaacacttgtcactctggctgccgcctgtttccttgcattcttgtctaggacttctgcaccatttgccctctcctctggcctttgctgccctgggcctggcagtgtttagaggtcttccaagcagcctgcccagtcacttaggcattccttatcttcatgcacactgcacggtggaggtgggcccttcccttctgggaagccttcctgtgatatggtcttcaagcactgatctttgtgaaattcctcgaggtttctcatgggatgctggtagcactaccacctg

SEQ ID NO: 475663 - DNA, 1078 bp, Homo sapiens
agtcaaaaaaattagccagggtttagcaaactatgaacccgatttgctctgccatctgcttttgtaaacaaagttttattgggacacagccacactcattcgcgtatggattgtccacggccacagccaagctgagttgcaacaaagatgatatggctcacaaaacttcagtatttactatccgatactttctggaaaaagtcgccaaccctgctgttgctatcaggaattactgtcccccgactctgaccagcctccagcccagctccttctctaagccccagatacatatccaagtgcccatgtacctctccactgcagaatggggtgtccactggcacctatccaaccaggcgcaaccatgttcctcacctccccagcctgctgctgcctttgttctgaaagccagcctcggcgctcctggtgccctccagggctggatccatggggcatgccacgcttccttccctccctcccctccccagcagctctgggacccagtgtatgagagtgccagctgcctccgtctgatgcaagaggagaatgccagaggctcgaagccgcagggagtcaaggctcggccctggccagcccaactatggagccaggactgtccacaccctgcagccgcctcttgtgggcaccggcatttctacacatccctcccttgtcttcacatctccggccactctgggctccgggccctggggctgctgcttttccagcagcacgtggtgcccacacagtctcagtgcctgctccgggccaggcaggaaatggacattcacgggagcacagttacagagggtttgcaggctgtaaaaacacttgctactctcagaccaccccaagatgggagagcgaatggcatggggaagttgtgaaagttctcatggattccgtattttacaagtcttagaaacacactagccatgtgtggatactgtttgtacactgatttgaaccaacaagctgtaaaaagatgtttttgagacaatcgaggaagtaggaataggaacattgtgtctaaaaaatgcacatattttaatcttaagatactttattgctaaaaaatgct

SEQ ID NO: 475664 - DNA, 950 bp, Homo sapiens
tggccaataaggaccccgcccacatctgcgccgtggtctgctgcgtggaaagccggtgatgaaagccagcagcagctggtgatggtgacatgcctgcccatggatttatcccagaggccagggagatgaaaggcactgagtggctgggcctggatcacatgccatcccaactgtcacagaccaacgcaactccttccccaagtggcaccagggccatgtcctcctaccacgggcaggagaggaaggacaaatgggctctgttttcagagggaagaacagatgctggccaggcagaagccgcagaggccatggccttggacagctgcagcagggctgagccttggcaggggtcccggaaggaagcccggggctctgccctgcccgtggtctgctgcggcccagccgggcagattgcgcaggcactcaccgaagagcttttgctggggctgctgggactaaggaaggttaaaaatggagccgatgaacagcctgtgtctttggggaagctgctggggactgctcaggctcgggaaatgtcccgagtgtggccctggagtggctccttcaacaagcaccgaaatgcaggttcatggcctgagggtcctgagcccaaggccgggctcttagcaggactcagggggctgcacatggcaggacttgggttctcacaccatctgctcctggtctggagtgtcttccaggatggcggctgggtccctggtgtggagccctgggcagcaggtgctggccgctggggcctttccccacctgagctgccagggtccctctgtgtggagaccctctcaagtctgaagcagagtccctgtgcctggcaaccctaaacccactctcagaagatgataaaacccactatcagttcaagtctgcaagaggggtgggacagtctcgtgacctcatgttctagctgagtgacatacatagcacaggtc

SEQ ID NO: 475665 - DNA, 916 bp, Homo sapiens
agcaagggcaaaggaagagaatggctttagcaaatgtagacgggaatgagcaagggagcaaacagaccactctagctagagcagagtccataaaggcaggaggccatggctggatctggggaggctgcagcgacaatgtggaatttggggaaaggatctccaaactctttgtggacagtttggagaaggggaaggatgccagagccctgatgaatcttcacaacaacagggccggcagactggcagtgagagccaccatgaaaaggacatgcaaatgtcatggcatctctgggagctgcagcatacagacatgctggctgcagctggctgaattccgggagatgggagactacctaaaggccaagtatgaccaggcgctgaaaattgaaatggataagcggcagctgagagctgggaacagcgccgagggccactgggtgcccgctgaggccttccttcctagcgcagaggcggaactgatctttttagaggaatcaccagattactgtacctgcaattccagcctgggcatctatggcacagagggtcgtgagtgcctacagaacagccacaacacatccaggtgggagcgacgtagctgtgggcgcctgtgcactgagtgtgggctgcaggtggaagagaggaaaactgaggtcataagcagctgtaactgcaaattccagtggtgctgtacggtcaagtgtgaccagtgtaggcatgtggtgagcaagtattactgcgcacgctccccaggcagtgccagtccctgggagctcgagactacagtgaggtgtgattgtgccattgcactccaacctgggcaacagaactgagaccctgactaaaaaataaataaataaataaataaataaataaataaataaataaataaataataaagagaaaagaaaataaa

SEQ ID NO: 475666 - DNA, 943 bp, Homo sapiens
tcatcagttaaggcaaggaccggccatttagacttcttttgtggtggaatgtcatcagttaagttggggcaggacacattcacttcttttgtgattcttcagttacttcaggccatctgggcatatacgtgcaagtcacagaggatgcgatagcttggcttgggctcagaggcctgacaggactgcctccagttccacactctagagcatgtatgattggcagttcctgctgccaattcaaactcttgctcagttctcagccccacccctctccccagattcccttgtcttttctcggaatggtcctcagagggtccttccagggttccaacactacagttttcaagtgaaagagtctatggagaaagacacctggtgttctcagtccttccccaactcaactcttcccccaaaactttacagcagtggatcactgtgccctgctcgaccatcacagacacagacagccacagctctgcaagtgcatgggagagatagcccagttgtggtaaaggtgcaggacccactgagctacatcgtggaaaatgttgaggcaatgacctggagaatggaaatgggatggtggagcatggtggccagctcagagcaggcagctattgaatcaggtcctaaagatgtgaagccaccacagcagtcattgggatagaagaagggtgggaatggggaatgaggagttcaggaaatactttattcaaagggtccacaaaagaggtgaaaagagtagggaaagaaggaatgcaaggtgaggcatagaggaggggagaggcactgatcctgccccagggtgttttccagaacttgcatggctccctaattacctagtaatgctgagagcttatgaaaatgctgtcatttgtgtgaggaggggagggaagactgaaagaagaagaagaaaaaaaagcagatagaaaatgctgttaaa

SEQ ID NO: 475667 - DNA, 1132 bp, Homo sapiens
atccgtgggaaatgcgtggtttcctgggcaagaataatgacctccagccccattattgctgcaaaacatattacacaacatgaatgctactcagccataaaaggaacaaaagatattatttcacaggtgacaagaaagagagaagagagaaggagagaagagctgcagccctttggaggacccagacctgagagctccccaaaccagggctgtgactccccttttgaggcctcgtggttcctggagtctccaagctcccgggcaccaccacattccccagtgccagcagtggaggcagcttgcagtgtgcctgtcaaaattatcaatacagttcttaaccaatgtttgtctctccatacaagtgttatgggatctttgatggtgttgcttttcgggctgaaagcctctgtggccaatgacacatttgcccaaattttgctcgggtccactgggcccactcgtcctggtaggctgtgcttggctcacactactgtcctggatcctatgcttctgaagagactggaaaggagtggcgaggggtgtgaaaatgagcaagtgtggggtccgggcactgtgcacagtcaggtgcactgcaaggtgcttctactgctggcaccaggggacttggtggtgtccgggagcttggagactctaggaaccacagggccccaaagtaggagtcacagccctggttcagggagctcacagctcttctctccttcttgtagccttcaaggtggtgagaagacccagtgtcaagcagaattgtatccagccgctatgaggattactaggaaaaactgagaaactgttacttgtaatcaaggatggctgcataagttgcagacgccggtgtcaagtgaaaatacatggcctatttttttttaaagcaggaaaaatttgtggttatagtacacaaaacttttgatttgttcccgcagtcctgctctcaaattgattttttaaatttgttttaatattactctaaagaagaaaaaattaaaatgtcaatcattagcttaaattttaccttttgtccttgtgttgtacaacgccaattctaaaggcaaatagcatgtttaattcatgtgatatcacgaccaggacaatttctatttcatggcttgtccct

SEQ ID NO: 475668 - DNA, 827 bp, Homo sapiens
tgcaacatttggacgcgaaaacaggagtgcctattctcacttaggtccgtgggcacaggcctgagggtggagccctcaccagaaaccctgcccttgtctacccagcagttccctgtccccctcctgtatcaataagacctttcaatagctaactaattccgagcagaagactaatcagccaaggaaacatgagaaactcaagagcttcaggaagagctggaggagaacacgcaactgggtcagaatgcccaggtcaccagcatccaggtgcaaaagcaggcaattgtaaattgtcagacaaagaagatatgtttcattttgttgatgacaacaagccaaccagctgcaatcctggaattaatggatggggagaggaaaatgaggcactcttcaagcagccgtcagccacatcacctgaggaaagtccatcccaagacagggccccattgaaaggattcagctgtacatcccttagacagtttaaaacaggaatatggttcctaattctgactcagctgccaccaacacatggaaatcagaggttacaagcacagacttggattcaagtctgcattttggattttttgtttgtttaagttatgatcctagtctttaactctgaagtcttcatttctttttgatcaagaaaaaggagtaaaattggacatttctataaaactttccatggacaattgttttacatgatattttcagaatagcatcatattggatggtgtcggtgttaaattgtgtccaaaaaatatgttgaagtcttcacttctggtatctgtaaatctgaccttatttggaaacagggtctttgcaga

SEQ ID NO: 475669 - DNA, 991 bp, Homo sapiens
tttcgtgtgtgtgtgtgtgtgtgtgtgtgtgtgtgtcttgggcatggttaggtttgctcttgccctaggctccaacatagcagcgccaatttctgtgagttgtgcctatgaaactcttccccctgttcggtggcccatcctgcctgtcactacctggacttttctgatggcagagactacgcctcagacacccaagcactcttgcataatgtttggcaaggatggccccatctatcctaatctggaggcaacagagggacaattcagatttcctcacaaacgtttcttggtgatgtaccactggcatttcacatcaaaccaaacttcacttcttaatgaggggaaaacaccatgtgcagggcagtatgcaaagagcattgtcatagctcctgacctcagtgaccttgcaatccagtctttgaggaatcgccacactgccttccacatggaaaggacacaaatggttgaactgatttacactcccaccaactgtgtataagtgtgcctttttctccacaaccagctttgttaacagcgtgaagactagaagaaaaagaatggaagaaagaagtgaaagagaaacaaatagggaaggggatccctcggatgactgggaaggaaaggaaaaccagaaaaagcagtcaggatgaatgcctgacaaaaaactctgctgcagtgacactttgacatgaagcagattcaaactttctatgactgaacaggacattttccatttattgctcctttgatacccaagctcctcaatgggggtattcttcaatgagacacttttaccagtgaccatattcttgcttgttggtttcttttttttttaaagtatgttgctgctgtacttttaagaaagttgtgttttatcttagtactttgatattcataaatggtataaagcataattttaccacatagctttaatggaatactttttacaaacaaaataaaacttgaccttcttccaccctatctccacatc

SEQ ID NO: 475670 - DNA, 1202 bp, Homo sapiens
agctgaacaggaacagctcgtttacagctcccagcgtgagtgacggagaagtcaggtgatttctgcatttccaactgaggtaccgggttcatctcactggggctcatcagacagtgggggcaggacagtgggtgcagcccactgagtgtgtgctgaagcagggcaaggcatcgcctcacccgggaagtgcaaggggtcagggaattccctttcctaccaaagggaaggggtgacagacagcacctggaaaatcgggtcacttccaccccaatactgtgcttttccaacggtcttagcaaacagcacactaggagattatatcctgcacctggctcagagggtcccaggcccatggagacttgctcattgctagcatagcagtctgagatcaaactgcaagggcagcgaggctggggaggggcgcccgccattgctgaggcttgaatatgtaaacaaagcagccaggaagctcgaactgggtggagcccaccacagctcaaggaggcctgcctgcctctgtagagtccacctctgggggtagggcatagccaaataaaaggcagcagaaacctctgcagacttaaatgtccctgcctgacagctttgaagagagtagtggttctcccagcatggagtttgagatctgagaatggacagactgcctcctcaagtgggaccctgatccccaagtagcctaactgggaggcaccccccagtaggggcagactgacacctcacatggctgggtacccctctgagatgaagcttccagaggaacgatcaggcagctacatttgctgttcagcaaaattcgctgttctgcagcctccgccactgatacccagcaaacacggtctggatacccagcaaacacggtctggagtggacctctggcaaactccaacacacctgcagctgaggatcatgactgctagaaggaaaactaacaaacagaaaggacatccacaccagaaccccatctgggaaaaacagagcagaaaagctgaaaattctaaaaatcagagcacctctccccctccaaaggaacacagctcctcaccagcaatggaacaaagctggatggagaatgactttgatgagatgagagaagaaggctacagacgatcggacttatctgagctaaaggaggaagttcgaacccaatgcaaagaagctaaaacattgaaaaaagattagacaaa

SEQ ID NO: 475671 - DNA, 635 bp, Homo sapiens
gaaaatgcagatgggaaacttcagcaagcgcccacttggatgctgagtttccagcgatcaggggcccggcccccattccagagctctgtggatgggagagtaatgggaatttactgtggaaggaaggctgaccggaatctccaccattccgccacgtgtctccgaaaagccttccggaaaggccacccagccaggcctcatgaaaactggattgaagttcaggaactggaaggtcattcaggatacagctctgtgactgggttatctcgctgccccctcagcagcaggcatctgccgatccccactaacggcttagccgccaaggtgattcagctcctctctcgctgttttcccctgggtgtcctttggcttctgctcctgctaccaactgctcagctctcagttgatctcacatttaaactcctttagtgaaaggatctagtttgtcctgctagggattcaccaggggatcaaattgtctcattgtccactaattttgtttttggctcttgaaattactttgtgaaatttctcttttccagagataaaacttcaatcagatgagataataaaccagattttctgagttcataagttactccctgggaataatttatattgcacaaatactttcc

SEQ ID NO: 475672 - DNA, 827 bp, Homo sapiens
tgactgagacggtcactgtgaaggatttacagaaaggcccatggggtggtgctttgcaggcagaggctctacatctggccctgttactttgaagcctgatgatgcagtagaaaagaaaaacccattttttgagaagaaattcaagctgctgcagaaatttgcaaaagtagcaaggagcctaatgttaatccccaagaccacggggaaaatgtctccaggccacgtcagagaccttcacaaaagtccctaccattataggcatagaggcacaggaggaaaaagtggtttcgtgggccaggcccagggtccctgtgctgtgtgcagcctaggaatttggtgtcctgtgtctcagccgctccagccatggcagaaaggggccaacaaacagcttaggctgtggcttcagagggtgaagatgtatggaaatgcctggatgcccaggcaaaagtttgctgcaggggtggagccctcatggagaccctctgctaggggagtgtggaaggaaaacgtgaggttggagcccccacacagagtccctactggggcactgcctaagtggagctacacctatcattagcctgactttggggtgggtggaacaggctgtctttatcagctagggctgccacattttacgtgtgtctagggttatgtattttccatgcaatgttgaggacacacttacactaaaaaattatttattgtttatctggaatttcaatttaactggtatccagtattttatctggtaactgtatccccagccccattaattataagtggagaggaaggtttgaataaattgaaatatgttaatcatacttttt

SEQ ID NO: 475673 - DNA, 725 bp, Homo sapiens
tggaaaaactggatgtacaaatgtccccatgcatcacactcacatcatgacaaatgtttccagccaaagcctggggcttaatcttaaaccccaccccaacctcagccccttgatctccctgtcagcttcagggagcttccataaattgtggagacattttatgccaacctttagaacactcattcctcagatcccccagcaatcggcggtcagttggatagcaggacggcaaaatggagaaatggtcatcaacactacgtcagtcaacaaacatttcctactacatgccagaccctatgtcagaagctgggaactcaatgtttctattgctctcaatgatatgccaatgagaagtaaaggaagacccagttgtaatgaacacttaagagaagtcctacaattccgacataagcagctacagaaattatgtagacacttcaggtttaaacaggtttggctgaaactgccaaggtcactgcaacagttagccagactccccatatgcgaattaccaagttaccgacctcaactactggacttcaaaaatacatatacactcaagagtttaacagacaccaggagagcttaggcagagctacactcgtcagccacctctccaaacacagagagctcagactctgtgctctgtcatcctgtgacaggatgacaccctgtagccttcatgctaatctctgaagactggccctagagggacctcacctgtc

SEQ ID NO: 475674 - DNA, 607 bp, Homo sapiens
tgctaggagatgggtgagaagattgtccaggcctctcataaggaacatattgaggggagatggtgtcctagagattgggttggcattaataagtggttaaagaatggggaggaaagactaggggacactgatgttgtcaagaggcccataagcaagtttccaggggctgggctgtggcagcaccttccactgaggagtggagagaaggtggcagattctgctttcctctctccagatactattggcagggtaggcacatttaggagaaatttcaaggaagtgaaaacggaactatttttcacctctgggtgtcctgggcttgtttcggaaacctctggcctgattgaaattcctcagagaggagaaattactgtgagtgatgttttaaagccaaatgcacatggttctatccggggagaatggtataaggaacaggaagaacaagctccctgaggggcttggttcatcttgcattctagcggaggagttcagcatactaaacatacaagctttgtcatcaaagctggtcccaaacctaggtgcattatatacaaggcttgtgacttcaaacaacaacttgattgttttaagctgtggctttccccag

SEQ ID NO: 475675 - DNA, 498 bp, Homo sapiens
agtgggtgcagcacaccagcatggcacatgtatccatatgtttgctggaggtccactccagaccctgtttgccagggtatcaccagcggagggtgcagaacagcaaagattgttgcctgtttcttctggaagcttcgtcccagagggacacctgccagatgccagccggagctctcctgtatgagggggacccacttgaggagacagtctctcccttagcagaaatcgaacgctgtgctgggagatccactgctctctccagggctggtaggcagaagtgtttaagtctgctgaagctgcacccacagctgccccttccctcaggtgctctgtcccagggagatgggagttttatctataagcccctgactgaggctgctacctttctttcagagatgccctgctcagacaggaggaatctagagaggcaacctggctgtagtggctttgtggtgctgccagtgtaatttaattcttagaagcattgaatgattacat

SEQ ID NO: 475676 - DNA, 991 bp, Homo sapiens
ctggactgtgtgttgctgagaaggcacgacagaagttcatacatactaaggtcatgcctgatgcttgtgttctcaaagctctctttggtctagtgaatttgaaaaaggacacaccattattaccacactccttaacctctctcccagcttcccatcttgcattcatcctccattctcctcactgttgtcaagggatcgttcaaaagcacaagtcatgtagtgccactgtgttgtctaaaaccctcccctatcctcttactacccttgatgatgtctatgctttgaaccagagccctcgaggccatcctctttacagtccctgctgttctccagccccctatttctctcatcctgaccacacttcttgtacttcctcagatgagctgttccctttcttctctccaggtcttcacatatgctgttcctgtgcctggaacatccctttctcctatggccactctcccccacttttaagccacatcctagacagaactctttcaaaggctgtgtgacaatgacatgggctttcattcccttcccctgggttctgccccatgatcccagagcaccttggccttcttctatcatagcactgcttctttttgtactgtgactgaggcttgtgtaaggtaaacaatttgtgaagtgtgccaaattatgtcttaatatgcatctctagaacctagtatagtgttagacatctgaataggttagaggttaagacagtaaactccctgtgtttaattctggattccatcaattattagctgtgtaaatttgagaaagccatttagactctccaagcctcagtttcctcgtttgtgaaacaagaacaataacaggacccacttcattgaattatgttgagaattacaattaattcaccttaagttcttagtacagtgcctgttctgtatattgtcttcaaatgttacctgttattaagatgctcattgaacaaatatatcaaacagatgaaaagctaagatat

SEQ ID NO: 475677 - DNA, 595 bp, Homo sapiens
tgaaggtcacatgacttgcccgtcacttgatcagcttggggccagctggggccagacggggtctccaggctgcaagtccttgccagtcctgtccctgctgccctctgtgacaatttctgccgattcagcatcaacggtttgtcccgcagctgccaagccaaccgagctgtgcttctgggcagtgctctctcacttcgtggccaggacgtcggctgtgactctcctctttcctgaggagcatcttcagctgatccacgtcctgcatggtgctgcaggtggggcagcaagatacgcttgtgacatgagagtcttgacacatgtgagccagcatcataagaattctgagagctttcaaaatcttcagcttagctctaatactagctcaactataattattgtaattaaaaacaaaaaagaaaaaggcaaagccacagatttaactgttggtaaaaacaacagcttggatgggaacagtttagatgggaagagagtggtagtggtcaccatcgaaatcacctagaccagtttattttcaagacttagttctatataattttaagattttctcagaaaccatataggggctgcctttgcc

SEQ ID NO: 475678 - DNA, 494 bp, Homo sapiens
gcgtttcaatcttaagttagccatgaatgaactacacggtgatgggcaaatcactcagtgtttgtactttggtttcccgtcaaaattggcagagtgtgatagggcagtacagaaaggaaatgtggggtcagagtccccacacagagtccccactggggcactgcctagtggagttgtgagaagagggccaccatcctccagaccccagaatggtagatccactgacagcttgcacagtgcatgtgggaaagctgcagacattcaaccccagctcatgaaagcagctgagagggggctgtaccctgcaaatccacagaggcaaagcagcccaaggccatgggtccacagcctcctggtttacatcatcagggatttttccatctccattactctggcccttctggttcaagcttttagccttaaaaaccaatagcatcctgacttgtgactcagctcaaccccatcacctgctttcaaattctcctccatattaa

SEQ ID NO: 475679 - DNA, 804 bp, Homo sapiens
gtttgtcaattttggcttttattgccattgcttttggcattttaaatgttgaatattggcccccactctcttccggcttgtaaggtttctgcagagagatctgctgttagtctgatgggcttccctttgtggttttgttcccttgctggcaaggagttgaggtcctttcgaggagaagaggccttccagtatttggaattttcagtttttcctcatcttcgtggattgatctacctttggtctttgatgttggtgaccttcggatgcagtttctgtgtgaacgccctttttgttgatgttgatgctattcctttctgtttgttagtttttcttctagcagtcatgcccctctgctgcaggtctgctggagtttgctacaggtccactccacaccctgcagtggagggtgcagaagagccaaaattgctgcctgttccttcctctggaaacttcgccccagagggtcacccaccagatgccagccagagctcccctgtatcaggtgtctgtcaaaccctgctgggaggtgtctcccagtcaggaggcatggagttcagggacccacttgtggagacagtctttaccttagcagagcttcagcgttgtgctgggagatccactgctctcttcagagccagcaggcaggaacgtttaagtctgctgaagctgctcccacagccgccccttctcccaggtgctctttcccgggggagatgagagttttaatctatatgcccctgactgaggctgctgcctttctttcagagatgcccttcccagagaggaggaatctagagaggcagt

SEQ ID NO: 475680 - DNA, 770 bp, Homo sapiens
tccccagaaggtggtgcagggtttgcatgctaagattctctcccttaattttcacctttttggggcatagtgaaggaaaaaaggggcagaagaaatctggacctcttcccgctttgacagtgaaggcaccagcagctttcctgctttgcattttgaacacaggctgtgctttgtggctgtcatgctatggtgtttcagacttactttttataagaggtacctttttggagtgtgcttacagatttatcccctttagggatgggccttctttgaacatgctctacctttattccaaatgtactgccaactggcattgtgactctttctctttaagccccagttttctcatctataaaatgggaatggttatacctaactatggactatgtaaatatcctttcattctagcaagaatctgcatctcagagctgggtcctagcaaagaaaagccagcaaatcaaaagaactaaagttcttgattagaattccagttttttcaagcccactactgaagacccatctcttgggacctcatcacctcgcagtttgctctggtttctcccctcctcccttcctcattacacatatgtatgaaaattcaatcatactgaatatatattaatatatatttcatattattgagctattttacaaaatgattgaatagagttttatcataagatgtacaattttaatttacctcatctctcatgatttaacattcaggcaatttgaatttttaaaactaattaaatttatgatgaatattt

SEQ ID NO: 475681 - DNA, 527 bp, Homo sapiens
cagtggccacatgtgacaacgaatgcaggctctcccaaaagagtttggaaaaccctctagacaaatcaatgactgcagctttcagaaatcagcaactgcaaatcctggagaaggtagaggatctaatattcagtgttaccacattaccacaatcaaagacctagttttcagcagcaacaaaagaatccaaaagcctacaagggaacttgaaagatgtacagaaggcaactggatgtttcagtgtggtgctcagcaattactttcagaccaggaatacacgtttgtgaatcctctcaacaatcagtcaggcgaagccaggagccggtcacagctcttgccaaactacacgttaaccattgatttctgcttctcatctcccaaaaatacatcaggttatcagtgcttttcaaaagtctcaaccaattagtggacatgaatgttactcatgtacatttggaaataaatagaggtaagtgtacataaagtggacgataaatggtagttttgaaaaaagactttgttggcat

SEQ ID NO: 475682 - DNA, 806 bp, Homo sapiens
gggaaaatggggcggcggaggcgaaagcggcccggggatcctcccgccgcctgcgcggccatcgcggtcatgggcgccagccgcgcgcagtgcccccgggtccaagtcggggtcgggagccacgcggcggccaagaggtggctgggaaagttgcggcggaagcgccggtggcggcgggcccgggaggcgggctccagagatccgctgccctccgcgccactcccggacccgccggcgcccgccgagtcccctaaggagctggacctgggcgcacagcgggagcgctgggagacgttcaggaaactgtggggcctcagctgcgagggcgccgccaaggtcctgctggacaccttcgagtacccgggcctcgtgcatcacaccgggggctgccactgcggcgcggtccgctttgcggtctgggcccctgcagatctgcgcgtcgtggattgcagctgcaggctgtgcaggaagaagcagcaccgccacttcctcgtcccggcctcgcgcttcacgctgctccagggcgcagaaagcatcgtcacctatcggtccaacacgcacccggcgctgcacagcttctgcagcaggtgcggggtgcagagtttccacgcagctgtctctgacccccgcgtgtacggcgtcgccccgcactgcctggacgagggcaccgtgcgcagcgtggtcatcgaggaggtcggcggtggcgacccgggggaggaggccgccgaggagcacaaggccatccacaagacgtcctcccagtcagcccctgcctgtccccgcgaacaggagcagtgattggggcc

SEQ ID NO: 475683 - DNA, 581 bp, Homo sapiens
ggagaggagagaggacaagagatggtccctgaagtcagtggccaccgcccagtctgcagcacgacagggttgttggcaccacgggcctcactcgggctacagaggccagcagaagaggcagagagcggggctttgttcagtttcctactgaggggccggggaacagctagtgggagagacccaggtttgaagcccctggcactggacttggggaggctggggtggctctgctgccttcttcagcaggctcagataggaagaagctggaaggcagctcttgaccagagaggaggctctatctaccgtgctcacactttcctacttccttgggatgaaaacaacttgatttttatcaaggcagatagcatccccagggtacattctggtcctcccgccttcttctaccccctcactgtgggggagctccatcctaccccaggctttctgtacactgagagctcccaagtctcctgagtgcctaacatatttaaagtagttaagggtcattctagttcctcgtaaaccattataaaaagttcacaaataatcctgtgagttaaaaagtgaattcgaatgggtac

SEQ ID NO: 475684 - DNA, 532 bp, Homo sapiens
tcttttttttttttttttttttttgagatgaggactcgcgtcattgcccaggctagagtgcaataactgagttagaatgagaccttcaagacataagtgggctcatagaaaaaatagaaagggcagcttgatggctgtctactggaatatatgcagagttctcatcaggaggacactgagcaaacggccttcatcattgctaagaacaacaggaaatagccttaagtttaacaattgtgttaaactgaacctccaaaggctacaccttagctctataattcactctctttatgacaccttgctagactgggagattcaacctagcaattgtttgtggtcagaggtgagagttcaatccaggacaacttttcctgtttctctgacctccctaaagaatacatggaacctgaatctcccctgcagaggtgcaaaggcagctaataccccagggcagcaaacagatctccagaattttccgcaaagagactagttcagcatctccagggattgtcaggcatttttaccactgcac

SEQ ID NO: 475685 - DNA, 1001 bp, Homo sapiens
aaccacattctaccctacaatggctagaggcctctggctttcacatcatacctcaaacctggaaattcaggtactggtcctgtctgtattgtggaggaagtctaattcttcctcaactgttgaggaacacctccaacataaggagagagcaaatagaaaacccttggtttttgtcctgactgagaaacgcttaaacgtctacatgtacaatcagataatccctaaaatgcctttcccctggtctaactcaattcagataactgtgtttgtctgtgagaaaccctcagagaatatattcaagccaaatgatctcatgcctggattttgcaaaacaatatgtgcacaagaccagaatttatgtcatcatcgaatatgtgcctttcccaaatccagccccgggatgttcttcaacaacatggcttctttgccacatctgagtcacttcctgggcctggatccaggacagcctgcagacccctggccaccaacaagccacataaggaagcaggaggtcagagaaacaggaaaagttgtcctggattgaactctcacctctgaccacaaacaattgctaggttgaatctcccctatccaaaaagtttggaaccagagtgttttagattttttatttttttcagacttcggaatttttgcatatacataatgagatatcttggagatgggacctaagtctaaccatgaaattcacttatgtttcatatatgccttatacatacaacctgaatgtaagtttatagaatattttaaaaattttttggaaatgaaacgaagtttgtataccctgaaccatcagaaagcaaagcatcatgtcagcactttaaaaagtttagattttggagctttctagattttggatttctggattagggatgctcaacctgtaacacttcttggtacttgtgtgtattagactacgcctttgcagttgaagagctttgactccgtttccctggttgtcacttccagaagggctgccctct

SEQ ID NO: 475686 - DNA, 1510 bp, Homo sapiens
ctccctgtgagaatggtcaggcaggcagtctttggaggaactggaaagcatggggtgtgtggcttgaatgttcctcagtcctacagcaatggtggtggaacctgtttagagagcaagagagtgccttgggccccactcattccctggcctgacaggcaacagcatcaagaacctgctattttcatatatctcaccatggaaaactctattaaccacaatctagcagaatatactagtaaaatgtctgggcctgagagcaatggaaacgtaaacagaaagaactcagatcctgccaacatcatgatcctacttggcagaagaaaagaaacctctcaggagcgaacaaacacaatttctgaggccctgaaagaactgcacccattcccaagaaagagtcaggctgtagctgctgaaagaaatgcagatatagagaattcatctaactgaaactgaacagaatgagaagttggagagaatacgtttggaatttaagttgggatttgaggctttactttctttggattcatactgctcaacaaagacagcaggaatttttcagactttagcttttacggattttaagatcaaagtaaagacttagtttggcagctcttcgagcataggccctgggaaagaggctggaaatcaagtatgctttttatgccctctgaactgtctgtactgaggctttccagaatttccctcacttgctgctactttgcatacttgtctctggaaaatgaataactaaaattagaatttcctggctgaaacagcattgagcctgactgtcaagggaaggagtttacactttaacaacattctaaaggaggaataaagagggtttacttgatgatttcagaacaccaaaggaaataaagtgggcctgatttagtcaatgattctttaacatatgaagaaggggagataaagtttttactttaaaaaaaaagtttttacttttacatcttcaaaatacaagatgacactaatttcccattttaaaattttaacacattgttcttttacatatttttttcaagattttaaactgttaggggaggtatggttacaacctttcctcaaatatggactcatggaatataaaactagtattactgcactaaacaagaatccatagggggaataagatttctaattttcattgcttatatcagggctctaatgattataaggtagaatgtttagtaattttgttcacaatgcagattgtatctaattactaattttctattatgttagaaatggaatttgcatttcccaaaatgcccacaaaatagaatttggctaaacatttccatgatcacattttctatgatgttggttttaaagtgacttgagattgtgaaatccttctatgttggttttatagctctgaggctctaaactctcataagttttgagtaggacctggaaatgatgtgatggcatcagattaaacatgtctgttagagttaattttttttttctatattagtctacaagtgtt

SEQ ID NO: 475687 - DNA, 611 bp, Homo sapiens
gtttgttgtcccttgcttgaggaggaattaattcttctgaagtctgggcaacagaaggacaatatggataagcaaagaatgcccctggcagaactaatagccctcactcaggcactagaattaggagaaggaaaaagggtaaatatatatacagactctaagtatgcttacctagtcctccatgcccacgcagcaatatggagagaaagggaattcctaacttccgagggaacacctatcaaacatcaggaagccattaggagattattattggctgtacagaaacctaaagagttggcagtcttacactaccggggtcatcagaaaggaaaggaaagggaaatagaagggaactgccaagcagatattgaagccaaaagagccgcaagacaagaccctccattagaaatgcttatagaaggacccctagtatggggtaaccccctccaggaaaccaagccccagtactcagcaggagaaatagaatggagaacctgacgaggacatagtttcctaccctcaggatggctagcaaccgaaggaggaaaagtacttttgcctgcagctaagcaatggaaattacttaaaacccttcaccaaacctttcactt

SEQ ID NO: 475688 - DNA, 620 bp, Homo sapiens
ggttggctgcctggcagggaagtttttctaagagcacacctttttaatggtattctttccccttctcgatgcacattgcatccttgggaagctgcaatggacaactctggaggcttcactgttaggaagcacaccttggaaataccacacaaggagagtagggcctctggtgtttctgactgacatgaatgagctcaagaagaacctgattaagggaaccagggccctccttgagaggttcgggggagcatggatcatacggcagttttgtttggaagaaaagctagtcaaagccacagggagtccttgtgtttggctgtgtgcagaatgtcatattcctgtcccctctgttgataaggatgtggctttgtgtctgtggatgcctgtgtgtgcagaggctgggctctctgaaggcagaaagcagtcactgcctctgtggctgctccctcgtgatccctgcatcctacacacactggtttcccaccactggctgtctggtgacaatgtgtctactgtgcttgaaactgtttaaatccagggtatcatttggacactgtcagttactccaagattcaacagtatgggtatgcctgctttagacatggcaggaatcatgtaaa

SEQ ID NO: 475689 - DNA, 537 bp, Homo sapiens
acattccatccagaattcatgtttgtgtatgataaaaattctcattggatttttagctacattaagaaatcagagtggccaggcgcagtggctcacacctgtaatctcagtactttgggaagtcaaggcaggtggatcacctaagctcagaagttcaagaccaccctggcaagatggagaaaccccgtctctacaaaaaatacaaaaattagccaggcgtgaagaagaagaaggtgaaaggagcaatttccctgaaataagtgatgcttggcttaactcgcaagcacaaaaacagacaattatttccataaactctgtcctgagctacatctacaaaacctatacctgtgatgatggagggaggttccagatttcagagaaaatgaaagaaatttgtgccataagcagatgatcagaatatcctttcaagactctcctcaagccaaaataataacctttcgacatctcaggtctaggaaagttctaaagtaagcaatcaataccatggaaacaatcctttgacatcattccagtaaa

SEQ ID NO: 475690 - DNA, 798 bp, Homo sapiens
agctgcagtaacagaacacctgactgacaccggtttgaacagcggtgctcctcaccactagggaggcatctgtgacgtggcttacgttcactactatgcaacagtgcacacattacccagcagcgacttgtattgcctgctctcgtacagaacatgggcatagacccctagcgacgacggcagctctattccaccagatcacgttacgccgcgcaacatggcccagagacatcaagcaacttcacgaacaaggacgaaacatactagcttaactactcacaacgtggctcagacagcctacagatacgagcaggtacgagacgtcatgacagaacgcagtgcaactaagcgcaacgacgtgcaggtaggcccattgcgacagaaacgacgtgacagtcacgagccttataaaagcaaaggccaggaatgcccatgtttggggaaacacccatcattgtgtcatcatgaatggcatgtagtcaagccagaactaagcccagtggtttaccccaagaagcaagggtatctgggggaggtaattgtccctaacatttacattgctaccctcaaaaaaattgaggttctattaataaggatgaaggtgcgaatggattatacttagtagtgtttgccacagaggggaaaaaggaaatatgagcttgtctccttcaattaaatgagacaaaccatatgaagcatttagcacaatgtctagcttatagtgtgtgctcaaaaaaaaaaagtttactgctgctgctgctatcacaactactagtactgttaataaaatatattatt

SEQ ID NO: 475691 - DNA, 530 bp, Homo sapiens
tgcttcccctttgccttctgccatgattgtaagtttcctgaggcctttccaagccatcctgacctgtgacacatttgccatgaaaataactgttattgctgttgccactcaatggtcaatgccttacagtatgaagagggggagttacataaattatgtttataccaggttccttgaaactgacaaggtggaggtggggggtggtggggaaacccaggttaaattatccccatgttcagtagttgttgttagggggaaaaagctgaaatggcagtgcacatcagggtgcaaatgtaagcaatctttcacccagtctgttaataaagagcaaggttttcttgctggtgccccagggaggtgggcacattcttcttggatgaaaggatctggtttgcttgctttgctgattgctgctgctgctgctgctgctgctgctgcttcaatctgaattgccagttcctgaaccaagcctttacctgttgactccagtaggttgcgtttcaaagctagtttctcctgaagatttctat

SEQ ID NO: 475692 - DNA, 649 bp, Homo sapiens
agcccaggattctttacaaagtagatacccaatagggcagagagagctgctcaaggttggcgttaactctgcatgcgctgcgccagccagggtcccagaaagggctgtgcagacgttgaagcaattcaggctaagaaaggtgaggaatttgtagacgaaaagctggaagccagcagagattgggtcatgagatttaaggaaagaagctatctctataacataaaagtgcaaggcgaagcagccaatgttgatgtagaagcatcagcaagttatccaaaaggtctagaaattgctgcagctaccacagccttcagcaaccaccagccttatcagtcagcagccatcaacaatgaggcaaggttctccaccagcaaaaaagatgacagcttgctaaagacacagatgattgttagcatttttagcagtaaagtgtttttcaaattaagcctcaatttattcatctgttaactgggggtgatactaatagcaataacagtgattagcttatagggttgttatgaagattacataagtcaatgtaaaacacctatagaagagcttgacacatggcaattgctcaatagaggtattcgctgtgatttagaaatgaaactctgtggagagaattgaggattcggtgactggggga

SEQ ID NO: 475693 - DNA, 595 bp, Homo sapiens
agatcagtgaaatgaatgaaaactaaacctgcttaaaggaaagcattaagaattgaccttctaattatataatgacctttatttttacagtttttgatttaacatctgttttatttaagtatagctactcctgcttccttttggtttctgtttgcttgaaatatcttttccagtttttcactcagtctatgtctgttcttataagtgaagtttttagcttctttgtgatgggttcgaacatcatcctttcacttggagaagtttgttattactcatcttttgaagcctacttctgtcaactcatcaaagtcattctccgtctagctgcaggtctgttcgaatttgctggaggtccactccagaccctgttttcctgggtgacatcagcaggggctgcagaacagcaaatgttgctgcctgatccttcctctggaagcttcatctcagaggggcacctggctgtgtatttaatccagtcctcacagcctgatttggttctttcagtagtgggcctgtccagagattaagggcagattgactggtgaggaccctaagctctctgcttagggcgggttaattggtgaggaccctaagc

SEQ ID NO: 475694 - DNA, 525 bp, Homo sapiens
tcccagcggctttctttacactgtgaggtaaaaaccacctactcaagccttagtaatggcggacacccctctctccaccaagctcaagtgtccaaggtcgacttcagactgctgtgctggcagtgagaatttcaagccgatggatcttagcttgctggactccgtagtggtgggatctgctgagctagactacttggctccctggtttcagccctctttccaggggatgaacagttctgtcttgctggcatttcaggtgccactgtggcatgaaaaaaaaaaaaaacttctacagctagcttggtgtctgcccaaacagccacccagttttgtgcttgaaacccagggccctggtggctcactgaaaactaagctgtgctttcataaagccctgcaaactgaagctagacaacttaaacctcagaagaaaataacagcaacctatttacatacataagccactttcatacctacctaatgatgtcaagagaggcttcatctattcatttccttttgggaagtttt

SEQ ID NO: 475695 - DNA, 606 bp, Homo sapiens
ttatttgcaacttctctgggaacctaactgtgggtccctgaagcgtgtctgagctgactccttgggtgggtttcgctgcagctgctgtgggggatagggatgagatccccaggtcaatggaactgggcattgcacagaaaggaagtggaatggtggggcttaacggctgtcaacaatcaacataaaaaatggcctaagactcttcattccacaaggaattctatacatttggcagagcacaatctacaaggtttgttccacgacactctgctcaatagaaatccagcagcttacatggatgttctggttcatggttgccgtcaaaactgggcaggggctgcagtcatctcaaggttagaccagttgttgaccagaagcttcagttccctgccacatgtgcctttccacaggcctgcttcccacatggcagctacttcacccagagacagtattgagagagagagagagcacactgatgtctcaacatttctatgccctgtctcagtcacacatcattaatcccattttgttagaaataaaacaataagtctagccctgttcaagaaaggagtttcaaagaatgtgctgacattaaaaaaaagttgt

SEQ ID NO: 475696 - DNA, 2002 bp, Homo sapiens
tcctatagcacaaccattcattctacagatgaggagacaaagtttctgcaaaattcactgaatttcttttgtctcagaccaaatatttcctcttccaggatttcttctagattgcctcatccaatgtcaccagattccctagaattatgtggatcaagagtaggaaggagctcagttcttgccatattggcaatcagaatatggatttttcgaagaagagttcctacctcaccggtgcggcctttggagggtttccgcaatacacacagagacggtgaagagtggcttaggaggatttatctcagctttcctgtcctcctcaccatcgctgacagcggttacctgcatttgacaatgacacattgtgtctcaggcttttggagaccaagagaagtctatttaataagaaaagatgatctggagggcataaaaaagctatctaacagtttaattcatgaatcaaaaaggggaccaattcatatgaatgtacttaattatttcccatcctttaaaactgcactgtgtatgaaattatttacagaatagtcttatggaaaaaaatgcaattattgaagactgcttcttatatgtgtgtgtgtatgtgtgtatggtagtggtggggtgattctattatgccttcttaaatctcctgaactgtattgcaggcatcttagctgacctatttatcgtcaccaagaatatcatcggatgagctgggtcaattttaataacattttctgtaggattatcatgttagagtaaaccatagacctcaccaagcaataaaattaaccattaggagatatcgtatagctctataaaactgacctagtaaagttagtattacctctagatattatatattcacaatatgtttgagcaaggaaaccaggctcttttaaatgatgacactcaatgattgaaagataatcgatgccaacaaaaatactagaactggagacagagacaattttctattgaataatcatgagttcctaaatgtgattcttatccattggtttttagtagaattttaaggtggatattgccagttttatattagatgaccaatgatatatttccaaaaataggtcagatgctctccctttgagtctggaaaatactaaccacatgagttaactttgaagggctcttctgacttataggagatgaacaatgtttcctatggcctacaccgaggaatttgtttccattcagaccacaagctgtttcagtgtattgtccctgtcatgtaataaatacaaaacaaatattatttattgttattacatagcaagttttaaattattccttctctgtatatatccttttcatcctgtgttcttacatctttacaatgtcttgcttctttctaccaggacaaattaagtaaagcttatcctagggcagagatattcttttcattttgtttaaaaccactacatctttcaggaaattcaaacagagtcagattctatttggctacccctttcccctagaacactttcaactattttgttttgagtttattgaaaagttttagaaaatactcaaagaagaaataattaagaagccttgaaggtggaaaaattatggaccaaattttgaagtcgagaatgttctcattcgtgttacatttgttttttataattttacttgctgtctctttgtagaattatagttatgccacagctataaatataaaacaaaggcttggttttatagtttattttctcttgtctaacatttccattggaaacactaagtttctggttataaatttcctcagtagtattaaggaagtctgcttaccatctcaacagctaagtctgcaggacctgagatgcgaagcctcactcagatgtttctgctgaacccttctgtgggttattactcctgagtgaataactctatctttgggaattgtattcctgggttactcttgtttttgttccatagattttctggtaagggaaggagtaaagaaaacgtcctagtgtaa

SEQ ID NO: 475697 - DNA, 1021 bp, Homo sapiens
tcattgttctcttttttgtctcaatatgacccgtgccagcagaaggagggctctgggagtcagcacagctgggaaccagtactatctgatcgtgggcaagttgctctacctctctgcagtcagtttcctcacctataaaccagtgaaacaatacataacaacccgacatataaagctaagaacagcaggattgcactgctgccagaggatgctggggactcaaacctggatgcctgcagggaccagagcagaactatgcaaaactggaacttgtgtggcacaaggaaggcgaattagagagggtgtgccccttgtgaaggggctgatgctggttattgagctccagctggttctggctgtgcaggaatcctatccagctgtggctggatatttttatttttcaggagaaactggaaaactggagttttagtggactctctcaatttagaaatgcatgttgaaattttaaagtaagatactgtatatgaaccaaactgatgtatccatgcactaggtatggtctcagggtcatatatttgtgacttgggtttaactccagagtttcatttttccttgagcttggtccttaaggctgtcggtgacttatttcagattttgctcttgggtaggagctgcggttgtgggcttgagttttgtgggagtggggaatagaggaggggagaaaagagaataaaaggatataactgtgtcctgacattaaggtaggacatctgcaagccaacaagcttttatcctgcaggataaaccttctcttagtataagtcctgtgcatgattttactgaaaaggccactgttgttttctccaccatgaattatgttaccaaagcccccttctcttatctaaatgccagtgtggctcaggctctaagaatcggggtggaggggacctataccaccaaacgaccatgaagctaggagttttgatgcaatttcccaggaaattgccatcctgtttgacttaattagtgctgtgaagacaccagttttgtctaggagcac

SEQ ID NO: 475698 - DNA, 670 bp, Homo sapiens
ccacgggcaggcccagaagaggcatcatgggtccccgctccagtctacaggactggcagcccagccctcagccatcaggcccttcctggcctgaaggtgggccttactggggacccaaccttgcccatccaggactctgcctcctgctgccattcaaggccctgcagcttggccccaaccctgctccaagactgagtgggcaccagggtagaagagaggccaggcagtggaagcagataacccgagcctgctgggacagaggagggggccttcttgggcccctgagggtgcagactgcagagatgcctgagagggtggccacagctgtacccagggagctccagttccacaaactcaggaggggtagggttcctgcttgtctctggctcctgcccactccacaaagtgggaggcccaggtctgcagccatgggtcagagagtttcagctgcatccaggagggcagatactgcctgttcctgcccccctgaaagaggacagggaggatcctgagtcatgagaaaaatacaattgtgttggctagagttacgaagacagggaagcatactcatacattttggaagttttttcaacaaaagctgaagagggaaattctatttaatccctcaattaatcagagaagtaaaatcactagaatgttcctcttagag

SEQ ID NO: 475699 - DNA, 614 bp, Homo sapiens
tgggcacatcacttcctattatctgagcttccatttcccacgtgcagaagggccaggcagtgggcggagccgtagagctgccaaaggactgtgtcatttgtcttatgctaccagggtgggtagagaaagaccatcaggagacgcataccactaagcccttctctttattttgcgatgaagaactggaggctcagagagactacgtaattgcctatggtcacacaaataatgtagtaaaggccccccgggaaattgtcatgtccaggctccctcagctgataagtggaggagcaggtagtctagctgcagaggctgtgctcctaaccactctgtcctgctgcctcaactttataaacccatctttagggaccttcacagtctgcacgcttgaacaattcacctcatattcttccactctgagcgatttgactcctctgacaaactcttatctcctggacagtctttgccatccttgcctgccctctcttacgagggttattaaaattggagcatggctcatggtgattgatggcccagaggctgatcattcactacctctcctggctcatggtaaatatttactttttgttacagaggaacaatgaggtttcata

SEQ ID NO: 475700 - DNA, 537 bp, Homo sapiens
gtgaaggagcacaattactggattgtgtggttcaggggaacatgtgcaggtttgttacatggggaaattgtcacagggggttggtatacagattatttcatcacccagggtacactcaccagcagttttgccatgacagtacaccgaacaaaggagacagggtcatttataacctgatgcgtccaccctactgctgtgtccagtttccattggctggaacgggacctcacattctgtgtttgtcccgattggctagcaacttagaactttttaaaacaggcaaaggcagaggagaacaaaagaaggagcaagtgtgtcgtttcaaggaagttctacaattgcttctgttgagtattcccaaagtattaccatctcaggatgactttaaggcttatgaattcctagatcatttgggttgtttacattcaaatctccatttcaattggagtaggccagtgactatgatatcccattagaaactttttacttgattttatttttcagtcaatgcttagagagggaagaactgccttgctg

SEQ ID NO: 475701 - DNA, 1042 bp, Homo sapiens
tcaaagcctagcaaagatatgacatctgaaagtagccaagggctgccatgtgggaaggattagacttgctctgtgtagttctaggaaacagagctaggaccagggagtcagtggaacttacagtcatgcaaatttcagctcatcataagcaagaacctgctaacactcagagtagcctgagtatagaaaaggttgcttttggaggttggaagagcctttcctacccactgaaatcccatctcctagcaactgcctacagcactgcagggatgagcctgactctgcttttgaacttccaagaggagagaagacacactgtttattacttctccagtcaaggactaaaagtcaagttgattgatgcccgtgatgaaattgcgaaggaagtacaatgtgtgctgtggtggttggacatggatgaagctggaagccgttatcctcagcaaactcacacaggaacagaaaaccaaacaccacatgttctcacttccatctctaaacactcagccaagctctaagctgtggctttctccttcctgctcatcatctagtacttgttcatctctttttgcatttatggaagttgtcaaaatattctttgattgtccttcctttttctctcactatcgtggattgtaacttaaaaattttttaaattaccatggtggtgatggtgtctccgaatgggaagtcgataactattgatagatttttaaaatatccaggaaactcctttgcatgaagattcactctgatttgtatttagtgtaaaacccaatttaaaaaatcttatcaacttagtaataactattcctctaaatattcctctaaacgtttgtatagtacttacgcaagcggtaaatcaatacttattaatttaacaaattatatctccccaaatacttaaacattggttgcaaacttatttaataagctctttaataaactcttaggaagtttattacaagtttgctatattagaatctcttcaatgctttataattttgcaatggctgtttcaaggtcttttgtgggccaataa

SEQ ID NO: 475702 - DNA, 741 bp, Homo sapiens
cttcgtaaccaggtccagatgatggaataccggtttggagctagagttcagaatgggctgcctgggctcaatcctccttcctactagctttgtgactttgatttcctcatctaatgaggatggtggagccatcctaatctggggcagtgaattccctggcactgaagatgaacatggaaaggctaaacaatctctgcccagtgggaagcagcctgaggccctcaccagaagccaaggagatgccagcactagcttcttgtacagcgtgcagaacccggactcatacaggctgtcccttcaaagacaaacatctccacctagtagttgttctaagaaggggcttcgagcatcaaatgatggtcatttatgcctgtcagcatctttgaaccttgaagatggtctccctggagctaaagtcagcctggcctggaaagctcatgaaacccctagaaaacatcctaaagaggtgagagctatgctagaaggagctctgatccagaaacataaatatgtggggtcaggtgcaatttaaaaactgtaaatgacttatatgcttatgaaaatgttctctcatgctggtaatcaaagaaatggaaattaaaacgagatctcctttttagcttatcatggcatagactttttaaattagagttggccatggaatatggaaatcagtgcatttattccctacctgggggagctaaaattcatacagcctttcagggggcaatttagaaatgt

SEQ ID NO: 475703 - DNA, 483 bp, Homo sapiens
gaaagcgagcgagggctgcaaggggtgccagcaggccatcacctctcaatgctatggctaaaccaagaccagacccaattcctaatcttgggttctttgcactggttgaggatggcaaaataaatgatattcaggccacaaaaatgctaaataataataaaatggatgccttacctgaaaagatggcgagtgaaaaagttgagaagccagatactagggagaagaaacctgaatccaagaaggctgatgctagtggcaacgtgacaaagggaattggcagatattcccgacctgctatgtgttccagaaaggcacgtacaaaaggaagtattcagcggctaaatccaagattgaaaaggagaagtttcttgcaactgttacaaaaccagttggtggtgacaagaatggtggtgccccagtggttaaacttcacaagatgcctagctatcatctaccggagatgtgtctaaaaagttgttgagc

SEQ ID NO: 475704 - DNA, 685 bp, Homo sapiens
cttccctgctctctctctcctgccaccacgtaggaaacgccttgcttcccttttgccttccgccatgattagaatccccttaaatgttcctcaccagcaggtcagcacttacccaccggatgcctcttcaggatccccattcaggttccctttcagttttgttccagcctactccctgccaggtgcaggagagcagggagcagctctggctcaggtggacagagctgtgaatggttcctgccagcaaccccctacctcctcagggcaaacaaagcactcagaagcctgccagggcttcaaggctgtagagcctggggagaaacaggattctaaaaggcgaaggcattccagcaagagagaactggggaaagcaggggttcccagacccattcaaaccacatgcagctcagcttcctcatctgtaaagttaggattcccaaatatgccctgcctagaaacagacaccacttactgagcattttttatgtgccaggcactacactacacatgtttgcacatgatttttaaagaaccccatttggcaggaataactgtctccattttataaaaggcaaaactgaggttccaaaaggtaaagctggttcaagagccagtcctggttcacatggttagcaaatggctgaaatgttacttcctaaatcccatgctcttagctaccagctgg

SEQ ID NO: 475705 - DNA, 738 bp, Homo sapiens
gcaggccacccgagccagccgcgaaaacccacttgggtccccttccacgctgtaacactcaccgctaatgtttgtggcttcactcctgaagtcagcgagaccacgaacccaccaggaggagcgagcaactcccgttgcgccacctttaagagctgtaacactcactgcaaaggtctgctgcttcactcctgaagtcagcaagaccaaggaagaaactctggacacatctgaacatctgaaggaacaaactccggacacaccatctttaagaacggtaacactcactgctagggtccacggcttcattcttgaagtcagcgagaccaagaacccaccggaaggaaccaattccggacacaatagtaggcatttgactcttaatatctgtgatgagcagggatgggtcagaagacagttctgctcaggtcacaacctgcacatccaaggatggcctgtgccacaatttcatcatatttcaacattctaatgtggtcacattttcaccagcatccacttaatgccacttaatcaggtgctttcccctggtttttctctccacctataaaacttaaggttttatgtgaaaactcaagaaaatattaaatgatcatggatagtcggcatacttgtcttatacctgaacttagcaggaaacaccagagcttcactttaagtatggtgatacctgtggcaaaaacaataaatcagcttattcaacaattcccttctcttgcattt

SEQ ID NO: 475706 - DNA, 654 bp, Homo sapiens
taattagttcttgttataataatgattctgtttttagaaatttatcttaatgaggagaagctttccgctgtctcaggcaatggactaattcatggagtgtactgtagtctgagctccctgatcagccgcggggagatgatcaaagaaacacacattgagaagcatcaatctaattcagatgtctcagctgacacccagatagggacagtggatgcatttaaggtacaaaccacagctgtgatgcaagatgaagaaactgagtccagaagggcagacaggaaagggtccaagggcagcaacattaaagccagttatgaaacagctctggactctattttcggggtgtttgatgtctatacttttgaggttattgatagcttactgtgttctcctccattcctcgtcttgtttttggtgggaattgaacaatgagatcacatggacacaggaaggggaatatcacactctggggactgtggtggggtggggggaggggggagggatagcactgggagatatacctaatgctagatgacgagttagtgggtgcagcgcaccagcatggcacatgtatacatatgtaactaacctgcacaatgtgcacatgtaccctaaaacttaaagtacaataaaaaaaaaaaagaaattatttgt

SEQ ID NO: 475707 - DNA, 759 bp, Homo sapiens
ccctaccctatgtggctctcaggtgggctgctgcaccacactgctcttccttcctctccatgccagcttcctgtacaaaaagaagtggaagaacatttgggatactggaagttattcatgcagaataatccagggtcatgttttggtaataatcccaaaccctttgagccaaatgagcacaggagacaattagcgattcactgctgtggctgcaggcaaaggtctccctatggggataagaagaggcatcctcaagatgaaactccattcagcttggaaagagaccaccaagagggaaaggaattgccttcccaaagggtcttaatatcaaagctggaagttgaagaaagtgattacaaaagagacaccttgggggtcagaggaaaagaaagactgtgcctggctggaacccagtggacaggagaagaggtaggagctgaggtgggaattgaacaatgagaacacatggacacaggaaggggaacatcacactctggggactgttgtggggtggggggaggggggagggatagcattgggagatatacctaatgctagatgatgagttagtgggtgcagcgcaccagcatggcacatgtatacatatgtaactaacctgcatattgtgcacatgtaccctaaaacttaaagtataataaaaaaaaacattatgaggttttttgcaattttcttctttagctcatcagctttcgttagtgttagtgtattttatgtgtggcccaagacaattcttctttc

SEQ ID NO: 475708 - DNA, 575 bp, Homo sapiens
cagcagtcccgtggccgatctcctctctaactgtccctagccaaactcctttcaacgttcagatgctccttctcttctctccttctctgccatgccagtctgctgctctgccgctcttctgctcttctgttctggagcttgagcccagtggggagcaggagccgccatgggtgccttactggatcagaagcgcagtggacaccctgccggatctggaggggtggaagtcagcaatgggtgcttcactgaatcagaagcacagcagacaccctgctggatccggaggggtggaagtcagcggagggacctggggagcatacttcagtgatgaaaatgttctacaggcataccttggagatattgaaggctcggttccagagcacaataaagggaagatgaatgccaaaatactgaaacaatattttgaaatattgaaatctgggattggtagatcacagcaccaactacaggaaggtagcttgaaagaaaatgggtccagaagtaagagacataaagaaacatttccttggaggagaagataaacaatgtgcattagatcatttttgcattgctat

SEQ ID NO: 475709 - DNA, 779 bp, Homo sapiens
gcggaggacgcatagtcaaaggacaccagaggatgtctaaaagaagctcggtgggaaagctgagcactcggaagaaccaggatgatgaggcagattcagatgaggaagaggatgagtgtgaaaaactaacttcagattctgagtgtgagggacagctactggaggagattaaagaaaagaaaggaaaactaaaaaaaaaattaataccatatgattgggatactttgacaaaatctgttctcactacatctcagtacttgcagtttaaaacctggtggtctgatgaaactcaatctcagacaaaggaaaacacacaagcacagccacctgtgcctgtttcctttgaacagttaatgggagttggccataattggggtcgattagagaatcaagcagtaatggaggatgttgccattgttcagctgcactttgtgtgcttacaggcatgggaaaggataaatgttacgggtgagaaatatccttctttcagttctgtccaacaaggacctaaagaaccatatattgattttattgctgtgctccaagaggctgtgtataaagtcataactgataagacagctcaggatgttgtgatacagcttcttgcatatgataatgctaatgcagaatgtcaaactgctcttagaccactgagagggaaggcttatttagctgaatatattaaggcttgagatggcattggaggtaacttacataaggctttttcagatcaggctatggctggattaagagtaggaaagaatatgccccatttctta

SEQ ID NO: 475710 - DNA, 943 bp, Homo sapiens
ccctgacccaggactgggccagcgagtcagggccacagctgctacaactctttcagtcagcggcctggccccctagcccactctttcactgaatatcagtgtctgagtacattattcatctgttgtgcagctgggtctgcgggacggacccccacagagaggaagatctgccacttcgcactggcacagcatggcccataacccataaacccattacctcatggctgacaccgttagggctccaagataaagttcccctcatctcatgttgctctgaaagctgggagaggctgcgagtcacagccccgctgctgtcagagatggacgggactctgtggttttttccttgtctgatttctcgcgctttgaatgtgctacgcctatgaatgggtgtgtgtgtcttttggcattaatcctgcttggtgttctctgagcttcctagattcggggcttagtattatctttaattttggaataatctgggccattattactttaaatatttcttctgatgagttctctctttcttttccttctgatattccaattacacttatgttacaacttttgaaattgtctccaaatttttgggtgtttgtttttgttgttgttatttttgttgtttgcctgtttccttgttttgtttttactcttctctttctggaagtttctatggacatagcttcaagcacactgattctttccttggctgtgtctagtctcttacaagcccatcaaaagcattttaaaatttcggctacagcgctcctgatttctagcatttccttttaattctttcttagaattttcatccctctgcttacattacccatctgtttttgcatgttttctgctttttccactagtgttcttaacatactaatcatggttactttaaattcagtgtctgctaattccaacatctgtgtcatctctgagtctg

SEQ ID NO: 475711 - DNA, 648 bp, Homo sapiens
tcaagcattagtaaggcggtaaagaagtgagcattcacacttctggtgagatgataaagttggcacaatttggaaagcgtactgcgcatttcaactgtagttcgcattaccctgaccttattcatgaagctttcctgcaggacaacaaacagcctggaagaggaaggcgtgagactgcaatttcagaaagtagcacaaacctgacgttcaatgtttccctaagcacggatttgactgtgggagaaaggagcaggtgtcagcacccttcccacctgaagaagagactgagtcttgtaggttgctgtggccgccatgaagatgcacactctgctttcctgcttcagggggcaatgctgactggcagggtcagtgctggccctctggacccagcactgcattcaggccacagccatgctttccttgggatgctccagccagtgcctgagcatggcaggaactctgcaggaaggaaccaacggtggccacagccccttgcagttccagcaatcctattggtgtggttctgacttcatattggcccagtttaccattgtatactgtgcaaagaagcaacgactctaaataagtttgctctgcaagccttcacaccattgtcctttgtcaggtattcttttttgaatctaagat

SEQ ID NO: 475712 - DNA, 599 bp, Homo sapiens
gccgagacactgtataggagcctgcagtcacctggtagagtatgaggtcgtgtcacgtcagctacaaccctgggggtctccagagcaggacagcttgcttgtgctggggtgtccctgccaaatgtgacccccactgggtctcttctgagctgaaatcatctgaaatggctccagcacacacggatagggaaggatgttatgacattggatggagtccagagaagcacaagcaggttggaaacacagtcctgccagaggctccacaatggagctttgactgggatagtaaaattaaacatccaccaaactctgaacagttcagaaaacacaatcaaactgccccaagacaaaaagtaaagaatgatcagtgttctgaataccaggaggacagcccaccagcagaagttgaggaagaaagatgttggcagggggtggacacacaaggattgagaaatggtagagggctcctgaattgaaacactggatggctgaaagcctcttttccagcggcccagtaacatgctacatttggcaaagtcccttggagtttcaaagcatcagctctctctgctgcattcttcactatttaataaaatagc

SEQ ID NO: 475713 - DNA, 610 bp, Homo sapiens
gggaggaaaggaaaagacaaagatgaggaatttgagggacacgagtgtcaaaagcacagtcaaccccacaatggcagatcaactgacagcttgcaccatgcaccttgaaaaagctgcagacactcaatgccagcctgtgaaagcagctgggagagagaccataccctgcaaagccacagaggtggagctgcccaagaccatgggaacccaccttttgcatcagcatgacctggatttgagacatggagtcaaaggagatcattttggagctttgagatttgactgccccactggatttgggacttgcatgggacctgtagcccccttgtttcagccaatttctcctatttggaacagctgtacttatgcaatgcctacacctccattgtgtctaggaaccaaatctcatcttgaattcccatgtgttggaggaacctggtgggaggaaagttaaccaaactcaagcaaagaagaccattattaattttgtttttaaactaattccaattgtattggttggaacacttcattctaagagtccttcccacagatgatcaaagaaaaagaagtgtgccataatagcaaataacaacttctgtaaagacctctt

SEQ ID NO: 475714 - DNA, 574 bp, Homo sapiens
ctaaagaccctatatgaatttgggaggacacaagtttcaacatgtttgggaatatcactgagggatggggtctagcagaccagctccaaggcatccatcccagtgttgggtggagggtgggaaaaaaaccctctcttatgaaggcaagatcctctcacagcagcatttgctgtctcgtttctgtgctggccctgctgttacagattgggattggggacatcatccatcaagaacaacaacaacaaggtgttgtttgtaacaaatcaaccttgaccggttgtcatggaccctctgagggccaccttgatggacgggcatgtccagagtccctaggtgtctcacagaccaggttggttcttatggtgaccagctctcctattcctccacttctcttttgtgatacttcctggtacactgcataccatgatgtcagaattgtgcctgcccaagacggtgttctaagcagaatgtctggcatgcaatagatgctctgtgatctggggaagtttcaggaaagctgagaatttctctgggttgaaagctctcagaatgtcagagtacttctatgattggg

SEQ ID NO: 475715 - DNA, 857 bp, Homo sapiens
ttcctctcctccatgcaacaccccctcttgttcccttgccgtggaccaagcccgtgctgcttctccactcgcgggccacacactccccagatcccgtgctgctccgaatatatcaacacgcaccccagctgtccccttccactccatctccgtgttatccctgtgttagcttttggatgcaaatgtcttaccatgtcacttcctgactttaacccccaacaggtctccgattacttgacagtaaagtcaagtgaaaatgaaggtcacagaatccctcactgtgtatctcccatctgctgtgccaggcacctcctttcccctgacccaggttcctgctcctctcagcctaaccagactcactcctggggcctccgctcttggttcaggctgccaagaggctctatctgcagtaagtccccatttgttaaagggacaggcgtggagctccacaccggtcctgggattaaagggaagcaagaaaaggaggaaagggagaaacaaggaaagtgggacaataggaagcaggaggagcctggggagcaggtggaaggcatcacacgctccatcttgacttacaacggagctgtgtcccaggggccccctccaagcatccaccggccccacaagtcctgagcatccaccgcagcactgatccccagtctggcaggaccctgaacacaacagcaggaaatggtctcttcagttgaggcaagtccagcatgaaccgtgtaggtcttcctattattaagatatggtgatatgttttccagcatgtaacatctaaatctaaaattcaaaggataaaactttgagaattacaagatagatgctttctgaagacacaagaccattgtgat

SEQ ID NO: 475716 - DNA, 661 bp, Homo sapiens
cctgctgacttctcagctggtaccagtgtggattttgcgtgggtctctctgactgtgacaaaggaacgcggactgtccctggaggaaatgttgcacgcatgtagatttcactgtggttttcttctttcgagggtcaagctcctctagtttatgctaatttttagctctcagattttctgggcaatgggaatattcttgcattttgagtggacagacatgcttggcaatatctctaagggccctcgggcagatggagttatacctgctgtcctccgacctgtcacagaggtgaacgcagggtctgggggcctgggagcagtgcctaaccagattgtcatctcttcctgctcaccttcagcactgcaggtgcagataactctggaaatccatgtggaaaaggccgcaaagagtaaagctgagcttttttgctggagggagttgcatctccagaaaacaggatgggcaagcctggtaagggaaaggaaacaaaccttcctgtgtcccctgaagacagaaactctgaaggagggaaagacgaaggatgggtctaagagtggttcaaagtaattgaggatagagcatagaaggatttcagtgactctagtggagtcagtttggtctgtttttgaatcttggaaaaggggaggagcaagtctgttgc

SEQ ID NO: 475717 - DNA, 558 bp, Homo sapiens
caaagacagcaagcctgttctatcacttcttgttgaaagatggttacaacaagtgttggaataacaaagaacccccagataacacaatcgccatttctccaagcagaatgcttgttaaagatgcttttggacaaattgaatgctttaaatgtttgtgacatggttgaagttgattttgctgaacaagtttactttcagactggtgacctccagaacggtcagctactaaagctgtactggtttaaccatcaggttcgtggggatttgttacagcagccatcggaaactagcacaccaggaaccgaggccggcagggttggagcgtgtgggcctccctgcaccatactgctccccagttctccgactctgctgcttctccccatgcacccccacctccatgaatttgccttgaaaaaaccccacgtttacctcttgcctttcttcagtctattgatgtagccaagatgcacaaaggaaaataattcaagtttacaagatacatttttttttccagccgattttataagtccaggcctcaggccctcatgggtgaaaaca

SEQ ID NO: 475718 - DNA, 1629 bp, Homo sapiens
agcccttcagctttatggttatttttctaagtatggtgattatggtgttggagcctttggatctgatgatttgttttctgttttttaaactgaagaattccctgcctctggaatcagaggcagggctgcacagctccgagggtgcacccacactgccaggacagctcccagagcagcaggcatcaccagatggaagacacgacgggggttgcagaggtgccacatcgtgcccgggccctgctgtaaagaaggcagagatcagagtgcggccgtgcaaacctaggaacgccaggatgcgcgggagcccccagacgccagaggaggtgaagagggatcctgctggagctttggagggagcgtggctcaccaacagcttgatcctggacttccggcctccagaactgcgagagaatgaatctgagtttgtcccttgggggatccacagtcagtgtgtggccctagaggggagcaccatccacctgggccactcacatcggccacactggccatttaggacactgtccacagcaccacagcgtgggcctcacccagcaggaatgcgtttggaaggctgctgtgctcccaagaaccaggcattcgtgcacagctgtgaggggctcctcctccccgtccagcccagcctcttacggggtgtgctgtctaccaggcagaaccaaggtgccctccatcctggcactggcactagcctctgttagggcactcagcgcatcacatgggagatctgtttacccacctgtctaactaggccagcaatcccaaccttgcatactttacacctgggagattttcaaattacccatgtctgagtctcacccaagaggttctagttcattggccctcagggagccaagcaccagttttttccaagacagccccacacccctgtgcagcaaagtctatcatattcaacaaatgttaattaaataaatgaagagtgaatgaatgaaacttttatttattagtcaggttaaaaggaagagttaaattcttaggttaaaaggaagagttttaaaagttacctgcttattgcttattctgagtatgtaaatacaaagactgctttcccgtcaaattttgatttgctagaatctgtcatttgacagtaaagggaaatgctgtagaaaaaaatgaacaatatctttttcacacctgcaaaattgactaacagcagacctcatttgattcaaataaatgaaaaatcatttgactttggaaatagatgaaatccggagagttgcagacataagctacaacttgtaaagatgggaaacggatgaaaactggcaaataaaagggggtttccaataaaaacatctgtaagtgtacctgtgacatcgagcgtgctgtggatcaaatttggcagtactgcagcttaacttttctcattcttcataaagtaaaagccctggttaaatgatggcttatttgtcaagcttcaggcaaacagctcataaaaatcaaccagctagactcaaacatttacacagtaggaaaaacctccttcggacaagcaagagattaagaactagttttgaaaatgtgtaagtaaaggaggaaaacaggaatcgactaggtgatatcagccaatggaggagtcccaaatttctc

SEQ ID NO: 475719 - DNA, 1514 bp, Homo sapiens
gaatagcatctgagagatgagtttatcagaaaaagataaatgggcatgtgtaatgggttaagagtaaggctctcaggtgaagacctgagaaagggccagagtggccaaaagggcagagtgaagattgggggtgtgctgctggagccctgggaggagggggttgggcagtcgctggcgctgccgctggtggtccctgtgcttgaagtgccggtgtccactcgccgccccaggttctccacgtgtgtcctgggggaccagcagcacagggttgaggccaagcctgtgggtatctcctacgtggacatcgaggtgctgaagaaactcgacaggaacaagaagctgctcaacaagtatgatgcctttctggcctcagggtctctgatcaagcagatcccacaaatcctgggcccaggcctaaataaggaaggcaggttcccttccctgctgatgtacagtgaagacatggtggccaaagttgatgaggggaagtccacaatcaagttccaggtgaagaaggggctctgtctggcatggctcttggtcgtgtcaagatgacagatgatgagcttgtgtacaacgtccatctggctgtcaacttcctggtatcattgctcaggaagaattggcagaacatctgggctttacacatcaagaacaccataggcaagccccagtgcctgtattaaggcacattctaataaatcttagtgccacaaagagagagacagagagagaaagagagagagagagagagataaacaaagagagagagagagagagagataaacaaagagagattcgggattcagcaatctcctttctagacaagggctgctccccctgacaccacagaggagatggctgatgttccaggagtctacaggcccaagagacctgggttcatcccatctcgttggagaaggacagcaattctacagagggacccagcgggaaaagctggtgaaacacaaataggctgccccagggaggagcctctggctcttttatagggtaactgaatatggtcaccagcttttatcaaaattagccaggtactcagagtttccaacggcccaggcacaaataatccacaaaccaatcacttcaaattatatccctgaaatagtcacacgcatgctctcaacataccattagcacctaaactcaaactatgacacacccacaagtctgcatcaccctgcttataacttaaagcttgtgggtttaaactaatttaggagtcagtctggggaccaaagggggaaagtcttataatgaggtggcgatttgcttagggaggggaatgcaatgcatgcgtgacatccagaggctgggaactaatcgtctcataggagaggtttataggacaaggcagtccacaaaatccccctccctctaaatctttgagaatctcttccattctcatacacctggactaagtgtccccaactaaatgtgtatgttaaaaccccacccctcaatgtgatgatattaggaggtggggactttcggag

SEQ ID NO: 475720 - DNA, 618 bp, Homo sapiens
ctgacatgccctggagaacagaacttctggttctgtgttttatcatagtgaaggcagtaactactttcgaggttacagtaagggtgatcggagcctgtaaatccaagggtctggctctagatgatcgcagtggaagcaaacattgggcaacaggggcaggtgggcatgcagagtggcagccaggaggaagttagcatcaagaaaatcagacagctggtgggaacgcaaccaataaccgtgtctcagagacaaaacactgggcaatgggacagggtctggcaggatagatcagtgcctgctgttctaaaagagggtgaaaatactggtcctgttatattgctgcaagaggtgggctcccatggtcttgggcagctctgcacttgtggcttttcaggatactgcctccctcctggctgctttcatgggctggtgttgaatgtctgtgggttttccaggtgcacggtgcaagctgtcaatggatctaccattctggggtctggaggatggctgtcctcttctcacagctccactaggcagtgccccagtagggactccatatgggggctctgaccccacatttcccttcagcactgtcctagcagaggttgtccatgaggg

SEQ ID NO: 475721 - DNA, 700 bp, Homo sapiens
ctggcacagcatcagcgttaggtttggaactgctattggacggaccctcctctacatccttagctcctttgaccatctcagatgacacttcttggccttgcttctgtagttgcgagcaccaagtgtctctgggtccctagcaggttacctggattctgcttgtatacccatgagcagtccccctggttagactttcttagtctaaccctgttgggcagagccttcttacttggagagcttcggcctaatggcgtcatttgcctcatggtcctttgtttcatggcaggtggaaccagcccaagtttgggggcatggaggaaagatgagcggacttccgttcagtccccagcctggattccttgtttaagcataagggctgtcatttttcttgagctagaagcatcagctgacatagattcctcaatttcctttttacacttcaaaaatgattccaaagaagactgcctagaaacaacatcagcactggtgttggttggggggtggattttctccacgcccattctccaggaatggaaaaaggagtagcaacaggtgtcatatattgctataaactgctgttgctgtggttgtttttgttgttgttctatacagttcctaaaatatttgcatttattattttggtgaaaaagaaaagtagtcgacatgaatatagaatggtaagccttcaatgtcatttgcc

SEQ ID NO: 475722 - DNA, 1405 bp, Homo sapiens
aagcttgtgggagttatttgtatcctactgctcaagctggcatgatcattgaattcatagacttatgtcgctgctggtcttagtgcttaatatatacagtgactcattctacttaatggcatcaacaacagatgcagagaaaatgcttcacaagcccaaagattgcaggcctcgctacctttccaaggcaacatcgttcttggagcacctgctgaggtgctctctgctgggggccgtaagtgagcatcgaaaaagctgtaaaaagtatccctgctgctctccagggactcacagcatggacggcacctgcattgagagaagacggcaatggtatcgtgatgccagtggtgaggtgatctatagtggttctgggacagtgtattatggcagaatcaggtcctgggaggatatttggcaacatccctggcctctactcaatggctattgttttcacaacatctacagccaatatgaactgctgctctatggtatgtacaaacgtgtgcactatttaaacactgttgagaaaaaggacctccttggaacaaaggcagatgagtacctttcctgggtggcactggacacaacgatgcttggcctctggtctgtggcccagaggtagacagtaggcagccacatgagctggacatccatccccaaacatgggacatttctttgccattatcaaagaggggaaggccacttggtagactcattttttcatgtgattaaggcctactcactagtacactactaagtcattagggaccaataaaatttgtcatttaaatcagagatgcactcaatgacaacataccaaatgctgaaaatcaaccatcagctacatgttaccttcacaggataaatttctagaataaaagaataaacttgaatttttttaaaaaatgtgatcattatattttctgatggtggagtgtaagtatgatagattgcttctgtgatcatcctagtgtgcatgctagtaatgcaaaatgcttgcctccttcccactggtagggtttgagcatggccagtgtgaggaggtgttaatgtagttctcgtggtgaaggtagttgggtggccctactactgaagttaatgctgccagcattatattttgtgataataaatgcaaatttagacctcaactggttaaaataattttaatacataaaacattaggagattttcactccaagccatatctgtaatacttacatgattttgacaatcaatattcagatattgacaataaatccaagtaacatactttgtccacattattggaatttttatgctgattggatatgatggcagtctctggaccatgtgagtgctgaacactcacaagtttagtgatccagcgatgacactgatacaggtacgtgtccagtttccttctgac

SEQ ID NO: 475723 - DNA, 807 bp, Homo sapiens
tctaagtcaaccgggatcagcttagattgtttgctagtgttatatttaaagctattttattattctaggccatccggctgatggaatggtatcagcttctccttgtacctctcatagaattcggctgtgaatccatctggtcctggaattttttggttgttttccttctaacagtcaggaccctcagatgcaggtctgttggagtttactggaggtccactccagaccctgtttggctgggtgtcagcagcggtggctgcacaacagtggatattggtgaaccacaaatgctgctgcctgatcgttcctctggaagttttgtctcagaggagtacccggccatatctcaagctgtgtgctgggagaaccactactctcctcaaagctgtgacacagggacatttaagtctgcagaagttattgctgtcttttgtttgtctgtgccctgcccccagaggttgagcctacagagtgaccccagtaaaggcccagatctgcaggcctgcctgcatggatgtaaatgggcaccttcctccaggtatctggaatagcaggacctctgccagactgtggctggaaggagtttgggatggttacagatttaattaatttatatttaaaatgattgcttaaagaaatgaagttgttattgccagttatattgttattgttttatgtgtttttagtagtatatttccctcatttccttttttactttcttaaattaaatttaattaattaattaattaattaattattattattattatactttaagttttagggtacatgtgcacaatgtgcagg

SEQ ID NO: 475724 - DNA, 984 bp, Homo sapiens
ccctgacgtgctaattcttgcctgaagcagctgtcctgaagaaacagcagaatgatcttgaaagttagttacggcttcagaaagaagataatgtgttaccctgctggggaaatgccctcttcaatttgttatatgctcagaaccagtgaccaatgtgttgtctccccaaagccaggattcacagggccagaaatcaaaggggaggagacaggtcctcctcactattaccctttggcaaagaaagtttttccagaatgtcagattgaggccactctcagctcccaagaggctacccactgttccccgctacatagctttttccatagacagttcacaagatggcagcttcctaatttaaagacagcaggagagcagaaaacagcaagactcaaaagcaaagatctttacctggatttagcaactgagtctttctgttttgaaaaattcccctgccaagtgaggaaggttattgaataactagaaacgttgcaattcaggaaagatttttgtcgtaattccttccccacaccagtagttaaagagtgtgggtaaatcctacaaaacttattctgctgtcacttatatttgtatgaaataaaatagaattctgcagagctttgcacagtattaagtttagaggaggagaagaggacagagaaaaggaattgggatggtgtacaggataatcacagatcgattgtttaaagaaatattcctatattcttaaaatagccagcaattttcacatataggttaaataataataaattaatataaattcttaattataagttccctggatcattcattgatgtattcattaagcaaactttggatgaacatcctataacatacttttaggttctggttgtacaaatatttgtatcaatatgtcatatttatatttatattaatgtccaggtgaatgaaaatttttattttaaaattatttttaaatgttatctatttatgatgctttaaatc

SEQ ID NO: 475725 - DNA, 965 bp, Homo sapiens
tatacaaaccagcagcatagatgtttcagggggattgacctagggatggggcttcctgagagtcaaactgcagcaattgttatttatcttctggatctagctagccagcagaggcttgctgtggctgctgtgggggatgcaggtgtgattcccaggctaatggagttatgttcccaggaggattatggctgtctctgctgtgtcacacaggtcaccagggaagtgggtaaaagctggcagcaacaggcctcattcagctcctatacagcttgcagcccgaaaggccagtctcactcccagcatgcacccccaacggcaccagcatgggtcatcattcctggtcagctgttggtcatcaagaaaatggtcatttcaaactgttctctggctgctggaaaatcatttaaaaatgactgtccatacctcgtagcaaatgttctggctttccagagataaacatggaagaaatagctgtctattaaaaaatagtagtaacagtctcaattatttaagggtttatttcaacatatttggccttattcttcctcatgctgttcatatattggtcaatagctatattttggtattaggtatgcaaatacatgaaagtttaatgaaataataactagtgccatgaatgaaaaatatttgactttatatttatgattcattacattatttgtaattctctttttcatatttccatgtaacagtgaagaatccttttagcctggctctctcattaggccctggaagaacatataatagtataatttttggaatcactaggtttaaatttagtcaaagaagactcacataaaatggccccacctaaatttttaatatattttgctacttgtcacaggatgctctcagtgcattcacagaagcttaagatttgggtgaggtgatgtattagccccttggggagatattataacagagtagttatgagagaagattgt

SEQ ID NO: 475726 - DNA, 731 bp, Homo sapiens
tccactgacaccttgcactgtgcacctggaaaagccccagacactcaacaccagccatgaaagcagccagccaggagtctgtaccctacaaagccacaggggtggaacttcccaaggccatgggagcccaccttttgcatcagtgtgacctggttgcaaaaggtacttgccttgtctcagatgagactttggacatggacttttcagttaatgctggaatgagtaaggactttgggggactgttggaaggacatgattatgttttgaaatgtgaggaaatgggatgtgaaaagggccagggccagattgatatgacatccacgttcatcttgcctagaataatgaacgtttggtattttctcacccctgcagcttttccagaatcccagtccaagtcttcctttctgacttcccactgtttgctgagattctattttgataaaaagagtaaaaaagtagtacagaacttcaaaaaacactatgactttgagaggtagagccaggacagaaacagaaaggtatgagataacccagaataacacagaactgtagagtcaagaaagcaaaagattaaaaagaacaccaaatacttcccataagtgaaggtagatgcttaaacatggatatgtttactttaagtggatccactggtgtcataacatcagaatatatattaaacattattaaaaagaaataatttccttggcttcttattttctcaagtttcatac

SEQ ID NO: 475727 - DNA, 806 bp, Homo sapiens
atagacagtgccgggagcagggccttgtatgtcgattttcaaccacagtaaaattagacaagtcattcatttctgggtgtcacggaatggagtggccaatggcctgcagagcaacatgcccaagttttattgtgactactgcaatacatacctcacccatgactctcctcctgtgagaaagacacactgcagtggtaggaaacacaaagagaatgtgaaagactactatcagaaatggatgaaagagcaggctcagagcctgattgacaaaacaacggctgcatttcaacaaggaaagatacctcctgctccattctctgctcctcctcctgtaggagcaatgataccacctccccctagtcttccaggtcctcctcaccctggtatgatgccagcaccccatatgaggggtcctgccatgatgccaatgatgggccctcctcctcctgggatgatgccagggggacctgctcctggaatgaggccgcttatgggaggccacaggccaatgatgcctgggtccccagtgataagacctcctgcctgtcccatgatggtgcccactcggcccagaaagacttgaccagacagataaggataaaggagagggctcattatgtcggttttatattacctgttctgcttcaccaggagatcatgctgctgtgatgctgggttttctaaacagcataaggaagtcttgctcccctctcctatcaaagagaatagttttggaggggagaagtgggacaaaaaagatgcagttttcatttgtattgggaaatgtgaaaataaaattgtcaact

SEQ ID NO: 475728 - DNA, 794 bp, Homo sapiens
ccggccatttacacttcttttgtggtggaatgtcattagttaaggtggggcagggcatattcacttcttttgtgattcttcagttacttcaggccatctgggcgtatacgtgcaagtcacaggggacgtgatggcttggcttgggctcagaggcctgacaatggggtttcaccatgttgaggccctcccatggagctggacatctgtgcactgagaagggccctgtgcaggctgcttttgtgggaagcagaatcacagcagggtttggggtatgtgggaatatcctgctgcccactgtgcccacatgcctgtgtcctgacttgatgtacagaactgttaacagaaaggggtcccaatcagaccccaagagagggttcttggacctcacacaagaattagggcctcctatctcatcctgtgacttagaatgccttaacctcctgggaatgcagcccaataggtctcagcctcatttacccagcccctattcaagatggagttgctctggtttaaacgcctctgacaaagccagacgctggactacaaaactgaatgtggcctgtgtcttcagcacagagagcaatgatatcacaaaactgttgccatatgaaaatgaagaggcaatcaaagaatatgcactgaaaaaatatagaaaaataatttatagaaatgtgtcaggcagttaataaaaaggattgttatttttctggattttgttaaaatttgtgaatttatcagtttttttaaaatgcgtaaattgtgaggacctcttttctcattctagttacttttac

SEQ ID NO: 475729 - DNA, 663 bp, Homo sapiens
ttaagatctatatagagcgatgggctgggggcaatgctgacccataaatccatgatactcaatgtgatgtggcctcattcagacctgactggaaggcacctagccttcagcaccaagtggggaatcttctgcagacatggagagtaccatctacctccactagccaatgaatctcaagaacccagacttctgctctggagatgggctgctctgattccataccagctgtgcccatcctatcagggcacaggcactgaaaagcaattggaaatccagccctgcacagggagctgtgccaaagccagcagccttgcgttcacactccccctgcacccattcctgttcttcaccttctcctcctctgtgcctccacaacaggcatggatgggcctttcatcccaagtgccccaggaaagcttggccttgcttttgtacactgctagaattaagaggttgtcgaccagaggaggaaaagaaaaaaaacaaaagggaaataaaggaaatgagtgggcactgccctgaggaggccctagaaccccaaacatcctttgcaacttcaagacacttgcaacaacacgcaccagttttaaactgaaacccaaaatacccctgctactggctgtcagaacctgttttctggatggcttatctgctgagggtagc

SEQ ID NO: 475730 - DNA, 834 bp, Homo sapiens
tgcagtcattctggagaacaatcgatgatgcttgtcaaaatatcctttctcttgggcatggtggcggcagcgacggcagcgggacataggtgctggacgcgggacgcagcggcgcgcgggctttggtcggaccgggggtctcaggcccctcttctgcaggtctgctgcagtttgatggcggtcggctccagagcctatttgcctgggtattaccagcagaggctacagaacagtaaagattcctgcctgctccttcctctggaaggttcttccccaacgggcaccagcctgatgccagctggagttctcctgtatgaggtgtctgtcaaccccttgccgacagtgggaaaaaccgcctactcaagccttagtaatggcggacgcccctgccccccaccaagctcgagtgtcccaggtggacttcagacagctgtgctggcagcatacgaaggaatcccctggtctgtggattgcaaaaaccatgagaaaagcgtagtatctgggctggatagcaccatccctcatggcttcccttggatgggaaagggaggcccccctccaccgctccttgcactccccactccccagctcaaggggaacggccacagccccaagggtccaagattagaatatgactgcggttataggtcaaaagattaaaggtctgtgaatattgttctctttttcacccagagataccaggatagtctctggcactttcgccttggtatccataagtgagacctgtattgtcagtgtttagatttgtcacaatcagaattaacattcgtttagttcagaaaaatatgaaccatccagctgcatctggttaaa

SEQ ID NO: 475731 - DNA, 887 bp, Homo sapiens
gcgcacaggggtcaggcgtatgatggagaaagaaaatgggagtaggatgggcacatctgaggaactggagagcagagaattccgaagattgggccgagcctatgccctggcttttgcagaaagaggagcgttagttgttgaatcaactggcagtataattgaagttctgagtaaaatagattcagaaggaggagtttcagcaaatcatactagtcgtgcaacgtctacagcaacatcaggatttgctggagctattggccagaaactccctccattttcttatgcttatacggaactggaagctattatgtatgcccttggagtgggagcgtcaatcaaggatccaaaagatttgaaatttatttatgaaggaagttctgatttctcctgtttgcccaccttcggagttatcataggtcagaaatctatgatgggtggaggattagcagaaattcctggactttcaatcaactttgcaaaggttcttcatggagagcagtacttagagttatataaaccacttcccagagcaggaaaattaaaatgtgaagcagttgttgctgatgtcctagataaaggatccggtgtagtgattattatggatgtctattcttattctgagaaggaacttatatgccacaatcagttctctctctttcttgttggctctggaggctttggtggaaaacggacatcagacaaagtcaaggtagctgtagccatacctaatagacctcctgatgctgtacttacagataccacctctcttaatcagatgactaaaactttttgttagttttaaggtaggttttaatattttgctgcgtgacaaaagacggtttttaaatcaacaatatttttgtgtgaataatgggcactcatcattt

SEQ ID NO: 475732 - DNA, 508 bp, Homo sapiens
agacattctgttgagttactagataagcagagcccagctgagatgcaattctatttcaaccatcaatacgatcatattcaaaaagatgaggaagatgacgaagtttgtgaagagaggacactcaaggacccatccggcccacaaagaaagaggtggcctctgagggcagctgcatctgcccttcttggtgataagtggccatgtctgctcagcccaggttctcttcacccactcagtcctgacttcacccttccgcctccagctctggcgccccctgagccccgctcacccgacgcagggctggctcagggccggctcacagcctcactgcgccccattcccagccccggccccagcccaggactgggcccagccgtgctcagatacaaataccagtcaatggttgaacttaaaagcaatagggttgggaggacctttgcaatattggtcattaaatcataagtaaaattattctggaccataaagtaaaatcttagattaggtcagc

SEQ ID NO: 475733 - DNA, 897 bp, Homo sapiens
caggaaattctgagaatttcaaaagtcgcattaactaagaagtgtctttctttggtttgattttcacacagcagctgagacttatgggccagaagatactggaagatggtgtggccttctcttgcaagaggcatcctgttgggccctcgggagaatctgggctggcctgcgcctccatccttctgcctctcctcaaaacaaatgtggagaaaaggagaatccgaaaaccatgagcagaccaagggagtgatcttgggggctgaagctgttattgagatctctgagtggagtgcctttggatatgctccaccaactgccatggtccctggagaagtcactaaggtacctgggtatggagtggatttaactgagcatcagccaacatggagtaagctcgaattcttctgtgtgtggaccagtgtcccatatgggactagggtgatcgggtcccaacaccaggtcgtgggggtgacaaagtctggcagagtcaaaggaatgaggaaagacagtttgagagagcaagtgggtccaggtggccaaagcgagaatggaggctgtgaaggccccgagctctggaagcccagactatttattggtgatcaaacaaagaaacaggtgatgagaatatttccctccaagtcggagtccctataaccagtactgccaaagcagaattacgtgttaactaaaatttttatccttagtaacctaaaactttagtggaaccctaaaaaggaagaaatcctgaataatagtgggcatttataggtaagaacaattcacaattttagaaacatattttccccatattacaactcttcttaattggaaatgacccagatattaaatgagcattaaaaataactttaagattttaatttatgcaaaaagtttacc

SEQ ID NO: 475734 - DNA, 701 bp, Homo sapiens
aactattagaggagggaggggataagagcaggccggctgccagccctccagactgtccgctatggctccaaggctgttacccaccaccgtcgtgtgatgcactttcagcgacagaagctgatggctgtgactgaatatatccccccgacaccagccgtcaacccaacatgcctgccatctcctcctggccccccacaggaggcatcactggaagccctagaacttacccagagggagcaaggttgccaggagcagtgacggctgatgtacccttggttattgctttccaatttcaggagacgggcctcatcaggcttctctgccgggagagagcagcagttttccaggacaaccgaatgatagctatctgccagagcgtggctctgagcgtagcagacaagcttcttatgcgacaccagctgcggaaacacaagatcctgatgaaggtcttccacaaccaggtcctgaagcccttcctggaggactccaagtaccaaaatctcctgcccctttttgtggggcacaacatgctgctggtcagtgaagagcccaaggtcaaggagatggtaaggatcttaaggactgtgccattcctgctgctgctaggtggctgcatcaatgacgtagatgccatcctcagcaggcagggctttatcaactactccagccttcccagcctgcccctggcatagggggagctt

SEQ ID NO: 475735 - DNA, 626 bp, Homo sapiens
aaccaccataaaaacctcatgccagtctcctttccctgttcttgcaagccattttcagttcagcttgggaagccagccctgcttcccagaaagcctcaggatgggtaggctcctgggaacctggcatagcattgatgatggcagtagtggtggagggacaatttcatgctgtgatgagctgggcaggcctgtgtctaggccttttagttggttcctgcaggtccacaatggtgaaagcatgcaccagctgttgtgggtggagatggggcaattctcaggccccaggcagagtgttcagagccacagtccaggagattccaggagctgtctttggtgtctggagtcatcagtacaagctgtggcgttgtgcctcattgtagcactagtgctggcacagtcatgtgttgtattttggaggtttgttcctgaaagaatggccttcaagacggcttctggggctttcccagaggttcagacacttatgtctgttttcttgtttcaacatgctacaacagtttcttttgtttgccactaaaaatctctgaataaatgaataatggaatctctgctgccaataaatattggatgttttgatgtctatgctattctctgaagttattgcaaat

SEQ ID NO: 475736 - DNA, 598 bp, Homo sapiens
tctcccctcagacatagcttaccccaataagaaggaaccagaaaaacaattctggaaataaaaaaaaatgatagaagatatgagggtagaaatcttcagtgaaatagatggcataaatgaaaaacagtcacaacttcaggaaataaaggacacacttagagaaacgcaaaatgttctggaaagtctcagcaatagaatcgaacaagcagaagaaagaacttcagagctcaaagacaaggtttttgatttaacccaatccaacaaagacaaagaaaaaagaactttaaaaagtgaacaaagccccgcagaagttcgggattatgttaaacaaccaaacctaagaataattggcattcttgaggaagaagagaaatctaaaagcagtagtaagcaccacactgtcactgtgacagacacccttggctgcttacccaacctccttcccatacttccttctgctattagactctcatttcgttcacgcattggtggtcaagggctttaggaaaggggtaaatctttattaagaagctaatttaggtgtagcagtctaaatactattttttttcatgagtttcataattataatttgggttcc

SEQ ID NO: 475737 - DNA, 596 bp, Homo sapiens
cctgcagaagaggaaaactaactgttagaaggaaaactaacaaacagaaagcaaaaacatcaacatcagcaaaaaggacacccatgcaaaaaccccatctgaaggatcacaattcctcgccagcaagggaacaaaactggacggagaatgagtttgacgaattgacagaagtaggcttcagaaggtgggtaataacaaactcctccaagctaaaggagcatgttctaatccaatgcaaggaagctaagaaccttgacaaaaggttacaggaactgctaactagaataaccagtatcaagaaggacataaatgacctgatggagctgaaaaacacagcacgagaacttcatgaagcatacacaagtatcaatagccgaatcaatcaagtggaagaaaggatatcagagattgaagatcaacttaatgaacaaggtaggccaacattcaacttcaggaaatacagagaacaccacaaagatactcctcgagaagagcaaccctaagagatgtgatcatcagattcactaaggttgaaatgaaggaaaaaatgttaagggcagccagagagaaaggtcgggttacccacaaagggaaga

SEQ ID NO: 475738 - DNA, 1779 bp, Homo sapiens
catctgtgagaattttcctactgcaacagctgcaacattcctcttcacatccttatctcttcattcttcccctagaagcatggatgttaaccctcagcccctagtgaccactggatttaatctctatctctatccctcacactgggaggaagtgaggtctgccaggccccaggtgggtccagaagtgtcatccgggagtcagggactagagtacaaaatcttagaagtatacctggtattctattgtattgcagctcagctggcacttaaactacatggtgcagttcttcccactgtttcctctcctttccaaaaaagagaggagtatcaccctatagcccctgccaaccctggccacaaggagaactcccagactaccactgatgttcccttaaggcccaaggagatgtttaccaatgaaagttcagcacctggtacagtacacagctcaataatgaattcttgcctcagtgaatcacaagttcagtttaagacaattatggaaaaggttgagaactacatcaattacacttagtgcacctgtggcattagtacatatgtttattctagaaactattatttcatctagtttccaaacgttcattttggtgaatttcattttcttaaataaacaatatttaatacagctttaatagtatgttgatgacctacacttggttgtatgattataatgacatgtttaactacacatggcatgttcatattttctatttttaaaatagacatcaatcatttaccacagcctcaacgagacattcttaggaacaatgttgtcaaggaaacatactgaaactgttacataaaagaatgtctctgtgaggaaaatctttcaaaatagtatttctattttttcccaaattatgtaaaattataatttacaagcaattcaatttaagtaaataatttataagcagtttatgtaatggtgcagctgtgggaatctgtcagatcttatcacaataaatcttcactgccttagtagttcttcagtgccattacacagattttgttttattttgtccaaactttctattttctttcagcaggaagatagttccaaaatatctagttttctattactggaagcgaacatctcaaattttatctttgaaatttgtctcatttttatatacttgtgaagttttaatttttctaccaacaagatttttttgcgagggagggagctgctgtgcatttctttttctttttactagtgatacaaggctataacatagctaagaaaaaatttaacttagtatttttactatgctccttttaaggtttgcagtgccttgaacaccttagagatatcttctgtttctgttaatggtgatgcatgaagctttcaataggacccttattgtactggcagggccatcttctcattttcagcaaaattgagtgttctctcactttttgtttaaaatcaactttcttggggtataatttacataaataaaaaacatccattttaattaaatagtttcataagttttgacaaatgtacatattaatgtaccacccacccccccattaagaatctccctcctgccagcctccctccctccctctcttcctctctctttctttttctccttccctcactcctttcctcctttcattccttcctccttcccttcctgagaagctcattttcttggactactgtctagtatcttagaccaagtgattatacctatttttcatataaaatgcttgaaggtatttatttaaagtctaggatacctgattgttatg

SEQ ID NO: 475739 - DNA, 1234 bp, Homo sapiens
cacgagctggtgttgagtgtctgcgtcttttccaggcacatagtgcaagatgtcagtggatctaccattctggggtctagaggacagtggccctcttcttacagctccactaggcagtgccccagtggggacttggtgtaggagctccaaccctacatttccccttcacactgccatagtagaggttctccatggacttctgcctggacatccagatctttccatatatcctctgaaatctaggcagaagcttccaagcctcaaactcttgtctcttgtcttctgttcacctgcaggcacaacaccacatggaatctgccaagacttagggcttgcaccaactggaacaagacaaggatgtgtatccactctcaccactcctgttcaaatagcactggaagtgctggccagagcactcaggcaagagaaggaaataaaaggcatccaaacaggaaaagaataagtcaaactacctctcttcataggtgatatgattctatacttatgcctagaaaactctaaagactccataaaaaggatcctggaactgataaatgactttagtttggcaacatcacagatgcatttttgtccaaaggctctcactgacttgaagcaacataaggccagaagttcacgcagcagaatataaacttctgtgagacttaatcataccattcctgtgtatccatatcttagctaagaatcattttaatgattccaaaagaatggttaaaaagtacccatagtggtctttgaacaaaatcttatttcaagatattttacatctcagaagcatagctttctgcctctgaagcccatgtttgaagtctgctagtaattgtacttactctgcagaaaaggaggacaaatggaagatttcagacacaggccgcagatggacatttgaccataagaatcgatccaaataagctctggctgccaaaactactgccattcaaaactgtggggtttgttcagttttaaagagacttcaaaatgagagatgccattagaaaagtgccaccaaaatttaatcaaaaggtttgtttcaaatgtatttattttgtaaggttaagtcttgtgcaattttctttaatttaaatcaattaaatgagttgtacagatactaaccaaataatatagattctcaaaagccaagttactaatttgagttttttcagtcattagtgcaattgagagctttttcaaaaaaaaaaaaaaggggagaaaa

SEQ ID NO: 475740 - DNA, 610 bp, Homo sapiens
tctcctttacatgaaagccagactggtgatgcaattgagtagtcaagccattcagaggtccccaaattgtgggcaacctagggagttggtgcccttcatcccagctgctccagccttggctgaaaggggccaacgtagagctcagggcatggcttcagatggtgcaagacatgagacttggcagcttccatgtggtgttgagactgtaggtgcacagaagtcaaggattgagttttgggagcctccgcctagatttcagaagatgtgtggaaatgcctggatacccaggcagaagtttgctgcaggggcagggctgtcatggagaacctgtgctagggcagtacggaagggaaaagtggggtcagagcccccatgcagagtccctatggggcaccgcctagtggtgctgtgggaaaagggccactgtcctccagagccaagaatggagagagagttttcctttacagactccctgtagaaaaacttcaccagcatgaaaaaaaaaagacacccactgacttacttttcatctggaattaatgtgatcagcaatgtctaaagacggtagataaggcatgttttcatttcaatgaaatgaagattttcaaag

SEQ ID NO: 475741 - DNA, 566 bp, Homo sapiens
tcctatgtggagccgcaggctaaatgccacctgtcatactgcaatgtcagttttactcaaaggcctcaacatagatgccttctccaggaagcctttcctgattgccctcgaatttggtagaatgtgttcagggtggatttcaggggaacaagtctggatgaaaggagttgtcagatgctcaaaaggtcacctgaggagaagaactggagaatgcccatgtcctgtagtagctaaagatatcactggggaccttggtgacaacagttcaagcacagcaatggggctaaagtcaaaagccagtgacatgaagaggccacaacatgagcatttagctaacttggatttgcaattggacctgagactttcagacttactaatatcacattgtgatgcagtagtagcagatgcttcaaatacacctggtgcaatggttcattctgagagggttctgcatgcaaaagatcaactcgttctctaaatagaatctagagatacaaaggaatcagcaatagcctcacgtatttgtacacaatgtagtgtagcttctggtatttttattaccaatc

SEQ ID NO: 475742 - DNA, 521 bp, Homo sapiens
cactcgtttaaattagtatctgttatgctggatactgggaacacacagataattagggcagcatctcaacctgactctctcagaattaaagaaataggagcgatagaattctattacaaaacagtggtggctcaaatcaagacaccagtaggaggggtggagagatgtgactctattggccagacattaagaattgataggatttgctcgttgattggatatagggatgcgagaaaaggagtcaggataatgccatgtttgtttctggctggctcagtgggatggatagtcatagttcatcttggtgggaaaaatgatttcagattcgggcatgaactgagttttagggggatgaagaacccttgtggagatagaaaaagagtggtcacagaggtaggaagagaaatatcattgtacctcgagagagaagatttcgaggaagaaaaacctgctattgagattagattggaagagaagcaagttgataggattgtcagattttgtaagtaaaaaatatagaa

SEQ ID NO: 475743 - DNA, 497 bp, Homo sapiens
caagtttcttaacctctccttgcctcctctgattcctatcatgatgaaaatcattcctaatttccaggattgcagttcatccagcacgctgcttttgagcatcgatgtggctggactacacaagcaggattactctattcttaaagattcccagttgctggttttagaacttaatcccccttccacattagaaatgccctcctttagtgaaattacagtacctgctggtgctgcttgccaaatgaataagcgtgccctggcacctagctctggaaacaaccaagtagaggaatctcttgttagcactgacatctggtggtcactgagaggccagcaccccagcatcttgaacttaaaagtatgcacctgggaaccaggcaccaaccccgacgactccagcagaattgattcctcgtccccctcctctcctggaccacctaccttctccatgcagctggactcagcaagctggagagaaagatcaaggatttagagtc

SEQ ID NO: 475744 - DNA, 690 bp, Homo sapiens
gccagcagttctgtcaccagggccacctaaagaaggaagcaggcatttgcggtgtacgcataccagcaaaaggatggtgcagggaggtcatgggcaagtgcatgcaggcaaagtggcacagggggaggctgcatcgggggcagcacaggtgagctggtgcatgttcatggggcccactctgctggagcactctgccggtcaggtggtccatcagcacaggagctatgatgcaggcccccaaggcaccagaggctgccttgcaagcaggcacatccaggctgggtcccagaagaggccagcagaccaaggggtgctcaggtcaaaatggccccagagaagagaagatcctttaaaggacaatgctaatattatgggaataataggcatcaaaggaagaaataagaagataatcaaatgttatccaattcctttctttattttacctaaaattcagaaaagatctaatgacaatcccctcagcaaacactaaactttcctgcaacaaaccatatacaagttgctcctaccatgtggcttttaagcctcatgcacaccgacttttctagagcattattctcacgtggttgctcctcttatgcctccagtgcaaatgagatggaagttaaataagagctttcttactttattgaattcccattgataaacatctcccttgcaatcgtcttggct

SEQ ID NO: 475745 - DNA, 785 bp, Homo sapiens
tgagataaactgggtacctcagttggaaatgcagaaatcacctgccttctgcattggtctcgctgggagctgcagactcgagctatcagaagtccgcagccctcaggcctggaccagtactgtccctggtgccaaaaaggttggagactgctgctttagatcattgggaatgagtacaatttgcaattgtgacaaattgaaaatacaaatgcagagttcagaaaagaggaaaagctgtaaaggaaaaacagtaaatcttcaaagaagcagtctgcttaaatttttaaaaatgactaaaaaggaaagtgagcaggcttttatcagtgtaccaaggctatattccatggtatgtcataatatttattcttttgcatacaccttcaatttccttgcctcttcttcctttatcgtgctcacctggcaaaacgctagttccagcgacagccaaatctctgctggctctgtgcctgcactcacgcaggggaatatggctgcagactatactttcctggtccattaactctcccatgcatctatttggtatcttcttatttctccttaacctctattacatcttgctgcaccttcactgtcagctgatgaccttgtcactgagaaaatgaaagcaatcagaaaagaactaccattggctttgttataaataaagtttcggtgctgcaaaagaaatagcacttgaatataaaattttctttttaattctcagcaaggcaagttacttctatagaagggtgcgcccttacagatggagcaatggtgagtgcaca

SEQ ID NO: 475746 - DNA, 667 bp, Homo sapiens
catgtacatatacacatgcacgcacatgcatacacgcatctctgccagctaccagcctacaaaacctggtcttcagtgctttcaatcatcctcaccaccaccaccatcactatcacaaccaccactatcatcaccaccaccatcaccattgccagcatcatcaccatcactaccaccactaccaccaccgtcactatcatcaccaccaccatcactatcacaactaccatcacattatcagtatcaccatcaccaccatcaccacaaccaccaccatctccatcactaccaccaccacctccactaccacctcttccaccactaccactactgccaccaccaccatcactatcatcaccaccatcaccacctccaccaccaccatcactaccagcactaaccaccaccatcacctcaccaccaccaccaacaccaccacaacaacaacaactatctgggtatttttattgtccagtggccccagattgggtcactgcttcagtcaaccccactggaaaatatcaagtcttagtgtggagtctgagggttgagagaatccggacatatacttagaaaagcatggacaatagagtttttatctaggctccattatttagaaacttacagaatacctgatccacaagcatggacaatttagtaactgact

SEQ ID NO: 475747 - DNA, 827 bp, Homo sapiens
gttatgcaataggaccttctgcaataatagaaaaatggtgccacactatgggatcccagagggcaaggacagcacttcatgtccttcacatgccccagagtgcctagtaaagtgctggatacatggatatgcacaaggaatagttgttgagttgaatttgtctgaattaaagagaggaatcaaaggcaaccccgctggtggcaaggctgcagaaaaccttgagaaaatgaaaaggagagttggtttggggaagggggagcagaaacaaaggatgaaatacacatttttctacagtggtattgtgagtgatgttcatgtgactgagcgtccagccagagtgggcatcctgctggactacaacaaccagagacttatcttcatcaacgcagagagcgagcagttgctcttcatcatcaggcacaggtttaatgagggtgtccaccctgcctttgccctggagaaacctggaaaatgtactttgcacctggggatagagcccccggattctccgcgggtgaaggggaccaagtgccagcagcatctgccgtcaggttggaagcagctctggaataaaggagaaaaccaccataatggaaagaaccaggttctagatagatggtgtttaaactgtgtttctgagtactggaattccatggaggtgcctgaaggtcaatgtgggatccaacaggaaggccaagtgggcatacattcaaacccctatctcatttcatcacactagctcaatttttatctatattacacattggattccatattataatttatttgataaaacaccttctatggtcaaataatgtttgaaaact

SEQ ID NO: 475748 - DNA, 700 bp, Homo sapiens
caatttcccttctcacaatttaaaaccatcatgcatcaacttcctgcttttattcactggaaaattttaggtccatcttcaagtggttctcgacttggaaatcagagggagagagctcttttgggctcttcatgtagaagctctcatagagtttgtttgctgctaaccacgttttcccagatagtaacaattgaaggcgattcttcctgtctgagccccctcagtcaattgcctggagttcttgacactgaggctcatcagccagggcctgttggaagtaagcagcacagacacagacctgcactcttctatcatctcctctggacccaggctgatagagcaggctccgtccagaacatcactatctcttgcaaggtgatggcagtaggcaaggggtggggggtgggcagtggagagctcagtgaaccacttattggctcttaaaacttctgtttgaagtgatacaaggttcttctgctcagattccattggtcaaacgtgggttagagggaaagggaaggggaggggagaggaggggaggggaagggaagggaagggaagggaagggagaaggaaggaaggagaagggaaggaaagaaggaaagaagggaaggaaggaaggaggaaagaaagaaagaaagagagagagaaagaaagaaagagaagaaaggagggagagagagagagaaagaaggaagga

SEQ ID NO: 475749 - DNA, 630 bp, Homo sapiens
acagtcacctggagacaagttgcagagctaaggaaaatgaggctaagccgtcgggtggttgcccaaattcctacagctgggattcaaccagtttattctcgttgccagatcctggaaatagtggcagctgctaagcttaagtggagtttgaccaaaaagctttatggtagagagagagaagtgggcagagctggagcaacacatggtttagaaagccctggtggtaaatttcctgatgtactggatttcattttgggaattagtgtagtgcaatggaaaaaatgtgaactctggagccagccagactgggttcaaattctggccttaccacttaccagctttatgaccctgagcaagttactctgccactttgcacctcagtttcctcatctgatatatggagatgatgataatggtacctacctcacaaagctattgtggatgaaatcagttaattcatgcagagtacttagaacagtgcctggaacatgcaaacattcaagaagtctcagatgcaacttttgtaccaagacaaagatctaatccataggaacaaataataaagaaaattgaggcaaatgtcagggtggttgtgatggtatttggggggtgggttggccttgactgaag

SEQ ID NO: 475750 - DNA, 471 bp, Homo sapiens
ggaacccattacccccattaggtgttctgcatggaagtaaaaaatggaaaatagctttggggcagctagtatgtccagggcccctgactgggccctagagatgcagcagggagtaggactgcggtcgcctctgccctcatgggacctagagtctgagcttggtgagcatagggcttgcctgctgaacaccaccacagtgatcctcaagcaaaacccacctggattgggaaaacaccaagacacgggcatgaggcaatcctctcatggtggaagccaatggcagtgcctagaagtccatattttgggggaaactgattggcacaagcatcaaccaaccagagtagattcagcattcactctttggttaatgggtggagaggagataggggaagtagttccaaagcataggagaattttactatttaagcagctagtaccattaaccatgcagataaacacaagttgaatgtt

SEQ ID NO: 475751 - DNA, 2409 bp, Homo sapiens
gcggcattcctcaacccacacacaatttagatagttcaatttgactatgatatgtctaggtgcagttttcattgggtccattatccgtgggggttcactgaactatttagatatgaaggtttatagtcttcattatatttgtgaagaatttgcctgtgatattttccagtattttttcttccccagtttttcccttctcttcttatgggattctaattataggtatgtagctcattgtactacaggtcaccgaagttttgtttatttttattttctgtacttttatttggatagctctcattgccccaccttcaagttcactcatcttttcttcagcagggttcaatctgctgttatacccatccagggcatttttcttttcagttattttatctttcagaattacaatgttcatctagctcttttttatagtttgttttattttttcttttgcagagattttccatctgcatactttacattcataatagctgtcttaacttagataactatttttctaatactatttatgaactgacttatgcttccaatcaccaattttagatgttagtgttcccacatattaattttttaaatatacaaatatctacctgcagactctctattctgttctatatgtatctgcctgcttatttttacactagtaccacaataaatttagtagcatgtttatttaatttcttctactgttttctttttacatttctatctgtatatattttataattgagtttgtactgtttatgtaattttttagccttcatttctttacaagaagtcgtatttttaaaaaaattaaattatttacaaacatgacttttagcaactgtataatattccattatatggatgttctatactttagccaattctttattaatgacccatttagtgaatttccaggtgtttttaactattagaagataatgctgctaggaattttcttgaacatacattttttgtttatcttcttaaaatattttaagagcttttaccatatgcattttgattgctttccataaagtctgcttaattttacaattttaccagctattatgagtatagttcaaggatttgagctgagaaattgaattaatttaaaaaaaatttaaacatctattatgtgactacaccagggttcatatgtaaaataaatgtgtgacaaacacagttcttgccattataaggcttttaaggcaataagagggttccagctaagccttttgtgtagatggacagagccttgtgaaaatctccataccaatatctgcattcttaagataacacaaatagaaaacaatgaccaaaacaataaataattttttaaagtttcattgcttctagaaattgtattttttattttacagcacaaaatattcacatgagaatatttttgccttcaaataagcattctatgtcttctgctattactaaatgtagtaatagtgtatttaaaaatccatgagataagttattgtcagtaagacattattagaatatacacattttaatatgcttattaaaatgcatttatatttttatgtttataaatatgtatatttttagaaaatatattcctatattaaaacatatagtacatattatattttattaatttcatctgaaatatttcaatatttaatgaagtaataaataatactgataaaccaatatttgaagttaatattcaagaagaattaaatatgttaataaatgcatattaatctgtacaaacataataaattatcaaatcaaatacatttacttctatcttgactttttaataatatggttatttgaagcattatttaggttgaatattattaaattaggttaagaaaattatattcaataactttttaaaaacaatttctggcaaaataaaatatataaataaaccttcctgttaaagctggttgtttagttatgctatgaattattctagtgagttcaaacagatttttaagtagcacttgagatataatttgcataacatacaattgactcatttgatgtgtgcagcacgttttttagtacattcacagaatagtgcaacccttaccacaattacattattaccagaatctagaatattttcatcaccccttcaccctcatatcctttagcagttactccctatagtctctctacccctcttgctcagccctaggcaacgactaatctactttttgtctctacagatttacctttatggatatttcaaataaattgagtcatataatatgtggtctttttggactggtttctttcacttgcatattttctagattcatctagatacattgacacatgtagcatgtgtcaatacttcatttctttttcttgctgaataatattccattgtaggatatataatcttttatttat

SEQ ID NO: 475752 - DNA, 542 bp, Homo sapiens
agaagaaaacctaagatattaagcagtgaaggttatttgtcagtctgaggctgacatgctgatgttctttctgctgctggcctgataaattcagaacatgggcaaggctgagcccgaggtagaggacagcaatgaccaaaactgtgaggagctgttgatggacaggagggtgaagatatcaagcttcagagctgtcagttccaaggtggaggactggctcaacaggaaggaagttgaaattgacatgaaagtcaccaatgagttacgtgaatggcaggactgcagtaggaggacgctgactcctgctctgaatcccagcaacttccttctcaggactggtcaccgagaagccgagtcaggcttgtttcacaaggcctcaaatggcagaactagaaaggtgcagggtccattggatttcctcaaagatcggagttgccttgggaaagagagcgttctcagtgcaaatgtccacatgtttttgtgcaacctcatgacgactcttgtagaggcattcgagcattaaatgttactgctttcagagc

SEQ ID NO: 475753 - DNA, 899 bp, Homo sapiens
aaccagtgccagcaggggctcctagttcattggtttgctgcagtatgctggaggtccactccagaccctatttgcctggatatcatcagcagaggctgcagaacagcaaagatagatgcctgctccttcctctggaagtttcttcccagaggagcactggcctgatgccagccagagctctcctgtgtgaagttctcaatggtaaggtctccgggtacgcattttccaactctcccctgtttttgggtttgtcgaccagtattattccaggtctggtgatcctcttcaactgccacaaattaatgcagatggtgagccactccctttaccttgggtacctgaccccccctactagtcctccttctgatgatgaggaggaatttgatctctccttgttttctccccaaaaggaggaacctggtgatgatcccctccctctgcctcctatcttggaacctgtatatattaactcttctactaagctgttgccccctctgccagaggaggacgtgtggcattcacctgaatggcttctttcttgttcctctcgtccttttggacttctcccctcttctaagcctactgtttcttttgatgctccgggaccccttctttcagaggtttggaatcctgcttccccccagtccacatcccagtgccctcactctccttctcttcctctgcccctgcacaatggatgtggtctggggtctggaaagctttctctagagtctcggaaagtttatcttaagtgggccctggtacgaggtgtatgtgtaagaatgcttttattatttgaccagactttaatgtcggagaaaacctgagtggggtattaatgggtttgtttgggcattccagcccttgcactcaggcactagtttctccagtactttaac

SEQ ID NO: 475754 - DNA, 1169 bp, Homo sapiens
ctatttgaggtgttctgccaaacgggctctaaaaataattatgatttaaaatgttttttttttccagtgaatatgaacgctttaaaactaagcaaaggaccagagaccttgtatgcagggcagaagctcaatgacaacgagtggcacaccgttcgggtggtgcggagaggaaaaagccttaagttaaccgtggatgatgatgtggctgagggtacaatggtgggagaccatacccgtttggagttccacaacattgaaacgggaatcatgactgagaaacgctacatctccgttgtcccctccagctttattggccatctgcagagcctcatgtttaatggccttctctacattgacttgtgcaaaaatggtgacattgattattgtgagctgaaggctcgttttggactgaggaacatcatcgctgaccctgtcacctttaagaccaagagcagctacctgagccttgccactcttcaggcttacacctccatgcacctcttcttccagttcaagaccacctcaccagatggcttcattctcttcaatagtggtgatggcaatgacttcattgcagtcgagcttgtcaaggggtatatacactacgtttttgacctcggaaacggtcccaatgtgatcaaaggcaacagtgaccgccccctgaatgacaaccagtggcacaatgtcgtcatcactcgggacaatagtaacactcatagcctgaaagtggacaccaaagtggtcactcaggttatcaatggtgccaaaaatctggatttgaaaggtgatctctatatggctggtctggcccaaggcatgtacagcaacctcccaaagctcgtggcctctcgagatggctttcagggctgtctagcatcagtggacttgaatggacgcctgccagacctcatcaatgatgctcttcatcggagcggacagatcgagcgtggctgtgaaggaaaagcttttagttttttgtttcctaacattggggtgtggactattactcacaagctggctttttcagctacaacctgtgagtatagatagtactaattaccatgaagtatgaagggtagtgaagatatatgacaaggaaatgaggcagttggaagcctagacaaaaatgtattcagaaggaaatataacaatgaggtgtaagaagtgac

SEQ ID NO: 475755 - DNA, 1090 bp, Homo sapiens
ggagggccaggtgcactcagtgggtgtgagaagaagtgaagaccaagagagttctctgttgaggaacccagttgccatgttattaggactctcaagcagcctgcagaaacgtccacatggggaggcactgaggcgtcatgccaacaaccagtatcaatgctccagccatgggagtgggcccacgtggaagagcatccaagcctcggtcagacctttgaatgagggtagccaactggaagtggggatggagagcccggggacccctgcactgtgggccgtgcaggcctgggctctcaattcactgctgccggagggcctggacctgtggaaaagcaaagaggaaagcagtggtagtgggcaagcgcaggatctggagctgggcgggcagtgggaagtgtgtgaccgatgccagggctcgtccagtcgagtcctgtccagaccacagtacgaatgggttataattggagtttccatggacacagatgacttgatcacaacctccccgagagagctttccagtgtcggccccgatatcaggcaagaaacaagtgcccaccctaaatcaaagcgtctagcagctttgctggacttgatgaaggacaccgttgtccaggctcccacaatcaaagtcaatttactagtcaactatctgagaagtggacaagcagtctaccagatggcaggtggccacattgcgttttctggggccatgaaactgcctgaattgtctgaaggttgtttggaacctttccccacctaattccagaaattgttcctctcagcttcagcatgtggctgaactgggcctatcagacactgtctcctggccttggaatgtagaatgcagttttcctcagagctgttccccaagttcctagtggggcttcaagacatggtgataggtgtcctcaggccagcaacagccctcgtgctcttggctcccctgacgctgcatcctggaatcctttcctgttcccaggctcttcactgtcttcatggcactgtgttccaagggtttatttcagttgtctgaaacaggatggccactgattcatactgaactttctgttttactctagtgtggaatggt

SEQ ID NO: 475756 - DNA, 1135 bp, Homo sapiens
tattttgtagccgtgtgaccttgggttggcagagtacaaaggaacagtcctttctttctggagttctgagcactgtgtgctcctacatatgggaggaacagtggccttttcccatgggaagagacctggtgctagctagcaagtctgttgggttggtggggcccctcacaccctccatccctggccctttcagcggccacctggtcactggcagagacaaagaggagcaccacacaaaagatgtgcccacagttgccatggtggtttccaagccctccccctaccctccactcattcctcctaatcgccctgtgtttcgggcactgcggctgaggcttctacggaccagccatgggaaaaggctactctgcaacttctttagacgacacagtgggaataagagccacctcacaggaacagaaggaatgagggaggtgggctggcctgatcaggaacggagccagcagaagcagacattggaacctgggctccacttcatgggaagaacagaccttactaaggctggcctccatggagatcctgtccccatgctaggcacaaattgcatcagttgatgcttttcatggctttgctggggatgggagggaatatttcagtctggaatttgaagtctttgcacctccacatagaattcaggaatgcaaacatagtgggggtgagccatctgggacctggggaggaggcagcttccctggggatgggagcagcaggcagattgaaggagtctgggctcctgacactgtgtgcaatagccatggcgccagcctgcactgatggtgcccaagttgtggtgcaagagagaaatagacgtctctcttatttaggctactactattttggatctctattcatagcagccacatctagatcatcaattataattcttaatttgaaagttgaatgtatgcatttggagaataaggaacgtgcctaaacaaaccaccttctggttttggcaacccaaaacatgtttgaatttggaggcattccttagtgagtaggaagaatggaaggctttccaaagcccttccagtgtgcaatgagttttaactgacgccctgtaaagcccccctgggtgttcctcagatctctctcctcctctctgtgttggaat

SEQ ID NO: 475757 - DNA, 1402 bp, Homo sapiens
gctcacgctgggagctgtagaccggagctgttcctattcggccatcttggctcctcctggggccttgatcttaaggaggaggtggatgagcacccctgcgctatgggatggccatggctagtgagtggtcagagctgcccatgagtgaggagaggagggcatctcaaagggcaggacagggatagcccagggacatacagggcccaggacagatgagcttatcccaatcagacgccacttgcacccagtactgcccccagccggccctttcccagcttgctcaccttctcagaggctccagcctgatcaatcaccgctggccccaccatgactctggcacattttgcatctttatgtcagaccgtctgtatctacacctacaagactgtcatgattttcttatggatcatggactgctggaatgaagtcagtgcaggaaagaagcttgttcgatcgacagctggtagacatgaagcgtctcagaatgaggaacgcatcacaggctgtccctgtgtttctgtagaaactttacctacaaaaggaaaaatagagcacaaagccctggacagaactctctgtgggactctgcccatgtttctgagatatcgcctcaattgtcctggctgggctgtcgggtctgcccgttttacagatgggcaaactggagtgggaagtatccgggtggcttcctcaggcctgcagctggtggagcagctactgaaacaatcagaatatcctgttctttgctggattattcagcttggctttcaaactagccccgggtttagggttaattctctcaccttctctggctttgaagacccagacatggtgtgctgagaaatccaacaactcaatagttttccttctgcctttaactcagccatataaatgagataaagtgtgcaaaactcttactgtgtgcacagtaagtgggagccagcagtggaatacatgctacataaggcgccactttatttagctgtattttgtcagtccaagtgaagattttaattgcagaatagtgtcttgctagcaaaaatgaacctgcttagagtcaagtttttaaaattcaagtgaataaatgaaaaattgtaagaaagattgttaaagaagcattcattttaagaacatctcagatatgaaaaacttagaacttagatgtcagaatttcagtagcgatgaatcccatggcaaagcttccatctcatctgtactaattggttcataaattggacacgtgggcttccttttgtgtgtcttcaggaagttgaggcctgaggaactctgaagccaggagcttcctcagcccctctgctgctggatggaggtgctgccagtcaggggcccatcttcaggacactggcacagggacctcctcaggccgggccccttgtacagc

SEQ ID NO: 475758 - DNA, 707 bp, Homo sapiens
gcggggaagaatactgggaccgttatgtccaatccctggatgcgcaccccacatatctgcacatggctacatgtacatggctcttccgcaggcaaagcctcgctctgggtcattgagaaacccaaccatgaccccaggcgagggctgccgctcccctgtgtgttggtgtgtcagtacctggaagataaagtatataaggccatgtgtaagggctgtatctgcccatgggcaggcacttggctggacaagtacctctgtctgcagaaggtggagacagctgctgtactgggccagggaatcaaatatttgccgacagccaatttccatgtcagggagaacctgagtgttcttgacaacttcagcagccacagccacaacgagctgctggcctcctgcgggaagaagttctgcagccgagggagccggtgcgtgctcagcaggaagacaggggagcccgaatgccagtgcctggaggcatgcaggcccagctacgtgcctgtgtgcggctctgatgggaggttttatgaaaaccactgtaagctccaccgtgctgcttgcctcctgggaaagaggatcaccgtcatccacagcaaggactgtttcctcaaaggagcctgacggatggaaggcaggccagccctgaggtgagtgccttggggtgagcacgtcaccttcaccagaaccatggctccaggggggagtagaac

SEQ ID NO: 475759 - DNA, 497 bp, Homo sapiens
agcgagggctctgaggattgccagcacgctgacattgggatgacaggcacacttataccagatcttcagagggaaggcattcagaacagatggagagaaggcacagatgctgaactgaagggggagaccccccatgaccaccaaggacacttgaatttgaaaggaatgatgcttaaagaactggcagaagccaagaagttctttgaaactaatctgaacacagatgcaacatgccagaatttctgggacacaactaaggcagtattaagaaagaaatttataccactaactacccacaacaaaaagttagaaagaattcaaattgacaacataacatcacaagtaaaacaatgcgagaagcaagagcaaactaactccaaacctagcagaaggcaagaaataacaaaaatcaaagctaagctgaaggagattgaggtaaggaaaacatttaaaagatcagcaaatctaggagttgtttttttgaaaaaaatttagta

SEQ ID NO: 475760 - DNA, 1060 bp, Homo sapiens
attgtgagcagcctgagagaggcagggccttgccctgttcactttgtactcctgtcatgtggcaaagggtctatttattactcagagggaattcaataaatgatgtggtgagaaacttgctcaagaagtgggtaaacactttgatggcagaggccatgtcccgtttccttccactcacaaccaaggaaggtcacagaaaggtcccacttaaattactagttgagtccgctatattttgtatgaaatacatacataaaaagtatgaaaacagcctcttcttttgcataacctttgagaatttccccgatcaaatcctgcagctggacaacagtgatgccagtgcttgtgtctgtgaggccctgctcactcgcatcccttcagggcttcacagcatttcaaaggaaaggcattggataaaggagaaagcagcagaagtggaaaggacacagatttcaaacattctgtttcacattggctacagagttttgtttgtgcggggaaaggggtgagtctatgcataccaggtaccacccacctgtgtgctccagaaggcccgtgatatcctgcccagttgctgaaatctataaaatgtcaggccaggtagcagcagggtgaaaggctggaagcagccagcaaaggaaaggaaaaatgttacagaaaattataggttgtaaattccacccagtgcatttagctccatccttgctgagggtcagaggaatggaatctcaccagtcatatttcatgaggtctttcagcaagttcctgtactgtgtagagatctgaagggcaaaaattcaaaaagtcagcagggcacaaatggaccagagagggatgggcctgaagggttaaccatttgccctggttttaagaaacagatgtcctagcagaagggtctggggacctcccaacaccatgaatgagttgcgccaacactagagagtgtgacaatttcagttcaagcttggatgtttagaacattggagtttttgctttcccagatgggaatccttaaatgttgcaatttcttctttaaggcaaattagaggaatcgagctcc

SEQ ID NO: 475761 - DNA, 507 bp, Homo sapiens
tggtttatatctgtaatgcttaaggatgatttctgacaccagcgtctgcacacacagtcacccctcccaatatgtccacgaggctgtgtggacaccgaacacatccctgcacagaatcttcctttgaggaccaaaccattgcctgtgctgttcttgaagccagatccacccttagattctgcagcttcataggcctttcaggcttcagccagcacaagttgggtttctacaactcagaattgggactgatggtttgtactattactatccgcatcctttttcagacagtcagccacttcacattataccaagatagattaggcagggaactgagagatccagaaaacatctgctacacaaaatcaaaattaatggtaaacagaatgcagttcttgatagctgaagttcacccagatgcagagaactataaaggggctattggaggcagctgccaattagggaccgattccacgggttttcagaaagtgaggctctagtttcacactc

SEQ ID NO: 475762 - DNA, 668 bp, Homo sapiens
gtaaacagaatttcaataggtggtgaagtaactgccagccaaaatgttcaccgggaatgggcctgtgtcacaatctgtgaggggaaaagacggatcaggatgctccaaagctgttgcctatggcagtgagcagggatggactgccaggtccctcaagcacccacttctttctgaattggatgtctgttctggaccagccctaagccagttcatgctggatgctggcctccaaggagctccggtgtctttaactcaccagcctagatcaggatgcagtcatttgtcatttcttcaacagactcatcaaaatgaaaccaggaggcttttggctgcatctcacactgctcggagcctccctgccggctgcgctgggatggatggacccaggaaccagcagaggcccggatgtgggtgtgggggagtcacaggcagagaagaaggcaacctgtgtggatacagacaagaggttgataacacgacacagtcttatttcctggaagaatcaaaaccagcagagtttcctgagactctaaataagtgaaaaacctttttcaggaaccagatattaaaatgtttctgcatttcttcccagtagtagtacttcacacaaatactcattgacttaagatttttaaagtacttagaaagcgttaataagatttgattta

SEQ ID NO: 475763 - DNA, 1708 bp, Homo sapiens
aggactgcagaggcaacaggaatgtgtatggtcatcaaggtggctgtggtccgaggacacatgcccaccatcctggcagcagggtggcaggtgtatgtgctgagactggcctgcactcaggctgttctctgcactggccacctcaggcccctcgccctccccatcttcagttgttcagatcccaccattcttcaacattcagccaggatgacccctcctccccaaacccccactgattctgtggctcctcctccagtactgtggctcctcccctggttctgggctcctcccccggttctgtggctcctcctctggttctgtggctcctcctctggttctgtggctcccctcccgggttctgtggcccctgctccggttctgtggccccctcatcaggttctgtggcccctcgtccagttctgtggctcctcctctggttctgtgactcctcctctggttctgtggctcctcctctcgttctgtggctcctcccctggttctgtggctcctccttcggttcagtgtctcttcatccggttctgtgactcctcctctggttctgtggctcctcctccagttctgtggctcctcctctggttctgtgactcctcctctggttctgtggctcctcctcttgttctgtggctcctcctccagttctgtggctcctcctccagttctgtggctcctccttcagttcagtggctcttcatccggttctgtgtctcctcctctggttctgtggctcctcctccagttctgtgcctcctcctctggttctgtggctcctcccctggttctgtggctcctcctctggttctgtggctcctcccctggttctgtggctcctcctctggttctgtggctcctcccctggttctgtggctcctccttcggttcagtggctctttgtccggttctgtgtctcctcctccggttctgtggctcctcctccagttctgtgactcctcctctggttctgtggctcctcctccagttctgtggctcctcttctggttctgtggctcctcctctggttctgtgactcctcctctggttctgtggctcctcctctcgttctgtggctcctcccctggttctgtggctcctccttcggttcagtggctcttcgtccggttctgtggcccctcctctggttctgtggcccctcctctggttctgtggcccctcctccggttctgtggcccctcctctggttctgtgtctcctcctccagttctgtggcccctcctccggttctgtggctcctcatgaccttgctgttatcacagctctacagctggctcccaccatggtttagagaaaggcctcagctccacgaggcaaacaggcaagagcttttttttgtttttttcctctccctgaaaatcccataatttggggtcacttttggctctaaggatgatgttatcttcagccacataagacattcctgcttcctctttgccttccactatgattatccagtgtctgcagatcccagtggtcaaggcttaggagtagttttgcagtatatatatggatgtatttgtggcattttgcagatttctttctcaagaaggccaagaaccgtgttgatcacgtggttccaggaccttccagggcaggatacagcttcccaactcagtaatccctttccaactgaaaacttagaatgccacagcattcacagatttccacttagaga

SEQ ID NO: 475764 - DNA, 1086 bp, Homo sapiens
cctccttcaggaacgtgagacaggcaggcgccgaggacccctgactcagactctgttaatgcaaacatgttctctgagtctccaggtcccagacgccagggaaagtgtggagacacagggggacggcggcaggactgccgcatgtagctatccccaggacacgacctaagctgactcccctgctagggccctctgcccagcctgttctctgagatttgccccaaggctatggcgtgggggttgtttgctgccaggagaaaggcactgatgcccagcagctcatacagaccctgcgaggagaagacaagtgatggcaggaattgcagggagagaggtgactgtgatttcatcccagttggaaaagacaatgcagatgtccttagccagtggcaaggtgtcagtggtaccttgttgacattgccgccttgtgggcatgaggaggtctccatccccttcccaagcatgcagttcctctgcctccatcaaacctggagcacacacaaaccgtgcacagcgaagtgcttagcagagaaacaagcaatcacctttggaaaatctttgtgtgctattttggaagacttgaatgaattcctggagagggtcccccatgcagaaagattgacaagcgagctgatttatctcctcgttatacttcagttctttttggagtacgggtgcttgcctccaggttgaactcctcattctcaaatcctgtgtagacttttagcctggtagctctggcttgaatagccagctttagaatcagttggtaaaataaaggttgactttgctgctgctaaagttgaagaaagcagatgggcctgtgagcacatggagggcatctcaagggcccaggagctggcagcctttgggccctgggacctttaccttcagaggttaattgtgcagagaccagcaagagtccaggaccctgtgatggttcagccattctgagactgaggactggaaaatcggagtgtttattgcctccattttttatatcagcaaaactttaattacagctctcactaaacctactaccttctgccagcatttacaaggcaataaatttccccttctctcctt

SEQ ID NO: 475765 - DNA, 495 bp, Homo sapiens
ggggcaagcaagggtgaaacaaaatggcgaagattcgtcaaagatgttcagctgcacaaggatatgattggattcgtgaccgcaagttggcttgggacaacagatttccagggagttggaacgcgaagctgttccaagcacagttggcaaacatttttccaagaaataaaaacaccttaaaatgcaaaggatcaaattccgaccctttagttctctgtgaagttaggcaagcaaagccaccacggatggagcaattagagactaacagaacaggaaataatcaaagactcaatggtatattaagatccacaggaaagatgcaggtcacaagctctgacagatctgtagtgaaactggaccactcctcacctttgacccttccccactccatctgccactccccacaccctggatctttaaggaaccttccagtcctaaaagctagtgcattgtagataatgagggtagtctttcaaattatgtaagagggatgaa

SEQ ID NO: 475766 - DNA, 933 bp, Homo sapiens
aggccagaggccaacagtggcgcgtctggagtttgttccttctgatgttcgaatgtgttcggagtttcttccttctggtgggttcgtggtctcgctggctcgggagtgaagctgcagaccttcgcggtgagtgttacagctcttaaggcggcgcgtctggagttgttcgttcctcccggctcgtggtctcgctggcttcaggagtgaagctgcagaccttcgcggccccaccagacccaggagcccagctggcttcacccagtggatcccacacaggggctgcaggtggagctgcctgccagtcccacgccatgcgctcgcactcctcagcccttgggcggtcgatgggactgggagccctggagcagtgggccgcgctccttgagaggctcgggctgcatgggagcccatggaggcgggggaaggctcaggcatggcgggctgcagtcccgaggcctgccctgcgggaaggcagctaaggcccggcgagaaatcgactgggggacccagtacaccctccgcagccgctggcctgggtgctaagtccttcattgcccggggccggcagggccggcccgctgctccgagtgtggggcccgccaagcccacgcccacccggaactccagctggcccgcaagcaccccacgcagccccggttcccgctcgcgcctttccctccacacctccctgcaagctgagggagccggctctggccttggccagcccagaaaggggctcccacagtgcagcggtgggctgaagggctcctcaagtgccgccaaagtgggagcccaggcagaggaggtgccaagagtgagtgagggctgagaattaacatacactaaccaagttcacaagaaactaatatataaaccaaaatatcaacttattctatttctaggggtatgattgaaaccaactttgcaaagatt

SEQ ID NO: 475767 - DNA, 579 bp, Homo sapiens
ataaaaacaaccaagtcctgttatgttcaacaacatgaatggaactagagggtcttacctcgatgttgattcctggcaaatgatcagtgtgtttgttgctgaaggccgtggtggctttggcaattttttaccatcagacagtgaagttgctgcaccactgacaattccttttacaagaggttgccctccaaatatgtctagttataaagagaagattttggggccagttcttgtgggtctggagacagaaacattggataaagtcatcaagatcataaataacaacccatatggaaatgcaaccgacatcctcaccaccaatagagctacaacttggaaacattcccactcgtgtggtggaagtcagagaagtttgtggacaaactttcagaagattcttaaagccattcaccatctcttcagtggagatagtaaacaatgatcagcactgcattttatttaaagattgtccctctaatctttcacaatgctccatttctgactcagtaatgaaagatcaggggtggaaaattgggtagaagatttagcatatgacaaaataaactgattgattttcaa

SEQ ID NO: 475768 - DNA, 1387 bp, Homo sapiens
ctgccatcacctctctgcctctgcccagtttagtagcaaagcaggcttctctgcattgagtgagtctgaatgggacattagagggaggcagtgcaagctggagacagggcaccagcctggccaggactgaaacccagaccctttgctggcgggggtcactatgagcagggcctttccctctgggcatctccggagcagtggggctatgaataacctctgcgctgacccatgtccttgcctctctccatagactcgcctgcaggctggcgttggctacggaaacaccctcagctgcatccgcgtggtgtacaggagggagagtgatcccccttggccacagcctgacttctttccagcccaagatcactgcccctcccggcgcatgcatggcatgtgtgggttccaggccaggacacaacccacaggaaacaaagcggcctgcagaagccgggctgtcctcggagcaagaatgcctgcccctgagtggttccccaccccctacctcctgtcgcatcagcaccctcttcccctctcttcatggacacatgggcagatgtgtccggtggtgtaccccgtcagcctgcaggctctgcgacggcagcccggggtcctcacgcctcttccttctggttttcactgcagatgttcggcttcttcaagggcatgtccttccccctcgccagcattgccgtctacaactccgtggtgtttggggtcttcagtaacacgcagcggttcctcagccagcaccgctgcggggagccagaggccagtcctccccgcacgctgtcagacctgctcctggccagcatggtggccggcgtggtctctgtcgggctgggagggcccgtggacctcatcaagatccggttgcagatgcagacacaaccgtttcgggacggtaagaggccaggggagcggaggctggtgtctgggacttgtggccctttcctggtttgtgggatctgggacatggttgttaaaatccttttattgagcaaggcatctaccttgtcacctagtagtccgtaattacaggcatacctcggagacatgggtttggttccagaccactgcaataatgcaaatatcacaataaaagtcacatgaactttttggtttcccagtgcatttaaagttatgtttagactatactgtagtctaagtgtgcaatggcattatgttttaaataagtatatataccttaattaaaaaatactttagtactaaaaattattgacaattatctgagtattcagcgagtcgtaatctttctgccagaggagggtcttgcctcgatgttgatggctgctgactgatcagggttgttgttgctgaaggttgggtgggctgtggcaatttcttaaaataagacaacaatgaagtt

SEQ ID NO: 475769 - DNA, 733 bp, Homo sapiens
aaactggaatacacaggctggctccttcttctcatctagcccttgcaaacgaatattactaatgatgactgagcctcgtcatgaccagttcacagaactactacagtgagggcatttatcgaatgtcaccatcttctgttacctcatttgctccaaatcttcagccctaccatgatgaccctgtggagtctgtgaacacgattaaggcctgttggagcttctttcagtctctagacccatggagcagagttcattttaataagcagagaagttatatgctgaagatgagccctgaaggaggaaagggagtgaccctcacagataactgtggaaagagcattccaggtagtgggagcagtgagtatgaaggccccaagggtggattgggcctggaaggagatctggaattcactgtggacatgtatgaggtgactattaaaatcaacgaggagtccagtagacagctggatataaacatctgcagttcaagtgaacttgagtcatcatcttcttgctggtggaggatctcgtcttgatgttgacggccgctgactgatcagggtagtagttgttgaagattggggtgtctgtggtaatttcttaaaataagacaacagtgaagtttgcacacggattgactcttcctttcacaagagatttctctgtagcatttaatgttgtttggtagcattttacccacattagaacttctttcaaaattggaataaatact

SEQ ID NO: 475770 - DNA, 594 bp, Homo sapiens
ctcccggagctaggaaagagcagccttttctccggatttcccatccgcgctgagaacaaatgacatgctgatgtgttcaatcagtgtcatacgtggtagctttgagagtaagtgccagaatgtgtcagggaagctatgggatggtggaaggagttggggctgccgctgcctttctcctgatgaacaccaatggcggggccttctgcacccttgggctcagagcaggaagagaagcgtgtcttctgtgtctcccccttcctcaagccccacacacactcagggggcacttggtacagtccctgttcttcggagcacccaccccaaacctcccctgaaatcaaagatggctgcccgactaaggaggtgttttcagttattcagaacacctaacctcactgagaccagcagggttaaacaacctgattctatgtcagaacacccttctcagttattcagaacacctaacctcattggatcagcagggttaaacaaactgatactatgtcagaaaatctaattgagtcattgtttggcttaagtcatttctcatccatttatccactagacctcccacaatgaacactctagttctac

SEQ ID NO: 475771 - DNA, 1456 bp, Homo sapiens
ctcaggactcagttgcaggccatgaggagggggtcccgtgcagccagggggccccccgggaaagcacccgagttttgcatggcacagccctgtgttcctggttataggggcaggttccctggcacacagtgtgggagggcttcctcccaaatatctttagacacaggaagtggcatctctgtcctgggctccatgcctctggggaccctgtgctttggggtaacttccttgaaattttctaagccccttggatgcctgggaccagctggagccatcattgacagcgaggcagggtgccccaaacctagaccaggactcatatgggccctggctatactcgcccttgggcttctactgagtgtgaaggcccaagtgccagtcaatcctgttcattcatgttctgattatggggcaccagagggtggtggaggtggtggccggagtcctttatcctgtgtgcttcctgctgctgcagccagataggatgtcaaagagcaaagaccctagaaacaaatgcattcatcatttttgtcccatcacacagatgttaacttgcatttggattcaaattgacattttaggaaataactagattcacagtctgtggaaattgccatcataactctttaccatatagaaacaacatcaaatggaggaagaggaataaatttttttttcctgaaactctaacaaattcacattttagtctagagtttaaattatttcattcatgagggagcttctctctaacttctgttctttccaggctctgtcacaatcccatgctacttagtagacacaactcgagtaaggcaattagctcctttgatttaaaactggcaagaaacattttcctatttcattttctgcacttggataaatgtccagttcccaatccatcatcaccaacaacttaagattccaccatttagttcccgcttcaaggagactgtcctgaaccatgaaagcaaagctgccatgactcacacttcacataaaacatgtctggatgtttgggaaaacagccaaaagcacttaatataaccttacgataggagatataaggtagttgggaatacaataggaggattcgttttaagctttgaaatactttttatctgataatcttttaagtcttttttggattaaaaagcaatgcacattgacagctgacaggaaaagaatttcaatatctaagtgttcacatatgtgaaaaaaattgaatgtggactgaaagcacgcatttgaaataaatcatggctaatggacaaaagaggatcttttgcctggtaattattttccctagattaataagggaacaatttaatctgggtggttgtagtaaaagatttaaaagctaactacttattgttgtcagcctgtggttttgaaaatcagaaaagaacttgaaaaatggtttcctagaatctctaaggaataggggagagggggaagg

SEQ ID NO: 475772 - DNA, 669 bp, Homo sapiens
acagaagctagctggcctagagggatgtggggggatattctgagtctatttaaatccctaaatctgaaccttgtgaggatggctggagacacaccccatcttaattcaagagcctcaggcaggaaaccagtggatgatgaaaaatgcatgtatttggcagaagatgaaatggagaaagcactctcctcttcctgctcaaagggaactctaactagctgccttccgaagctgttgatgtatggtgtcctggattttgaaagcttccatttcaggaccaggcagagcagctgggcttttaaatgggagacttatgtgatctccccagagtccaggggtgggaagctggaggacaggggccattttccgagaaagcagaagggaccacttctgcccccaatcccgaggtccagctctcttgttccttccacattcaactgtaattgagcatgctgtcttcagagggccagggctccagctcagagaggcacagccattctgggttctgctttttaagggagcttatttggatttcttgcccagaccaaagacccctgaaaagggtacctggtgaccttgtgggggagggatcctggcacctgactcctggagggggggccaatgaagagacagtgaataaatggacaaattagagatgatttaccaaatggc

SEQ ID NO: 475773 - DNA, 620 bp, Homo sapiens
gcacactgctcaaagttgctcattccctccaagtcatgttctcatgaggtgtgtctgcccctggagccagcacaaagcaccagagctccacctgcatcagctgccaaatgtcaatgagggcaccgaggagaaagatggtccaggtggaccacctcctccacacctatccctttcaccaacaaatcattccccacctccaaactcaattgcaactccttctgaagctttttctggattttccaacctcaggaaccactcccttgttcagatcattcagcactttcggtcaattccaaactgtctcacaaaggagcttgcagtattttacccagtttgtggagttccatttgaggattgctgggggttgtggaccatccagagatctttccatggtaaagatcaagcatcgtgggttgccatgatctattgtcaggtggcagctgaggtcattgatttgtaatttttctttttttctaatatagtgttttagtgatataaatagcattaaatttatttagcagcatctcacaaattataacacattatgttttcatttaattcatttcaaatactttctaatttctcttttggtctttgcctaattcatgtgttatttagaa

SEQ ID NO: 475774 - DNA, 1534 bp, Homo sapiens
agaaaaccagaaaggcgcattaagcatgaatgctaaacagctatttctcatcagctttaaattaaaagcatgttctgggcagtccttggccttcgacagcctgcgttcatatcaagttctggtttacaagcagctgctgtgtgattctgggtataacagttatcttaatcttcctgcagacttctatagccccagactaggaaaaacagaagatcctgactttgagtctcctaaagaggctgaacagctgcagaagctctccatcaaagagttgggctttgaaacaaccgatgaatgtatgaggagccattttgagcaatggggaacgctcacggactgtgcggtagtgagggatccaaacaccaagcactccaggggctttgggtttgacacatatgccactgcggaagaggagtggatgcagccatgcatgcaaggcacacaagaaataccatcctgtgggaatggctacaactttgaagtaagaaaagccctgtcaaagcaagagatggctagtgctttatccagccaaagaggtcaaagtggatctggaaactttggtggtggtcgtggaggtggttttggcaggaatgacaactttggtcatggagggaacttcagtggtcatggtggctttggtggcagccctggtggtggtggatatggtggcagtggggatggctataatggatatggtaatgatgcaagcaattttggaggtggtggaagctacaatgattttggcaattacaacaatcagtcttcaaattttggacgcataaagagaggaaactttggaggaagaaggtctggcccctgtggtggtagatgccaatactttgccaaagtacaaaaccaaggtggctatgccagttccagtagcagcagtagctatggcagtgtccgaggattttcattactgccaggaaacagcttagcaggagaggagagtcagagaagtgacaggaaagctacaggttacaacagatttgtgaactcagccaagcacagtggtggcagggcctagctgctacaaataagacatgctttagacaaatactcatatgtatgggcaaaaaactcaagaattgtatttgtgactaattggataaccagtgattttagtttctgttctgtggaaagtataaagcattccaacaaagggttttaatgtagttttttttgtttttgcacccatgctattgattgctaaatgtaatagtctgacatgatgctgaataaatgtgtcttttaaaaaaatgttctgtgtaaagttagtctactctgaagccaccttggtaaacttccccaacagtgtgaagttagattccttcagggtgatgacagattctatttggaatttatttacaatcttctgggtagaaaagccattgtcttcagaaaccttggtgtagttgacctgatggttactgttgtgacctgaagtttgccattaagagggaaatcatgaattatttgttataaagatgattgttagcacatcctatggaatacatctaaattgattaatggt

SEQ ID NO: 475775 - DNA, 510 bp, Homo sapiens
aaaggacacatccgaattctctgatgtatggggcctgacgtcacacacccgcatccacattttccttccatggtgccgcatccttcatccattttgaacttattccagaaccaagctctgctcttctctgctcctttgcctctgcctatcttttcttcattaccaccacttaggatttcttcttctagcatatctgattttcccttcaccgctctggttggcacctccccgtgcaagtccccttattggcagacttgcagggaggtgtggagggagaggcgtgagagggaactggggctgcgcatggcacttgagggccagttggagttccgggtgggtgtgggcttggtgggccccacactcggagcagccggcgggccctaccagccccgggcaatgaggggcttagcacccgggccagcggctgcagagggtgtactgggtcccacagcagtgccagcccaccagcactgccctcgatttctcactgggccttagctgccttcccat

SEQ ID NO: 475776 - DNA, 554 bp, Homo sapiens
tccctgacttacctgaaaaagaattcaggaggaaacttttgacatgcttttagaaattttagatgctctggaaagtctcagcaatagaattgaacaagtagaagaaagaaattcagagctcgaggacaaggtctttgaattaacccaattcaacaaagacaaagaaaaaagaataagaaaatataaacaaagcctccaagaagtcttggattatgttaaacgaccaaacctaagaataactggtattcctgaggaagaagagaattctaaaagcttggaaaacatatttgggggaataattgaggaaaacttccacagccttgctagagacctaaacatccaaatacaagaagaacaaataacacccgggaaattcattgcaaaaagatctttgcctgggcatgttgtttgcaggctatccaaagttaagacaaaggaaagaattttaagacctgtgaggcaaaaacaccaggtaacctataaaggaaaatctatcagattaacagcagatttctcagcagaaactctagaagctagaagggattgatgcccta

SEQ ID NO: 475777 - DNA, 912 bp, Homo sapiens
ttgcacgtcattctcagacgaaccgatgactggatggatggccgccgcagtcgtcacactgatgatacggatgtgcttctccgtatacaccatgttatcggagagctgccaacgtatggttatcgtcgggtatgggcgctgcttcgcagacaggcagaacttgatggtatgcctgcgatcaatgccaaacgtgtttaccggatcatgcgccagaatgcgctgttgcttgagcgaaaacctgctgtaccgccatcgaaacgggcacatacaggcagagtggccgtgaaagaaagcaatcagcgatggtgctctgacgggttcgagttctgctgtgataacggagagagactgcgtgtcacgttcgcgctggactgctgtgatcgtgaggcactgcactgggcggtcactaccggcggcttcaacagtgaaacagtacaggacgtcatgctgggagcggtggaacgccgcttcggcaacgatcttccgtcgtctccagtggagtggctgacggataatggttcatgctaccgggctaatgaaacacgccagttcgcccggatgttgggacttgaaccgaagaacacggcggtgcggagtccggagagtaacggaatagcagagagcttcgtgaaaacgataaagcgtgactacatcagtatcatgcccaaaccagacgggttaacggcagcaaagaaccttgcagaggcgttcgagcattataacgaatggcatccgcatagtgcgctgggttatcgctcgccacgggaatatctgcggcagcgggcttgtaatgggttaagtgataacagatgtctggaaatataggggcaaatccaggaaataagaaagcctgtggcttttgcagactgtgaaaataaatgaacagtttctttaaaaagcaaaagaattcat

SEQ ID NO: 475778 - DNA, 597 bp, Homo sapiens
gagttaatgggtgcagcacaccaagatggcacatgtatacataggtattaaggacaacagactgggaattatcaagataaaaatgacatacccagaaaatactgaattctccagtcctcaaaaatctgtgaatttctggtacgtgctggtgatgaatgatgagcacacagagaggcgatatctgctgtttttccttctgagttggggactaccagcttttgtggtgattctcctcatagttattttgaaaggaatctatcatcagagcatgtcacagatctatggactcattcatggtgacctgagtcctgttggctgcatggattcaatatccacgcctgaacttatcattgtggctaggagagcagataacattgattatccaggtcatatgcccatggctagagcaaaagcagggaagatgagatactaaattttaaaaaatttaaagtttgtatttaatgtgattgctttctgtcctccaaatcttccaaaatatagctggaagaccaaatctagtataggcggggaggttacctaagcattttgctgaggcttgtgaaaaccagctatggttagtctaactacaaatgcatt

SEQ ID NO: 475779 - DNA, 515 bp, Homo sapiens
ggagtagtaaatggatttagcatgctgaactcttggacactgaactgtaacaagaaaattgaacatattttgttttgtgcatataaaagaagtactattgaagatgagcattcatttatttacttaacaaatatgtataaaagaatggagattatttctggtatgttcaccatttttgccctcggcaccttgcacagaatagatgttcaaaaatacaaccaaccaatcaaccaaacaaacaaagatgaacaagagcagtttggattctttgccaatagagtgataagaacaggaaaatgtgactggattaacactggcaaaatcaacaatgaaaatccggtggagtcactaccatctgatgctggttcagacatggaaccaaacaccagggcgtttgggtctttacttagaggatgagcaaagcttttgttttcatcacctttttggtcttaatatcacagtgtcatatatttctgtatatttttgcagaaatctttgaaaatgtttttccttga

SEQ ID NO: 475780 - DNA, 890 bp, Homo sapiens
gtgttggtgtcatttgctgagcgtagaaacttgacagtcatatctctggaccctgcaactctggccccagctggtgtcatgacatgcaaccctctaggtcgacattggagcatattaacgtggagatgcaaaggctgttgtgccccaagacaggatgtagtctggtgggagttgtgctctcaaaatggtgctatgatgcagctgcttgggtctcagagtgtgtgtgacatccagtatgaactacttgtctggaaaaatattatcatatggactccagatgtcatttggatggaaaatgaggttggcagcagaggaaactgtgtgcgcaacaatgtggtgacaatgtggcacacatgtgggagtgcagaaggtccaacagaggctcggggaccagagccctgccatgaggaagctttgtctcaggctaatgaggtgggattttattttgaaggattggtgatgtcaaaaagaagagtcggttgtacagaacctaggagcttggagaaggtatcgtgtagggaaagtgcttgaacctagagggagagggtttgtggtgaaagtatcatgagtttcacataaagaactctgaggagggggtgtaaatagctgtaattctaactgccaaaagcaaagaaactccaaagagtctggatggtggagctggagttggctgttctcttttgatgagggacactgtcagacactaaacgctgaaagagaaacttttgttcccttcccctcacctccagtttacctctctgcattccattggcagaaattaacagtaagctgattaaaaaagatgtctacaaaatacagttcacagaattctagagcaagcaactctatgaaatgtttagacgagcagactcagagctaaaatctgatgg

SEQ ID NO: 475781 - DNA, 577 bp, Homo sapiens
tttcatcttctgccatgattgtgaggcctcaccagccacctgaagctctggagttccgggtgggcgtgggcttggcgggccccgcactcggagcagccggccagccctgctggccccaggcaatgggggacttagcacccgggccagtggctgcggagggtgtactgagtccccccagcagtgcccgcccaccggcgctgtgctcgattcctcgccgggccttagctgccttcctgcggggcagggctcgggacctgcagcctgccatgcctgagcctcccacccactccatgggctcctgtgtggcgcgagcctctccgacgagcaccaccccctactccacggcgcccagtcccatcgaccacccaagggctgaggaatgcgagtgcacggcgcaggactggcaggcagctccacctgcagcccaggtgcgggatccacttggtgaagccagctgggctcctgagtctggtggggacgtggagagtctttatgtctagctcagggattgtaaatacaccaatcagcaccctgtgtttagctcaaggtttgtgagtgcaccaatggacactctgta

SEQ ID NO: 475782 - DNA, 733 bp, Homo sapiens
tgctgtgcatggatgtgcttccacctgaactttaggccatgtgtttcaatccctgtacctgaacaatggaacaacttcagcccagaaatgaacaccacttccattttagtaggacctcttgtttccaatctggaaataacccatatctcaaacctcacctgtgtaaaatttagcaatactatagacaaaacaaactcccaaggcatcaggcctgttggaactgccatcaacaaaccaagtgtgatgagggtgaggaacaggaaagaaggaaatatgggaaaatggagtgaatgtcaggtggatcaaagagatacagtcatgggggccaggtgtggtatcaggaataatgtgggaggccagactgaagtctgggccaggaacaatgataattgtgggagacccaacgaagaccttgtggcagtacagcccaggtaagttgctgagactgatgggtgtcagggtcagtccaagtgaaagtgaagagaggctgggatgaaggtgtaaaggaatagtaaagaaagcgtctttgagatccagaacagaataatggcttgtggagggaggaattgaggataggagagtatatgggtttggcaccacagagtggataggcaagacaattttgttgataaggtgcagatcctgaactaacctgtaggacttgtccagtttttggacaggtaaaatgggggaattgtaaggagagtttataggctttagaagcccatgctgt

SEQ ID NO: 475783 - DNA, 859 bp, Homo sapiens
gcaccgtggcatcatcagctgcttggctccccgcttatgcactgtgtatgtctctccctttcacatggctggggaggcctcacaatcatggtggaaggcaagaaggagcaagtcacatcttatgcagacatcagcaggcaaaaaaagagcttgtgcaaggaaagtcccattttaaaaccatcagatcttgggagactcattcagtattataagaacagtgcaggaaagacccacccccattattcaatcacctccaacggagttcctcccaagacatgtgggaattgtggaagttacaattcaagaagaactgtgggatacatagaaaactggaaaatcttcgtagcaaatggtgaagtcttagcacaacttgcctctatccaagattttactagtatctccatatattttactggtacctccaaacattttactggtaccttcaaagattttacaggcactaaaaaccatctattaatacttgaatcttatctataatctatacctctgaaaacattgtttaaatattattaaataaagtgttataatgtaaactgttctactttattagaggattttaaaatttaaatttcttttctgttacttttattgctctatgaagaaaattcattaaagctctttatccttttatgaagtcttctgccatttcctacaactcttttaacatagtactttctggtgcttctcaaattactttctgatgtattcaagttatttattattttattttggtttttatttattttgtaaagcacgtatttgatgattaattcttatatgtctgtttatttataaatattttacatggcttctcatttctgacttttaaattaataaa

SEQ ID NO: 475784 - DNA, 3256 bp, Homo sapiens
gtgttggcttcagactttcggcattatgtctgcactgaataaaagcaagcagctccagctgttccagacaactcactcttgggccactagtgccgggaagtcccctagctgctcttacattgcatacctgtgtctgagtattcctttcatccagcagaagagcagaagaatggcagaatggtgtggcagagagaaggaatgtctgaacattgagaggaatttggctggggacagtcagagtgaaaatcagctgctggatggccacattccaggacaagagctccagatacagaaagctgttgcactggccctttgcccttgtgaaaaggtagagggtccactgagctgtctaacacttaagccatctgtggatggcaaggctaaaagaacacactgtaacacacgtccacttgcactttgggagtctcagacacccactctggacgccactgtgtggccagagcccaggggcacttgccccagctcctgcacctgcccatccgtggactccccatcccataaggcatttgagcatgcctagcggctgaaaaagatgaactgcaccctgtcacatgtcctgcgagtggggccagggaactctcacacttcaataatacttgaaatgcatttacaaagtaagacaatttatatgtgtattaatatctgcataataaagatctcaaaattaacagatttatacctttgataggtaaataatagtaagattttgaataaatatagcactaagcagtggagcagtgtttcaaagccttgtgctgcaatatttgatgtgattttgaaccccagttctacttagcataattaataagctttttataaaggaatgttctcattaaaggtatatatcaatgttttaaaataagcacatataatgctatcttttgagtttagctttttaatgtcatgttccaagtgtttttaggaactgcttttgtgcccatgctacatgctaatgatttacctggagatgtcctttaagcaagacaatggtgaatactccttagtgattacttgttatcttcaaggctctttgaagttaggctttctctatattataaacctctgctcatctatgagaacgctatgagccttgtaattctttatctgctctttgacatgacctaattgtctgccttcctatcgtctcttgctaagctacggatagaaactcttttaactcttgctctgagtgtgtttttttgttgttgtttctcctggtgcccatgacctgtacatggatctaatatgaatcagtgatctcatctaaagaggctttggaaatctggttctttactatgacatacctaatttcccaagatttgaagtccccaagatgcataacagatcccagtaaactcaagcattatcagtcactgttattagcaaagcagttgtggaccacaaatcattttatattttaggcatatggtagttattaaaaaattgaaagcaatgaaagtgatagaatgattaaatacatactttagattataaaagaacagaatttccagcatgactatttgaagacttcaaactagatgtttcaaaaaaaaatcatggtattttcaattttcgtatgtgcttttgtgtagagttgtattccaataataatggaaactgtgacttggtaaatatgtaaatcagttcttgctaagtattggcagtagtttttagctaactttctttgctgtgaacttgctgatcttgctgattatatgtggtgcttatctgttcagagaaggtagatataaaatgttgagaacagaaagcattttcaggatggtttttactttacataacagggaatctaggcatgtgtcttagatacagggtcacaatgcatcttacttttcccttgctaatacaattgagagagagctaaaagcctttaatggcctttagaagagcagagatgcttcattaatgcagcattgaaggtaaaaagtttaaggatacacagtttttgaactgtcatagccaaatacttttctttgttcatcagaaaagcagatgcaagttgccaagttgacatcagggaaaggtgtttctctggggatgccatgatttcatatctcctggcttacatattaagagatagaaatgttttctttttgaaatgtctttgtggtttaaactcaagtgacatcgactgcaaatagcctgaggcaaagttagctttgattgttcctttgctttgaatgatctagtcactttagaaaagataaatcatatcaaggggaaaatgcttagaaatgaaatatggaaggaaaagtattttaaacaacacagatttgtttgctgaaataatgattaacctatcaaatttcctgaaacaaagatttaattttgacttctaaattttatattatatttaaacacattatttctagtattatattattattgttaactctaacattgcagaatataaactcatttccttttgtctcttcatttctgaaggatcgtgcggctgcacacgctttgggtccatgcatttctctaatcgagctgtaacacttgctgctgcggtccatggctccattccttgaagcccacgagaccaggaacccttggattgagaaaaaaccttcaattgggaggatacttcttatctcatttctaggggcccatccgggatttctccacagcactcaagctgagctttcactctctgtccaccactgctgtttgccactgccgcagacacgcgctgacttccatcccttcggatccggcagggtgtcctctgtgctcctgatccagtgaggtgcccattgctgctcccgatccgactaaaggcttgccattgttcctgcatggctaagtgcccaggttcgttctaatcgagctgaacactagtcactgggttccacggttctcttccatgacccacggcttctaatagagctaacagagctgtaacactcaccgcatggcccaagattccattcctttgaatccgtgaggccaggaaccccaggtcagctaccaccaggctagccaccatcttggaaacagcttgcggccattttggaagcgtcccattaccgtcttggtagctctgggagcaaggacccccagtaacatgaggactcacacagactagtaaggcaactttccataaggaatgacattgcatttttctgaataatgtggactggcagatgttgtgtgtaagtgtttgctgaatcatctgattgaggcatttcttcttaatcataggtgaggggag

SEQ ID NO: 475785 - DNA, 1058 bp, Homo sapiens
tttcagaaacaaaatccaggtacctaagagcacggtgagtatgaggaagcagatggtattaaagtttatgagctatcagaggataaatggggcaaggagcactgtcccaaagaggccgtttattaaggtgagggaagatacagatttgtctgaaattattcatcctcatggcccaagtgagagtacatggagaacttttgtccagcgtggagcagatgggcgaggtggcctagggagcggcccgcatccgtggggagacgctgggcctcaacggctttggttgcacggggcaggcattgcagttcgagccaaagcctttggattcagcgtcatattttatgacccctacttgcaggatgtggtcgagcggtccctgggcgtgcagagggtctacaccctgcaggatttgctgtatcagagcgactgcgtccccttgcactgcaatgtcaacgaacataacaaccacctcatcaatgactttaccataaagcagatgaggcagggagcattccttgtgaacgcagcccgtggtggcctggtggacgagaaagccttagcacaagccctcaaggagggcacgatacgaggggcagccctcgacatgcatgagtcggagcccttcagctttgctcagggtccgttgaaaaatgccccgaatctcatctgcactcctcacactgcctggtacagcgagcaggcgtcactggagatgagggaggcagctgccacagagatccgccgagccatcacaggttgcatcccagaaagcttaagaaattgtgtgaacaaggaattctttgtcacatcagcgccttggtcagtaatagaccagcaagcaattcatcctgagctcaatggtgccacatacagatatccgccaggcgtcgtgggtgtggctccaggaggactttctgccgccatggaagggatcatccctggaggcatcccagtgactcacaacctcccgacagtggcacatccttcccaagcgccctctcccaaccagcccacaaaacacgtggacaatcgagagcaccccaacgagcaatagcagagaa

SEQ ID NO: 475786 - DNA, 749 bp, Homo sapiens
agacttatcacatagaataatcataagcattcaataagaaaatgtataagcgccatgaccctcagcattatgggccacctggagtgggctcgtggatgtcagacagccacaggcatctactgggatctgctctttgtccaggctggaggagaagatcctgcaggtgtgagtatagcagaggcattccccctttcctgggaaggtggaggaggtccctctataggtcctgggcattcctactgggagctccaaggctgtaaaagaattcttaattccaatggaggcatagacaaagagactaagggactcctaaagaagcctcttctgtttgaggaaaaaaacccagtggccaccagaacctgggagggaatggacccttgtgagaagagagctgcacttggtacaatctgtgttcatggggctttctgtgtgagggtgccctccattcactgtggcacggagctgctggaggtcacagctgagagctgtgttacaactgggtttcagaattggaggaggcagttaagaactgctagaacaactggaaagggagggaagacatttcagaaaggacggaaccacagaagggggagcactaaaatcattgtaaactctacccaagttattggcggccctctgaactcacatgaatgggtgagactccaaggtttccagcaaaaagcaacaggaaaagtctggaagaactgagcagtttcagctgtgactcattgcaggggagacagtttgga

SEQ ID NO: 475787 - DNA, 686 bp, Homo sapiens
gcgggctccccttgcgtgacttggtgatatttgagaaaggcatgcatattgcctttctgtgcttttgtttcctcagcttctgacttagtctgttcaggccacgtcccctgcaaactagagtgtgacctttcaaaggccgagtgagagccagaggccatgaatcatgatcactggctgtgcgggggacctccagggtcctggtttcatgggcacatggcatggccctatgagctcaccttcagagggaaagatgtttacttatttaacaaaggaaaggttctctggaccatccgtcttgtccacatgacatcagcatctttctgtcagtgctggggaggagaaattgtgttacaacaattacagagttgcgtcagtgcctgttgggtaacaggcagggtagctcaggactccttgaccccgcagcctttgggagtgtgggttctgtggagagccttcagtcaatctcagaggactgttctacccatgtggtgggccctgctgttagcagtggctgttgctcagagaggggatgcccactcttctccatggaagccttgttggtgattgtacaggaaaactgtggctcaggaatgtgggtccatttgtggtaggcttgcctactctggttacctcttaccgtggggaaaatgtcacttccaaaattgcaaatttcaaaggagaattat

SEQ ID NO: 475788 - DNA, 1009 bp, Homo sapiens
gattcttcagttacttcaggccatctggatgtatacctacgccaaagatttagtgtgacggcagcccgtgatggaagaagtagaaggcagaggcaactactacagtgggaggagcgtggcctttgggtccaggagagctgatggtgtaagttccagtccaggtctggagacctacagcctcaagagccaggaagagccagtgtttcatttggagccccacggcaggaaaataatgatgccccagctcaaggcagcaggtgggcagcagcaggtggacggcggcaggctcagggaagacatcaccccatccttaggggtaaatagcttcatccagtccaggactgcaatggaggagagcacaattctcatgcctattactgaggtgctttccacagttctgtctgtggagtccttactctattccaaagcaggcactccaatctctggcccaagattaaaatgcctgcatgaccatggtgctaggtctccaaagaatggctgatttcttatttagtgattttccccatccccctcaagttggaacactttgaattattgccacacagacgccaacatttcaggggtaagattgtgtgattaaaatgaaattaacagtgtcaacagtgatgcacaatggaaggattactagcattttctggttcaagattgtattttgctttactgcaggattcaaattaactcataaatattggatggtgtataacaaatatcccttttaaataaaaaaaaacagggattcttcattagtgccaaacaaatgagatttatgtaagtgcttgggaacatctaacattgaagctttattcagtgctgtgactaactcacagtagatcatcagcatagctgtgaggctgcttcctgagctctcagtctttctaaaataattcagatggaatcttagcagaacactaagctggggtatgaaaaggataggtggacaaaagtctatttgcacaagatggtgaggatccatgggaaagtattcatt

SEQ ID NO: 475789 - DNA, 546 bp, Homo sapiens
agtgtgttagtgagagcactgctttttctgtatcccatgggttttggtaaagtttcgttggagattgggactcccagtaggctgattttcagattccagtggtggcagtggtgggctaagcatcactgtccttggaccccagggtggcatacgctggcactggtgttagcaggtccaggcagactgattcttgggtctccatgtggcttacttcctggtagtggcagtggtggactgggtgggtgggcagataggtccctgggctgccagaatgacttgggctacagcagtggcagtggcaggatgaccctctgggtcctgagtagtgtgtgctggtgttggccgtggctgcaaagggctgggcagaccagtccccagtactccaggtggcatgtgcaggtgacagctgtggttgtagtggcagagggagcagaccccacctcaagcccccaggaaagagtgttcaggtaccaatggtggtggactgggctggacaaccctctggctcctgtactgtgtgctctgccatggggtgggggataaagt

SEQ ID NO: 475790 - DNA, 620 bp, Homo sapiens
aatatgaagaactgaattgaaagaggatttactatgggaattgattatgaagttgaggccacagcctgccatctgcaagctgcagaaccaggaaaacagggatgtctgaagttggatgctatttctacaacagagacacagttttctagagaccagaccaggaggaaaccaggtccagtgagaggaagggagaagaatgtttcaagtactgaaaaaggaagaggaggaggaaaaggaggagaagaagggaagaaggaagaggagaaggacaaagagccaaggacatgtgtaaacgccctcaggttttgggcttatgaaactggatggatggggatcctaatccctgagacagaggacattggaaagggactaaatccatattttggagaggatgagatcaagatgcttatgggaaggacctggttccaaagaaagattgatgggagaaagacaaggacaatctatagtccatgtgaagtccctgagaaaaactaagtgggcatgagaaaaggagaaaaggagaaaaaatgaggacaggtgtaaataggtctgtagatttagcatttggaaatggagggcatttcccacatgatgacttcacttttctctgagtcacaagt

SEQ ID NO: 475791 - DNA, 636 bp, Homo sapiens
cagcaattgagaaactgcttgtcaaccatctgaaactggtgatcagcagcttaccaataagatctcaggagttgggcaaatgggcccaagcatgcgcattaagaggcaaaatggtggaaaatgctgcttgaacccaactgcttatctttgttatattaaggcaaataagggaagggtgttgtttctggacttggactcagagaagaacaacaggagaagacccgaaggctgtagatgtgggtccaagtggcccagttcaatcgaccgagcacctgccctgcttgctgtagatgcaggaggacagctacatatccttgccctcttgaactcaggcggtggtatgtcacttgctcgggccaatgaaatgtggggcagaagctctaaaagtcagttcctgctttgtgatactcagttttcccagagtgcagacagtgtgggcagcactgcaacttctcatggtggacatatcattttatgctcttagacaaatcaaattacgtagagccaagatcattttcatgagaatactgtctgattggatttgggtagcaagaacagagcatggaaacataatttaggagagacaagatttttctgttcactagaattgttggaaattgagaagatgggtttgca

SEQ ID NO: 475792 - DNA, 842 bp, Homo sapiens
cctgaaaaccatgaatggcttgggaccattgaacataagaactggcactatcccagggacaggtgatcaaggcagaagacctctggtttatgattagtggcaagactggtatcattagtgacactagaatatatgacacagggaccacatttcctgagcaaaacagtacctcatatggcctgatgaaggctttgagtgcatatggcagagatggaaaatggagatgtgaaaatgaggtcacatccaagtggtcaagcccctcttctgcagctctgctggagtttgctggaggtccactccagaccctgtttgtctgggtatcaccagtggaggctgcagaacagcaaagattgctgcctgctccttcctctgcaagcttcatcccagaggggcacccactagatgccagccggaccactcctgaggcagtaagtcccttagcagagctcgagcactgtgctgggagatctgctgctctcttcagagctgtcaggcagaaacgtttaagtccgctgaagctgcacccacagctgcccctttccccagatgctctatcccagggagacgggagttttatctataagcccctgactggcactgctgcctttctttcagagatgccttgcccagacaggaggaatctagagaggcagtctggctacagcggatgagttgttggggtgactttgtctgtttttagtgggttattttatatcacagaagtacagttgtaaaataaaaaacagcatgctgcagtaacagattgattgtggtaaaggaaggattgaaatgagtcaaatagaattccagtgtttctttaatgggaattggatgatactgtc

SEQ ID NO: 475793 - DNA, 815 bp, Homo sapiens
gaggcgaggatttcgccatatgcctctggtggcactgggccgtctgggctatggtttaagatcatttggcaacgttcattcctacaatcagagaacagcttctggtgctgcagataggggacatcagagaggcaacttgactttggaggaagaggcagagaggcaacttggcttcaggggagagaaacctacccttcccacaagaatttgggacccaccaagtgtggatacccaaaaaggctatcacactggcttgtttcccttgctggcgggaggtagccacccccctcgccgaggcaaaggggccactgagctgatagcacactgctgtccatggttggttgagctaagagaacactgtaacatgccctctggagccttggggtcacaggcacccctacctggacactgccacggggcctgcacagagtttgtttctgctggcaccaaagtggccagcaggttcctgcagtcactcacttgcatgttccctcctgcgaggggctgagcatgattggctgaatattacagctctttccttgtcattagtataaactggattcattctttttaacggttacagagcatttcattgtatgagaaaacctaaatatattgatctcatttcagtcaatcaatacttaggcagtttccagtcttttgtgattgcaaacatgctgcaatggaagttgttgcagagatatttttgtgcacatatgccagtctacctgtaagatattccacttgaagtggaatggctgcgtcatatggtttgcatattttggactttgatagatgctaccaagttgtcttcc

SEQ ID NO: 475794 - DNA, 476 bp, Homo sapiens
atacgttgaggggcagtcaacgaatgtcaaatctgattgtgatttggctaaattggatccaagactgttatgagccttttagcactgtgtgtggaatttctgcaggtttaaatctttcagaactattcaatcacatcacattcagcattctaggacaaaagcagcaaaatgatcaagcaagtatacctcagaattcgtgctatctttacaatctgccaaaatctttaagcaacactagcaaacatgtgaactcttcaataacccttgcatttcagagtggattaattgatgctgatgtcttggaaaagcaggcactgaaaaactgtgctcaagcaatagaggaacatggaaccatgaataggggcagtaagcccaaggtcttaaaaatgatctccagggaaacctcaggaaatctgaatcatcaacttccactagtccatacggaagagactgagacacagaaaaagtaaatgaat

SEQ ID NO: 475795 - DNA, 623 bp, Homo sapiens
tgcagataggctgcaaaattatacgtttctctctaagtttgcatggcctggtttattattttatttgaaggagtggagtggatggagggtagagaggttgcttatagtcagatcccgagttcggccagatatctactcgaaagccactcagattgtaaatatctgagtggaatgactggatcatatgggagtttcaaaaggagagggagtgtgcgaataggtgtgggtcacagacatgaagtactttacaaggagggaggcagaaagcactttgacacagaagaaggcaatgtgaccactgacgcaagaggccacatggctggctttgaagttggaaaaaggggccatgaaccaaggtgtgcaagaaatacaggtgtaaaaggtagagatgtcaaggagatagattctcctatagggttccagagggagtacagccttgctgatagtttaatttttccccagacttctgtgctccagaactggtataatataaatgaagaaatcctcatcgttctccaaaagaatgtgaaatttggggactacaatgtgcttatgaaaaagtcataagactaggtgaccagatgtcctaaatgcaggcaacctacaaaatgggagaaaatttc

SEQ ID NO: 475796 - DNA, 838 bp, Homo sapiens
actggtttacattcccaccaacgggatggggcatcctgagagccaaactgccattattgttatttctgttctggatttagccactcagcggagctactgggctccaggccggtactggggaatatctgcaaagagtcctgtgatgttatccgtcttcaggtctttcagccatggatacaagcacctgctctggtggagtagtggcatagaagccaatgaaaggggagagtttcaggaagactcagcagtattaaagacagagaggttaagaggcctagcagagcaagccctgaaatgtaaagtagattgcgccagtgtcagtgcttttctatgggaactgagcagggcaaaggtgaggaaagctgctggcatgctttgggctatttgcaatcactcccataattatcaagtgttttttgatcagaaataaaaaggatacattttaaactgcgataagaatttgtgaatctgcctagataaatagtagtgacaaatgattctttcatttctataattagcatactgcttggaagagagttcttaatgtatctcagtaatgctgctttttatttgtaacatcaatattttataagagaatgtcctgttttagttattgtggtccagttccttaattcccacttcattttacagattgagaaagaaagaatcagaaagtttaactcacctatgaagttatgcatagaatgcaagaaatttgagctattaaattctttatctatgaatattaggtgcttcctccctctggttgctgcttgctttgcttaaaagaaaagctaaatttgctaaggtattctgaacttatctgctatggacagag

SEQ ID NO: 475797 - DNA, 705 bp, Homo sapiens
ttattcccaagagactatggaactaaacatactcttaccatatggtccagcatcatgctccttggtaacttatgtctacacaaaaacctgcacaggaatatttatagcagctttattcataattaccaaaacttggaagcaactaagacgtccttcagttgcggttacatggatgccaagtgggtccaaggcatctcatgtctcagaagcaacagaaaattcctagaacatgaggcaagaggcttgaagcgtggactgaagtatggtgctgttggggtgaagcttctcctttctcccggggctgtgacccgttgtgcagatacttttgctgctgctgttgatgacatgaatctgggcctaagtcgagccccagccaacccctttgacccctcggtgccctggactgcctggaggctactcatgtgctggacaaacaggccaattgctggagcatgcagcttgctgtgcttggcacagctgctgctggatcgcaattaaacaggtatctatggcttgcaataacatttctagtttcagcgtcatacatttatctcaaacaagttggacagaattgaacacgacaccctccagaaacagtgtgagatgattcaaattggtttacataatgacaaagtcagggatatcaaaagtggatttaaaaggtttgaataaaattactttataagatgtaaagaaaaaagcaag

SEQ ID NO: 475798 - DNA, 494 bp, Homo sapiens
cgttccactacactgaagcctgggcaacagagtcttggcatggtcctcttagcgtcttcgtggacacgtagaaagagggatagatcaccggacactgactctgctgttgcctcattcttggacttcccagtttccagaattggactaagcagcattttgcagcgcattccttcaaagattgaagtttgtgtggagagtcactcattaaataaggagtccaaggctgctgaactccttgggaggatgagcgaggttcacttgctgacctttgccagacagggagattgtcttgagatcaaaaatgtgcagatgcatcttgggcagaatcaagttggctgtccctctaaaatccctcaggatccctcactctttggaaggctttcctgggagcaaaaaggtttgggccagacccctattaacttcattaggggcagcaccaggtgcaagaggctgaagaagagagttggacccagcgagtaagacatagagtttat

SEQ ID NO: 475799 - DNA, 1671 bp, Homo sapiens
agaagatccaacagccagactggtttgcaccgacggttcccaaatgcatggactggcactctgggctgttacacccgccacagctgctcggagaacttgtctccttgcttcgggggaggccaaggaaactcttgcacaaatgtacaatactgtttggaatatggaagacctggatttagaatatgccaagacagatataaattgtggcacagacttgatgttttatatagaaatggacccaccagcactgcctcctaaaccaccaaaacctactactgtagccaacaacggtatgaataacaatatgtccttacaagatgctgaatggtactggggagatatctcgagggaagaagtgaatgaaaaacttcgagatacagcagacgggacctttttggtacgagatgcgtctactaaaatgcatggtgattatactcttacactaaggaaagggggaaataacaaattaatcaaaatatttcatcgagatgggaaatatggcttctctgacccattaaccttcagttctgtggttgaattaataaaccactaccggaatgaatctctagctcagtataatcccaaattggatgtgaaattactttatccagtatccaaataccaacaggatcaagttgtcaaagaagataatattgaagctgtagggaaaaaattacatgaatataacactcagtttcaagaaaaaagtcgagaatatgatagattatatgaagaatatacccgcacatcccaggaaatccaaatgaaaaggacagctattgaagcatttaatgaaaccataaaaatatttgaagaacagtgccagacccaagagcggtacagcaaagaatacatagaaaagtttaaacgtgaaggcaatgagaaagaaatacaaaggattatgcataattatgataagttgaagtctcgaatcagtgaaattattgacagtagaagaagattggaagaagacttgaagaagcaggcagctgagtatcgagaaattgacaaacgtatgaacagcattaaaccagaccttatccagctgagaaagacgagagaccaatacttgatgtggttgactcaaaaaggtgttcggcaaaagaagttgaacgagtggttgggcaatgaaaacactgaagaccaatattcactggtggaagatgatgaagatttgccccatcatgatgagaagacatggaatgttggaagcagcaaccgaaacaaagctgaaaacctgttgcgagggaagcgagatggcacttttcttgtccgggagagcagtaaacagggctgctatgcctgctctgtagtggtggacggcgaagtaaagcattgtgtcataaacaaaacagcaactggctatggctttgccgagccctataacttgtacagctctctgaaagaactggtgctacattaccaacacacctcccttgtgcagcacaacgactccctcaatgaaggaagtgccaagtttgtttttgggttcctggaacagcgctcacctttgtttagaacactggtttaaagggataatcatctctgtcacattagactatccatcatgaccagcaaatactcattttaggaaaaaaaaaagcatgatctgaaaaatacttttggtgctgtgggaagtgggccaattcaaggcaccttccaggcctccaa

SEQ ID NO: 475800 - DNA, 1165 bp, Homo sapiens
accacgggcccctcggcgttcgcggagtcgggggcggggttggcggggggtggggttggcgcgggcggggggggcggggaagcgcagggtacctggcagaagaaatgtttaagcagcaaaccattcaagaggtgacttgggtgctgttaaaagcattcagttttaaaagggaaacacatcataaaagttcagaaattttgcaacctgatgtgatagaaaggaaaaacccattttcagaggagacattcaagctggctgcagaaatttgcataagtaacaaggcactaaatgttaatcaccaagataatggggaaaatgtctctagggcttgccagagaccttttccacagctgctccaaccgtggctaaatggggccaaggtacagcttgggctgtggcttcagagggtgcaagccctaagccatggcaacttccacatggttgggcctgtgggtgcagagaagtcaagaattgaggtttggaaacctctgcccggatttcagaggatgtatggaaaggcctggatgtcaaggcagaagtttgctgcaggggcagtacagaagggaaatgtggggttggagtcctcacacagagttcctactggggcaccacctagtggagctgtgagaagagggccactgtcctccagaccccagaatggtagatccaccgacagcttgcaccgtgcacctggaaaagccacagacactgaatgccagcccatgaaatcagccgagagtgagactgtaccctgcaaagccacaagggtggagctacccaagaccatgggagcccacctcttatatcggcatgacctgtatgtgagacacggagtcaaaggagatcattttggagctttaagatttgactgccctggtggatttcagacttgcgtggggcctttagctcctttgctttgaccaatttctcccatttggtatgggtgtatttatccaatgcctgtacttccattgtaatctaggaagtaactaacttacttttgattttacaggcttataggcagaagggactggccttctttcaggtgagtctttggactgtggacttttgagttaatactgaaatgaattgagactttgggggactgttgggaaggcactgttggttttgaaatgtgaggacataagatttgggaagggccagg

SEQ ID NO: 475801 - DNA, 644 bp, Homo sapiens
gttacaggcatgagccaccacacctgctctgcatttttattttttaaagcgggagaaggacagtccctattattttccagtataatttactgcaagagtcagcaaactttttctgtaaagaaccagatagtaaatattttaggctttgtgggtcatacagtttttattgcaattactcagttctgccatggtagcagaaaagcagccacagacaacttcaaaagtcatttaaaggacaggtgggaaatattaacatatcattttaatgggacccaatatggattggcgaatggaggtggtgatggtggtggaaatgatggtgtgtgcaaacactcccggacagacagttgtaacagcaccctgataatttgtgccagtgctcaaggcttgggtgtggaatataaccaaccatgggctaaatttcctattagttgaatctctaagaaatataatttattagcttgctcttcatcatgtttacgctccttgtcacttttcaaacacaagctcattttcagataagcatagtagaatgtttcagaattgcatctttagttcaactaacacattccttatggatctaaaagagttgcttttgttggagaaaggtctatgatccattttaagttaattttttatatggt

SEQ ID NO: 475802 - DNA, 944 bp, Homo sapiens
ctaaaactaagtgcccgacatgctcaggttatagccagtggaaggaaagaaaacagctgcgcaggctgctattactaaattcatatgaactatggtccaaaaatgcacttcaagtcttgcagggtttggaacactgatggacatccttgcacagttgcgagtgccaagagcatttctaaagggtctgctaccacatatcattaaagaagctcctgggaagagggtaggcactacaaggtctagacctcaggtgtcagatttcacatctgcgaaactgagtgatggagatgaagaacttgttgagaactggagtaaaggtgactcttgctttgctttagcaaagagactggcagcattttgtctctgccctagagatctgtggagctttgaacttgagagagataatttcgggtatctggcggaaggaatttctaagcagcaaggcattcaagagaaagcacagcataaaagcttggaaaatttgcagcctgatgatctgatacaaaagaaaaacccatcttctggggagaaatctttctgactccatactttaagcccaaatggttgctggacctagagaagctttggtggataacatccttagccataataaaagcttatggctttggttcttttccatgtactgttaaaacttcctggcacagttctactttcatataacatagctaaggatgaatgcccttggcttttgaggctgagtaatgctttcacaggttgaacatttcttactaaaaatgctagggacaagaagtgtttcaaatttcatattttcttagatttttgaatatttgcattgagcatccataatgtgagaatccgaaatccaaaatgctccagtgagcatttcctttgagcatcattccagaactcaaaaagttccaaattttagagcatttcagatttcagattttcatattaggagc

SEQ ID NO: 475803 - DNA, 888 bp, Homo sapiens
atcactgatgggcatttggggtaatggcagtaggatccatgctcatttgcccatgccagcagcagtgtgagcatggtggggtgcatgcttttcagctgggatggggtgctggtgagtgtgtggatgctggtctccatccagtcattctcagctgcagtagttttggtgcaaagatggggttgcggaggggtggaggggtaaggccattgaaatttgtgtgtgcattcacactggcggccctcttggcacaggaatggggtgcctgcctgcatgggtctggctgcctccatgagcacattcatgccagtggcaatgatggcacagggccgctggcctttacatgtgcatttgtgctggcaacaatggctatggcagggtggaagaatggggctgttggcctctgggcttgcactgacattggcaatggttatgcagaagggaggttggaggggtcagtgggttactcatgccagcagcagtgacacagtagagtcacatgtgcagtgactctcatgccagcagggtaggagaggtaaggtttatccaagcacatgtgcacagaaagccagattcaggcagtctcagtcatttcttaatgtatgagaaataactgttaaaaaaaacctggtgtcatagcactggggagaacacttttaccttcaagttttgatgaaaggataactcagaattttttaaaaaactgttgagaatgcatgtattattctattttaatgctgctgttaaagacatacctgagactggaaagaaaaagagatttaattggacttacagttccacatggctggggaggactcagaatcatagcaggaggtgaaaagcaattcttacttggcagcagcaagagaaaaatgaggaagatgcaaaagc

SEQ ID NO: 475804 - DNA, 2430 bp, Homo sapiens
cagccacctcttacatcagcgtgacctggataaacatgggaagcatggctgcccttttctcactcaatatggttctgggcccccagctttgttctctggcccctggaggctgtgctggaaggggtgaggtgtttccagatcctggccagagcactctgatgactgatgctggtgaaagtgctttgttagatcggcagcaatgggatctatgctcattcacatgtgctagcagcagcagcaaggtggcagggtgcttgcacattgactgggtgcagggtacccataggagtggggctgcagtgttcctgcatgcactcatgctggcagcagaggtggggcagagtgttactgggactttcacagatccagtaacatggccactagaaattttagtttatgtcttgatcctgatcaaatgcctggctcttccatccatacccttaagtttatccagtgtcaatttgatagggacagaaggaagccaagtgcctaggtaggtaggggcagattcaatttctttaatagacataaagctctacacattttctatttattcttgaatcagaattggtaagcttgggcttttatagaattttttacttctatcaaaattttcaaatgtttttacataaagctgccatagaaattattcatatttgtagtattggtatagaagtaaactttttttatttctgatgtttgcaatttataattttcatttttaaattttgatattgatttatcaaatttattagtgtgttaatgaactagtgtttggcttcattgatatttctatattctatacttgttttctaattcatctatttctatcatatttcttttaattctatgtgagtttaatttgtcacgttatcttctagccccttgaaatgaatgcttaaagacatgatattcagtctttcttttataaaatatacaggcaaggtatatattaagtatatatatatatatttgtccctaagtcatgtcttacttaattcttacaagtttttatgtgccacaattttatttccattccatttaaaataatttctaatttccactgtgatatcattaaaaaaacatgggttatttagatgtgttttcttttaaagttagaattttttgattgattttttcacttcataccactgaggctagagaaaatgctctttatgattcaatcatttgaaatgtattaaggtcttctctatttttcaatatgtggtcgatgtctatgattatcatttgtaattttaaaagcagggataatgtgcagtcattgagtgcagaagtctatatatgcctattatgtaaagtttgtaaaataagttttcaatcttctgtatccttagttcccctatattctcaccagtaactaaaaggtatgttaaatattttcatattattattgatttatttatttcttatacacattttatcaactttgtaatttatacactttaaagctaaattttgatacttagatacctttaggattgttatatcttcctgcagaatccatgctttatttcataaagaaatgccctttttatgtcttgttatgcgtatgatttaaaatctttgttgttagaagtaaattagttttcctgatgatttcatatatttctcaatctttttactttcaactgttctgtctctatatctgtaatttttaaatagttgttaatgatgctatttttattgttttaaaccagaatctgatagtttttttctaaacaggagaatatgctcaatatctatttcatgtgtttagtgatgaatttcagtttatatctacaattctataattcctttgtttttatagttcttctccttatttgacttcatttgcttacatcaatataattttattgttatattttgttctatttatctgatagcagtgtattccttaatattccttggcatattagagtctaatttaaaccatgcaatattagaatttggatattataatgctatgaccacacttattccctttttatattttgagctattgttgtcatatgttctaattcctcatatattttaaacctcagcatttcattaatttattattttaaacagacaacattcattttttgaggttttttttttttttctgcaatactggatcaatgtcagagataatgttccgtctgtgtaaagacctccttttagaaagaggtctttctattgatagtaaattttgataattccatattaatgattatttatttttgatattctgaagatttaatgtaatagttttttatactttcattatatctgagttttatttatcttttgataaacatatatgttatttataacatatgtctttgagaaagaatatttaagagtcaatttgtttttaaagagagtcattagtgaaatgttaaactgaagaacaagccttaataggtt

SEQ ID NO: 475805 - DNA, 1064 bp, Homo sapiens
cttacacttggcttgcattctctcttacctgggtgccttgttggaagtgtcttttgtcttccaccatgattgtgaggcctcccagccatgtggaacttttgaaggatacaacccctattttgctgaatgaatttgggtctccaagcatggagaggactgaggctttaagtgacaatttgtgcagcatgagctgtgagtggatttgctgtgaaagagagagaagattaagacaagcctttgccttccaaagcaaaatgtttagagaaggaactaagacttatgccgaggaaatagggggcagagaatcccagagaggtgcagggcaggagggtcagtgtctagccttcaccctcaaatcaaagcctgttgtctttgtaaaagggctcctgttcagtgatactaagccagcttccttccctggactggtggagcctccggtaaatgcaggtttaaacaggctggtgaaatctgtaagcacctacactgcggtgggaaaggcttggttcttatgcaggaagtgtcacttctcagaccacagtgcttttgattcctgtggttctgcattcatcaggagcagccagtactttaattcccccaaagctaaaactgactgtgtctctcccatctgcaccagcaattactctggccttgcttttatggtgctggggatggcaggatttcttcctgaaatatcgctcaccatccccaggcccatcaaattgcaggcggccatatttagaagggattcggagtgggaacaaggggtgtgcgtgagtgtggaagccaatattcccctgtctaatttatattttacatttctgtaaaatcatgcttagagtattttggtaatctctgcagagattaagtataatgctgtacatttaattgatataagtggtttcaattctccttaatatgacaaatctccagtgtgaaatattctttgttaatgatcaacataaaatagagttcatttttaatgtgagcacaagatttgaattaatttgtagctaaagcagggttattaaattttgtgtgcattctgtgcacaggcacacgttcgg

SEQ ID NO: 475806 - DNA, 498 bp, Homo sapiens
agttcagctgccatagagagcatctatgccttgcacactgttaccaacatggcagcaggggtggctgtaccctggacagaagtgccattactgccccagtccctccacattgcctatgcttcaggcctcagtttggtggcaccccgtgggcaccaatcatcagacactgatgccacagccaccaaaagtgagtccacaagccagacccagtgccaggaaggatcccctcagccacagcttccccagtaggagaaaaagagattggaaggtccttagcatccatcaccccctaagaccccaacagccctcagtgccactgtggaaatccacatccctagcttctgaggatccctacaatctttgtcaacatcaatctcagctgtcaaagctgcacagagactacacagatgcaccctcagtggtgccagggctgctgcatcatacctatcaaataccctcatattcccctgtaaacaatggtctttccacatgaaaact

SEQ ID NO: 475807 - DNA, 883 bp, Homo sapiens
acttctgcagacttaaacatccctgtctagcagctcttaagagagcagcagttctcctagcatggcatttgagctctgagaatgaacagactgcctcctcaagtgggtccctgactcgcgtgtagcctaactaggagacatctcccagtaggggcctacagacacctcatataggcgtctctgggacaaaaggtccagagaaaggatcaggcagcaatatttgctgttctgcagcctctgctggtcatcaacatcaaagaccaaaggtagataaaaccacaaatatggggagaaaccagaggagaaaagctgaaaattctaaaaataagagtgcctcttctcctccaaaggatcacagctcctcaacagcaatggaacaaagctggatggagaatgacatcaaagagttgacagaagtaggcttcagaaggtcagtaataacaaacttctccaagctaaaggaggatgttcaaacccattgcaaagaagctaagcaccttgaaaaaagattagacaaatggctaactagtataaacagtgtagaaaagaccttaaatgacgtgatggagctgaaaatcatggcacgagaacttcacgacacatgcacaagcttcaatagccaatgtgatcaagtggaagaaaggatatcagtgattgaagatcaaattaatgaaataaagcgagaagataagtttagagaaaaaagagtaaaaacaaatgaacaaagcctccaagaaatatggggctatgtgaaaagaccaaatctacgtctgattggtgtacctgaaagtgacagggagaatggaaccaagttggaaaacactctgcaggatattatccaggagaacttccccaatctagcaaggtaggccaacattcaaat

SEQ ID NO: 475808 - DNA, 723 bp, Homo sapiens
ggtcttctaagtagcgggtgttttcccttgacacttacgctaccgctagaccatggtccacctggcaacggttgtcttcccagacgctggcatcaccgctagaccaaggagccctctgtactctccccgctttcctatggacgtggcttcctgtgagccaaactgcagtgattgttgtcttttttctgggtctagccacccagtgagtctacctggctctgggctggtactgggggttgtctgcacagagtcctgtgaagtgaaccatctatcggtcgttcagctgtggatacagagcctttctggtggagatgacaggagggtgaaatggactctggaagtggaggaaagccggcagtcacaggcctcacctggctcccacggaaaccaaaaagccggtctcactctcattgtgcccccactaacagccctgagtttgtttccagatggctattacacccttgcctctgccaagccgatccctagaaaccaggttcatcaagaacagagacctattgaacaagattctaaaatcaccaataatgatcaaagagtggaatcaacctgaggccctcattagatgaccaatcttgaaccttccagtcagcagaactgtgagttaaattaacctactttctttataaattactcagtcttaggtattcctttatagcaacacaaaacagttgaaggcactgctcatggactaataagaaactactc

SEQ ID NO: 475809 - DNA, 716 bp, Homo sapiens
cggcgtttattattcagggattttatttgtcatcactcttcagctgctactgctgtgtttgctcacaagagccgatggcgttacaaggggcttcccccttcactcagtactcatccttgctcctgctgccctgtgaagaggtgcctacctccatgactatatccaaaaatatggaagcgtctttggaactgggtaacaggcaaaggttggaagagtttagagggctcagaagagacaggaagatgtgggaaagtttggaatttcctagagacttgttgaatggttttgaccaaaatgctgatagtgatatggaccatgaagtgcaggatgaggtggtctcagatggagatgagaaacttgttgggaactggaaaaaaggtgacttttgttatgctttagcaaagagactgactgaccgtcccatagaaaacaactgtaaactctggaaaaaatacaaagatcaactacatgaaggcactggagatgaaacgaagacagattttggagggaagttagcatatgagcaaagctaatgatacactttttgggggaacctccatacttagagattcttgaacactttatcatcagtaagtcacccacaacaattcttcatctggtttaatggctacaaaatacattaattgtgataattattccaaggtgtattttcaaaatacaattaataaggattttatgttgtattaaataaatct

SEQ ID NO: 475810 - DNA, 711 bp, Homo sapiens
gacgactgtcatcaaggtctgttaccatccgaggaatgctgggacagcctgtaaccagtaaggaaatgcagcagtccctgcaacaccccaattctaggagtccaaaactgagcggtcagtggagactagtgcaagatcttagactcatcaatgaggcagtaattcctctatatctagttgtacccaacccctataccctgctctctcaaataccagaggaagcagaatggttcactgttctgggcctcaaggatgccttcttctatattcccctgcactctgactcccagtttctctttgcctttgaggatcccacagaccacatgtcccaacttacatggatggtcttgccccaagggtttagggatagccgtcatctgtttggtcaggcactggcccaagatctaggccacttctcaagtccaggtactctggtccttcagtatgtggatgatttacttttggctaccagtttggaagcctcatgccagcaggctactctggatctcttgaactttatagctaatcaagagtacaaggtgtctaagttgaaggcccagctttgcctacagcaggtcaaatatctaggcctaatcttagccagagggaccagggccctcagcaaggaatgaatacagcctatcctggcttatcctcaccctaagacattaaaacagttgcgggcattccttggaatcactggcttttgcc

SEQ ID NO: 475811 - DNA, 572 bp, Homo sapiens
aaaatccttcattcctgaacgccaccatcgctgtgagccctgtactatcagccatggtcaactccgtcgtcttttttgaaatcaccagggatggcaagcccttgggccgcatctccatcaaactgtttgcagacaagattccaaagacagcagaaaactttcgtgctctgagcactggagagaaaggatttcgttataagggttcctgctttcacagaattattccagggtttatgtgtcagggtggtgacttcacacgccctaatggcaccggtgacaagtccatctatggggagaaatttgatgatgagaacctcatccgaaagcatacaggttctggcatcttgtccatggcaaatgctggacccaacacaaatggttcccagtttttcatctgcgctgccaagactgagtggttggatggcaagcatgtggcgtttggcaaggtgaaagaacgtgtgaatattgtggaagccacggagcactttgggtacaggaatagcaagaccagcaagaagatcaccattgctgactgtggacaattctaatgagtttgacttgtgttttatttt

SEQ ID NO: 475812 - DNA, 2624 bp, Homo sapiens
aagcaaaagctccagatggctgagctaagacacggcgtattcggtaactcacgcatgatgagtcccacagctggctcttcgtgcgggctggcacgcctattatcgctgctcagaaatgaagaccataccgttagagatggttcctttgatcatttctccaaagcaatctcgttgtcagtggacagcttcccagaagacagtgtgaaagcacagcacaaaagacattcatttcggctttactatgaacagacttcaaaaagccttgctaagaaatatttccaactcggctggcagctaaacagcactggccacgagataagcaatatcgaaacaattgcagctcatctgctgccggacgctgactacatccatttctgcctcacctttccccacttgaagtgtgtgccttcagtctctgctggaggctacacttcccagcccgcaggatggccagtctgcaggtcgtaaacccctataagaaataaaactctcatttccaatttatagatctggactccctgtgtgactgccctgtagcttatttaggcatggtatgcactgagatgtggtcagagtttggggccactgggtttcctgcaagctctgctcctgtgcacacgtggactcccaattgttacagtgtgactgtgggttactgctcaggtctggcacacagcactagtttctccgggtgtgtgtctaggagtagagtcactacgcatagaatataggcatgttcaagtttggtaagtcattccagaccttttccaagggattccactgatgtacgcccttccacacagcggatgagagctggtgttcctgcataccctcactaatgcttggatttaagatgggccaatttggtggaggtgaagtgcaatgtcaccatggtctccatctgccctgccccagtgccactgaggtgaagcatatgattatgggctattcatcttccctcctctgctaagtgacggctcaaggctcacacttgtttttttctattgggctgtttgccgttttattataatttgtagttctttatatcttctctgcatacattctttattagttttatgtaatacaaacatatctctttcagtttttgtcttttttccaccctttgttgtgttttttgatcaagatacataattaaattgattacttaagttaaaattaaactcttaaattttaatgtggtctaatttatcaagtgttttctttaatatttgtacatccttgtcttgtataatgaatgtctgtgttctaaatttgtaaagatattttcttacataaacttctaaacattttatgaatttgtcttttatagtcatttattctatctgaaattgatttttaagactggtgtaatatagaaattcacgttcattcttttccatttggataagcagcaacattaattttttaaagttttttgaattgataatacattcacacgcagcaaagtatcaaagcaatgtcaaatggcttacagtgaaaagtcttacttcccctccctcacaacccagttctccacctgtgcacctacagacaacgacttttagtcattattttataaatttccttggcatctctgtgtaagtgcaagaaaacatgaaattatatttccattttccttctttgctagactcctaagaaacttgttttttcacaattcgcagtagaccttggcaattgttcaaagtccctaccaagaccttccttgttctttttgagggatggcacagtattccattgtacagtaaagccatatctagagattttcttttcactcatgatgtaacagactggatctgcctccctccccaccttaagcaattggaatttctgaagctaaactctagaacgcaggaagctgtggagacagaagtgataacaaactccagagatgtgtggagcattctccttgagtctctgagttggtcgtgatctgcactggagtaatgtggaatgaatgaagatatgtctcttcaagccttttgcccatttttaattgggtgtttgtgttttgttattgagtcatagagttatttgtatggcctggctagcagacccttatcaaatatatgatttgcaaaatagttctcccattctataggttgtcttttcactttatttataatgtattttaaagcacaaagcttttggttttgatggagcccaatttttctatttttttcttttgctacttgtgcttttggcttcctgtgtaaaaaccccttgcaaaatccaagatcatgaagatttacttctgtgttttcttctaagagttttatagttttagctctcacatttaggttgttggttcattatgagttaattattgtaaatgatgtgatgtaagcatccagcttcattcttttgcatattggtagccagctgttccagcatcatttgttgaagaaactgtgtttcccatttgaattttattggtgtccttgttgaaaatcaattggccttagatgtatgggtttatttttgggctcttagttctattccatgggtctatatatttatcctcataccaatactatgctatttcaatcactgtagatttgtagtaagtttagaattaggaagtgtatgtcttctctttcagaatt

SEQ ID NO: 475813 - DNA, 913 bp, Homo sapiens
ctgccctgagctgctcctcggtgcctatggggtagccctgccctgcaggagcagtcacagagcatgacgcacactgctgcctcaataaagctcttttcttctgcctctggcttgccctcgaattccttcctggacaaggccaagaaccctcgcaggctgagcccactgtggggctcacctgctctgcatcagtacaaccagaaaattgccatcggagttttcctaaaagcagataagatattggatttaagaaaccagaacaagatgctaaagacatttttgcagaatcaaagcatgatcttgatgaataaaaacaagggacagggcttcctaagagccagactgcagcaactgttattgtcctctggatctagccatctagtgggggctactgggctccaggctggtgctggggaaggtctgcaaagagggaactcacagtttttcgactgtctcacagtgtttgcaatggcaagccacttttttcaaaggctctttgaattcttttggttttcctggtatgttcctgtggtggttcttggagcaaaagttcacaatccagttcccttctatgtgcaaaatcccatatcaccctttggatcctgcataagtcaccagaatggctttgtaagaggcactgaaattctgggctactgtaggaacccaggtggcactaatagacttaaagcattttgcattctatatttagggtactgttccttacagagatgcaatcttaagctcagattgggtgcagctcttcttctaccgggatgtgaagtacagcaattcagtgcttcaaatatattgcggcagtaacgtttctgagcattttgagtaattattatttcacggctgtcatttcagtgtttcttggggttttaattgttttacttttggggtgttgaataaa

SEQ ID NO: 475814 - DNA, 1307 bp, Homo sapiens
ctctcccctttgctctggcagattcctgcagggctttggcagtggactgacagacaccaggtgacctgcctctccaggaggatggagcagaagccctgccagtgtcccctgaagggcagggctggggaccgcatgaggacaaggctggagagtatccagagccttggctttgatgacaagtcacacaggtgttctgtgtttaccagcatcccccaaaccttgcactaccaatcccccaatgcagaagcacaggagacagagttgagcctctatttcctacactttgcctgtgcgacagccttacaagttgtggagaacattgcacatgctgaacctttaaccaaagcccccagcacacagacggggctgcagcaacgtccattgaatagctcagacatccacttgtctgcaggaggctctgctcccccatccttcccccaggcctgcctggtcccttgggctggcacttatgcgtcccacagcatttggttcttgatcttttccttggtgaaaccttccttgcaactcctgtacaaagctctttgggatcggacccatatgccatgcccatgatggctgccaactgtgggtcccctttctatcctgttcaggcgtcaaggacaggggcaatggcgtcttcattttgtgagtccaatgcccagtgcactgtttagactgcggagaaatgggtcttcagtgattaaataagagtccctaagattttgcttctgagaatctttcacatctttaattaataacaataataatacttagttactgcgttacatattttccttatcttgaattgagaaacatttcaaacatacagaaaagcagagtaatacaataacaactaccaccttctactgaggccagacaaaagctaatatttactacgttgatgcaggctttttttttttttttttttttttttcaaaataaagcaccatgaatacaggtaactacagataaacctctctgtctccatttcctgtccccctgacacaacttctccactcaagttggtgtggcttcatccatgtatatttttggcttttactacatatgtatgtgttcaaaaactatgaactcttctgtgtatttaaatattacatatatcggattacatggcatgaaacattttataacttgcttttaaaaatttaacacttgaaatttttccaggtagatacatgtagatccagttcattcattttatttcaaaactgtattatttcaaaactagagtttatcaattccatgaaaacctcatcattatgcacattcttgtactaatctcctggttc

SEQ ID NO: 475815 - DNA, 3338 bp, Homo sapiens
cagaagttatccttgcaaaagtgaagaaaggtgagccgcacgatcctgtctgtggcgcattggaggaagcctgattgactgtctttataggagcacacgggggcctcacaggagctgagggacagcatgggatgtgaggggctctgagtgagaagaccgttgatcacatgatgtcaggggctctgagggagaaggggcccatgagatgatgtgaggggctctgagctgagaagaccgttgatgacatgatgtcaggggctctgagggagaaggggcccatgagatgatgtgaggggctcagagctgagaagaccgttgatgagatgatgtcaggggctctgagggagaaggggcccatgagatgatgtgaggggctctgagctgagaagaccgttgatgacatgatgtcaggggctctgagggagaaggggcccatgagatgatgtgaggggctctgagctgagaagaccgttgatgacatgatgtcaggggctctgagggagaaggggcccatgagatgatgtgaggggctctgagctgagaagaccgttgatgacatgatgtcaggggctctgagggagaaggggcccatgagatgatgtgaggggctctgagctgagaagaccgttgatgacatgatgtcaggggctctgagggagaaggggcccatgagatgatgtgaggggctctgagctgagaagaccgttgatgacatgatgtcaggggctctgagggagaaggggcccatgagatgatgtgaggggctctgagctgagaagaccgttgatgacatgatgtcaggggctctgagggagaaggggcccatgagatgatgtgaggggctcagagctgagaagaccgttgatgacatgatgtcaggggctctgagggagaaggggcccatgagatgatgtgaggggctcagagctgagaagaccgtcgatgacatgatgtcaggggctctgagggagaaggggcccatgagatgatgtgaggggctctgagctgagaagaccgttgatgacatgatgtcaggggctctgagggagaaggggcccatgagatgatgtgaggggctctgagctgagaagaccgttgatgacatgatgtcaggggctctgagggagaaggggcccatgagatgatgtgaggggctctgagctgagaagaccgttgatgacatgatgtcaggggctctgagggagaaggggcccatgagatgatgtgaggggctcagagctgagaagaccgttgatgagatgatgtcaggggctctgagggagaaggggcccatgagatgatgtgaggggctctgagctgagaagaccgttgatgacatgatgtcaggggctctgagggagaaggggcccatgagatgatgtgaggggctctgagctgagaagaccgttgatgacatgatgtcaggggctctgagggagaaggggcccatgagatgatgtgaggggctcagagctgagaagaccgttgatgacatgatgtcaggggctctgagggagaaggggcccatgagatgatgtgaggggctcagagctgagaagaccgttgatgagatgatgtaaggggctctgagctgagaaaggcgcccatgagatgatgtgaggggctctgaggtgagaagaccatcgatgacatgatgtgaggggctcagagctgagaagggtgcccgtgagatgatgtgaggggctctgaggtgagaagaccatcgatgacatgatgtgaggggctcagagctgagaagggtgcccgtgagatgatgtgaggggctctgaggtgagaagaccatcgatgacatgatgtgaggggctcagagctgagaagggtgcccgtgagatgatgtgaggggctctgagctgagaagaccatcaatgagatgatgtgaggggctcagagctgagaagggtgcccgtgagatgatttgtcaccgtggacgcgggctgcagggaggcccggacgcccatcccaggtttcggcctcaccctcaggctgatgcagcgtgcccagcggggagcagcaggacgggatctccttgctggcgtgcctgcatccagctgtttactgcacgttaatcctgaatctggggggccatctgtttgaaagatgctattccaaggtggcccccttgtgtggcggcccagggatggtgactcaaggctttggttcgggcagatctgaaggacctatcggttattttgtctacacagaaggaagctaaaccaatgaggacaggcatctcatctgtttttctccagaaaagcacctgggaaagtacctggtgcataacagtggtgcagtcattagcaacccccaagccatcgggcttcctgcactgacgctcagtcgctgtcactgcttgagaccagttccccatttccgtagctgcagtttcataacttcagtgtgaataacaccatcctttcagggtccctggaaaagaaggacggctaatgtaggtgaagtccttgaactggaaggcacaaatgctgaacaagttcactaactacctgcactgccacctgccctgctctgaacagcagcctgtggcccaggcctttgcgcccttgtctatctcaggcatggaaagagaatgtagagaatgtgaagccctcacccttacaaaattcaaaaacatggccttccggaaatatttgctgctagacaaatgtaaaagccctaaagtgcctataccaaggggaaatgagaacagtcaacatcctcatgtccctccagaaagtgtcatcagcttcaggcccacgggcacccagctacctgcaagccaccttcgcaccaagctgcgggctctgaaatgcactcagcggaagatgaccctgagtcctgatggcacaggtaccagcaggcttcaacagctccatggtgctgggcagatgcgctgggacacagagatgtgctccagggccgcgtgcagggagcagcagatggctttagacagctgccccaggcccgttggtctctacgaaaatatctcaggactttcatagcttgtttttttcctatgaaatttctttcttctcatttctgttaactttgctagttaaactgtcaggccaattttgaaagggaataaaatctttgtccctcctcccatcctgaagccaaaatctattttggttcatataaaaatgatcaaattacaccttttggcatgttccttaactaggaaaaaataacttggattaactagtgccaataaactaagtattttcaattaaattctaacattagtaaaaatatcagtcataccactctaaatcctaaccaactttaaaacagtatgtgtaaccctcaaagcagctgtctgc

SEQ ID NO: 475816 - DNA, 1316 bp, Homo sapiens
ctatgatcaggcatgatgacatgcagccccttttagagcgcgtttgcgcacagccatcccgcgctgggtgctggtggcaggtcccagcaccaggacctagccaagggcagccttggtgcgtggcggaggaaaaccatctgtcctgccctgtgcatggcgctgcctacagtgacaaggactctgctgcgaacgggcgggccctccacgctcaggcctggctctcagggcagcctcctgagaaacggactccgcagccgcagcctttgagacctttactagccacacaccagtttgctgtgtatgaaatccgtacaaagcagaagacagcaaaagcatcaggctcccagtttccctcaaccagcaggcatcatgcttcagtgggacgtgtgagggaccgttcagtcacccaagttgctcccttcagcaccactcccaaagccctggcagtggtggccagctgtgttcgagagcttttctgccaggttgccagaccagtcatcatggcccccctaatgtgccagtgcggccacccaaaccatgcccctcctcgagggccgagtcccagctctgcagggccccctcctatgagctcggtggtactgatcatcaccccagtgtcttttctctgtgtccacagcccagggtagtagtttctccttgcagttatgacatctgggttaccaagggcttccatgttggcctcttaagctccaacacctacataacaaagtgtctgtattaaattccctctgtcgaatggacttgtgtgacttcagtgttcctgactggaccgtgactaatacagtcatttgacaactgaaagtaaatgttgaatcttgcattttattagtttttttcaggagtattcaagtatcgtatcatccagcttgctaaccaccctgcaaaatgctggtcagttttgaaaactgtttctaagcaaaaatattttattttcattttaacatatgaaattgattcattagaataaaaaattccacaattgtcaaagaagaattagttgaaaactgtttctaagcaaaaatattttattttcattttaacatatgaaatcgattcattagaataaaaaattccacaactgtcaaagaagaattagttgaactgtttacactcataaaatgaaggttaattgtttgttgaagtgaatatattctgcacagtttagaaaagttgaatataaatttgcctattccccatccttttggtttgaaaactgaaatcagttttaatgcaagcaatcttaaattaatagcctttacaaactaatgtgatcttaatgtaagcacataatcttt

SEQ ID NO: 475817 - DNA, 736 bp, Homo sapiens
ggggacagaagccagggcagaaataaactgctcagcataaaatgggaaagagggcctgggagaaagacagctcctgcagccaccatgatgccactatgcagaatccccgaggttctgtggcttctgtaggctcagagccctggacaccagtgccagggtcatcgaaggaaggaggaacagagtgcgtcactgaagccaaaagtggaactggccctccctggcttgcccgggctgagactcctgacttcagcactgaatttggcggccacagaacgggccgggaccggctgcagggtttcagttcgagtttgctgcgtgccccacaggggaagtctctagagccaggcccacccggggacagcagagcagagccctccctctacctccaggacctaaattctgcagtagggccatctgccctgacaccttccaaaagggtcatggtagaagatatgaagcagaagtctgcgaggatttcatcttccaactttgaggaccaggtatctgcccacccactcccatttcgccttgtctttggtggaagctgggctgcatctggagctggtgggtctgtggccgaagatctgccttgtacagcagcaacaggctcccctcctctcctcttgcttgcctgatgtggttgcactcaacatgcttcttaacttttgtaaaattctacagtggaatcttcaggacaaggccactgagtggtctcctgggtatttcctgttacttc

SEQ ID NO: 475818 - DNA, 589 bp, Homo sapiens
aaggttgataaatccacgaagatgggaagaaaccagtgcaaaacggctgaaaattccaaaaagcagaatgcctcttctcctccaaaggatcacaactccctgcctggaagggaacaaaactggatggagaatgagtttgacaaattgacagaagtaggctttagaaggtggataataacaaactcctccgagctaaaggagcatgctctaacccaatgcaaggaagctaagaaccttgaaagaaggttagatgaattgctaactagaataaccagtttagagaagaacataaatgacctaatggagctgaaaagcacagcacgagaactttatgaagcatacacaagtatcaaaagccaaattgatcaagcagaagaaaggatatcagagattcaatatcaactcaatgaacaagacgggccaacattcaaactcaggaaatacagagaacgccacgaagattctcctccagaacagcaaccccaagacacataatcatcagattcaccaaggttgaaatgaagggaaaaatgttaactacagccagagagaaacgtctggttacccacaaagggaagcccatcagact

SEQ ID NO: 475819 - DNA, 803 bp, Homo sapiens
gttccaagtgtggccttcagcccatgccaaacttagatcaactgcaggcttggagctttctgaggcgagaatggaaccttcttctagaagcctgtgctcagcacaggggccaagccctgcggctcaggcaggcccacgtgactcttgaactgcagactcaagtcccaaggtgggaaaccgtttgtcaacggcccccagatttacaaccacgaggccaggctggtcttggggtgcaaagccattgttcaaaccatcagtcatgcaaggagttcctaggattttttattttcccctccaaaaagctctcttcagctttgaagaaatgctgtttcctcctctggttacttctgcctgatgagaatgctgatctggggatccaagtaaagggtggaccacagagcaccttgtctctgtgtaaaaggacacccctgttactcagcgtgcctgaaagtgcctgagtgtttcccagtcctcatcagtgtaatcttaagctagaagttccccttgggcaatgcatcaggtcttccactttttttccaatagacaccatgggccatacttcctaaaatacatgtttctaaatcttctactttttttgaaaaacaattttgaatcattaaagaaatttttgaaaatagctttctataacccacaacacctctttgtgaaccccatgattttcatttgttgaaattttccgattctgaccatgggaatgtgtgtcttaccaaatttcaaccagacatccagtgtttccacctaacatgccatttaaagccacttccatattcaattcagtctgc

SEQ ID NO: 475820 - DNA, 1674 bp, Homo sapiens
gccgtgtaacgggagtggttaggagcacctggcctgaagtgtcttcttgaatcttctctggtctgttttgtccccatggtatgaccagcccgattctgatgtgtggagtccgatggagttgggttggggtttcagctgtcccagttaccagggcacagtaaggaacagggctttccctatagcctggaggggcctgtctgtgggcttcactgatctggcggccagtgcccactgtgaagacctgaagctggagcagcctccttacttggcactgctgctcagttgctccttggcagagattcacatccgggccgtggcttccctgtgcttggcctggagccccgggcgtccttggctttgtcctctcccggtcctgcgggcggccccggcgtggcccttactgctggactactgtatcttagagcacagggctgtgaacagcctttgccatcatgccaaggagcatattgacagctgcccttggaagaggccctgggcagcagcatggcctgagcattagaagaaccaggggagcttttttctttttaatttttaattgacaaataattttgtgtatttatcagcctctggtaaccacttttctactcagtttctatgagatcgactcttggattctccatataagtcagatcatgtggtagttgtctttctgtggctggcttatttcacttagccttaagttctctggttccatccatgtggtctcaaatgacagaattttcttcttttttaaggctatgccgtattccaggggtccctgactcctctgccccgtctgtggaaaaattatctttcatgaacccggcccctggtgccaaaataattgggaaccactgtcatattccattgtatgtacagggaattctaaaaatctgttcatcagttgatgggcacataggttgattgcatttcttggctgttgtgaacaccgctgcagtgaacctggaagagcagacatctcttccgcatactgatttcagctcctatggagcgtcctccagaaggggggctgctggagcctctggcagttccatttttagtctacagagaagctgccatactgttttccaaaatggcggtgctaatttacattcccgccaaccgtgcgcaagggttccttttcccccacatcctcgctaatacttatttactttttgtctttttgataaaagccattcagatgtgtgtgaggtggtatctcactgtgttttcatttgcatttcctgatgaatagagagggatcactattgctatcctctgagatcacagccccccttctttgccttttctctgttctaccctcaaaaggttttataaccaataatggagtttcttttcctgtctgctcccattactgcctccttctgtttgtagaattctgactggctgctgtgtgcaagtacctagacttattgttccactgaggcaggtagacttcaatgattccatctgactcctctctgcaatgtttactacaataaaacaagaggcctcattgctttgaataaaaatggggagatcctactttctggcctagggttcaaaattaagccttgcattttcctaggggcccataatcaatcacagaggcatttagatggacaaactatttgaaaaacctttccagatctttgcttaaccaattaataggct

SEQ ID NO: 475821 - DNA, 1515 bp, Homo sapiens
tgctgtcctggggtgacagagctggaaggatattggtctgtagttttctttttttttgttatgtcatttcatagttttggtattagggataccagcttcatagaaggacttagacccaagaatggtagatccaccaacagcttgcaccatgcaccaggaaaagccacagacactcaacgccagcccatgaaagcagctggagggaggctgtaccctgcaaagccacaggggcagagctgcccaagatcatgggaacccacctcttacatcagtgtgacctggatcatttcaaatgtgtcattccattaccttatggcctccattatttttgatgagaaatcagctgttaatgttatttatgagttcatgtatatgatgagttgcttctttcttgctgtttttaagatgctgtcttggtctttgtcttttgacagtttgtttgcaatgtatcttggtctcagtttctttgtgttgatcctccttggagttcgctgagttttcttggatgtgtagattaatgttttgcatcaaatttttagctatttggtcattatttcatcaaatatgctttttatatttttctctactctacattttggactcccattatgcatgtagtttatatgcctcattatgtcctagaagtttctgagaatctgttcatttttttgtcattctttttcttttctgttcctcatactggatcacctctattaatgtatattttagaatcttgatttttaatttggcctgctcaaatctgctgttgagttcctccagtgaatcttcatttcagtttttataatttttgtattctagaactgctatttgctgtttttttaaaaaaaatttctatctttttattgatattctgtatttggtaagaaatcattttcagactttactttttaagatatggttgcctttagttttctggagatatttaaaattgctgatttaagtgtttctctggtaaatataaagtctaggcttcctcaagtatagtttcttttgattgcttttttccttgtgtttaggccataacttattgtttctttacatgtattatagttttttcttaagaactggacattttaaattatgtaatgtggcagctctataaatcaacttttctctccctcttcacccagggtttgttgttgtttgtttgtttgtttagtggcttttcagaattaattgtgtcaagtccagattctttgtcatgtgtggctgctgaaatctctgctcagttagtttggagatcagctaatgattggaacactaggtaggtgtgctgtgttatttacaagctaggggtggggggggcactggttgcagcctttatattgaagagaggtttccactttggaccctcctgtgggtcaagggaagaaggcagtgataagtgtgtccttccacttacattacttttgtcaaacatgctaagttgacagcatttgctaaaatacttagctactcccttaaggggcatcttggcttcatgtgatgattggc

SEQ ID NO: 475822 - DNA, 660 bp, Homo sapiens
tcctctgggaagggctcgggttggccgtgttcgattcagctggatccaacatgtggacggtatgtgtagccttcttgaggccagctgtgctgctcatgtcgtggagcactgaagtggacagtccagggaatacacccaacaaaggctggtctaagccatggccagcagcggctttcacagacacttctggtgctgagctgcgagccttaactgtgtcctgctcagtggctgaagatacacacatccgccctgcagagcccctgccatcaattcgctgcgaaactcagcttctttctaagaatgccagctccatgagaattaggaatgaaataagcaattgcgaaagacactttatatgccaccccccaggcaagccaaacactcagaagcaactgtacaaggttgtcctctttgatcaaacacaaaacattacaaaagctgatgaaactggtaacagaattgaaagttatcttgacttgtgagaagtcacattcattttttttttgattgctgacctcaacaccagagatatgaagaatactttaaacaagacccttctgggtgaaggaagagatgcatatccagccatatacatttccattctttccctgataacctggcatcctcctggtcctgagtgttctataaaagccacctttc

SEQ ID NO: 475823 - DNA, 1430 bp, Homo sapiens
tgactcagagattttgagcttgtgttttttccactggaaacatgaagttccagaaaaagaaagtccctctaataacaaaagcttcccggagcctcacccactccctacagtccagtgtgatttgggccttctgggctcatggacaattgctccagagtataggaactggtctgcaagagataagaaataccaggagagccaggcttctggccggggcgtcatgctggtctggggtttggagatgctcaggtggaaacttacagaggcagagaggaggacgtggaggccataacatgggggcacaggcactggccctctgcctggtccatggctgtctctgctttccctggagagccaggcttctggccaggcatcatgctggtctagggtttggagatgctcaggtggaaacttacagaggcagagaggacgtgcaggctatggcatgggggcacaggcactggccctctgcctggtccctggctgtctttgctttccccgctccccttcgttacctggtagcacgggcttgaggaggggctggctggagcggtggggggtctgctgtgctctgggtgccgctcctcccctcagtggcaccattttggcctctcatggtcattctggccaacaccaggcagcacagcacagcagttctgcacattggcacctaccatatctgggcctgcccttctcctctgccacccactatctggttcactcccctgctctgcagtcgggtgaggcccagcatccgtcttcagaggctttgttggcatcagccatatctgggctcgcacccctcccctgccgcttgctaactgctcctgggagagccctggacttttgtgcacattgggtcacaccccgtggtcatctgaaggcgagttctgacgcttactggccaagttgtgctccctggctgggctgggggcccttgacccaggacacagcctcctgggtggtccttgcaagttcttccccctccgtggggctctgcagatgatacgctccaagtccttactccccatggaacataagccactgtcttcttctccagtcttgtctcttctccccaagtacttgcccctctacccttcctttaagggagggtcccactcatctcccttccctgggtctctctccactggagggtagggggacaaagaccagccagacatccatcactggttttctcatccactcattcacctgcctatctttgcgctcacacctggggaacagagcagaagacaggcccttttagtggagaaaaatatgtctctgccctctggtctttccctcctcccctcttccatctcttctcatgagatcctattgccctgatgggacagccgccatgaccctggctttaaggaggaaaataaaaaataataaagccaaggctctcttacaatgccacttcacaa

SEQ ID NO: 475824 - DNA, 597 bp, Homo sapiens
gagacagttgctgatggggtgtgtagctcaccccaacctgtctgtacccagcaggcttcagcccctggcctgggaggggcctggggggagatggctgactatgggtgggctacaggaagaacaacaccttgggtctggcagtggcagtggcacagagagctgccattcgcctctgaggaccatggaggccagaaaaatagctgtggggcctatgaaaaaagccaccagggtggcagcgggaacagcaaatgcagactggctggatggggccagagagaggagccccgcacgagcctggaggcccccaagctctgacagtccctgcggctccaggaagccgctgactctacgaagaatggaagacggccttgagtgctttccaggtactggcacattgccaaggcctctcacgtcccccttcctgcctgaaaatccactgttcatgtgctacttctgccggaggtttagataagaggagggagtacacagttttctgaaggtatataatttttaagccattttgattatgagagtacaggaaaaacataaactatactctggaaatgtatatgtgtatattccatacatacaccccat

SEQ ID NO: 475825 - DNA, 964 bp, Homo sapiens
gtttgatgaaataggagtttttacatcttggtgggagataggccgtccttgccccccacccacacccttacgtttaatttttaagcccaagtgatgaacttctaattgtagaagcaggtgtacatttagggttgagtgacgagttgtcaggtttttctctgtttaagtggctacagctgaatagctcaggccaaacttaaagctcacacttgagacttgacgtgctcagctcctgctaaagaggctccagggcagcgcctgcctttccgggaagctcccctgagggtcaccgaggctgcagagaacacccggtgatgactgcatggatctccttcatctgctgggattcaagctgtgttgctgtattctgctctgctggcactcccccagccccatccccaaaccacacacacacacacacacacgcacatgcgtgcgcacacacatgcgcacacacatgcacatgcacgcacacacgcacacacacacacttcattggttcttcctgcagtggacaactgttaggttttgtcattactgctgctgatggctgtgaggacccagatttggtgagaatgatggttctttgtgtttttaaatcagcaacttctctgggcctttcccccttatacacaggctgtgaggacccagatttggtgagaatgatggttctttgtgtttttaaatcagcaacttctctgggcctttcccccttatacacaggctgtgaggacccagatttggtgagaatgatggttctttgtgtttttaaatcagaaagaatcaacagataattggcattttactctattgctaacttcccggccagcagccagaccagagtgtcctgtggtcactgaagtcaccacctgctcacccgccattgtggcatatccctggattctttggagaggtccccctcacctcctgacttcccatccctacccctcgtccggccaattcc

SEQ ID NO: 475826 - DNA, 1084 bp, Homo sapiens
tataaagccatcactatagagttctgtaccaaacacaggtgccttgtaaacgtggaatcatgcaatatttgtccttttgtgactggcttatttcactgagcatagcgtcctccaggatcatccacgttgcagcaatggacagaatgtccttcctttttaagatggaatcatattccattgcatctgtataccccattttgtttatccagttatctgtggatggacacctgggttgcttccaccttttggctattgtgagtaatgctgctgtgaacccggggtgcacgtgtcttctttgtaaattcccttgccattgggcagacaatgagccatctcactacatgatgcctgcagctcctgccagggcccttggagtcaaggttaggcttgcattgttattcccttttaccatgactctcatccctgtggtgtgtaatcctcagtaaatatggctttgattatttctcccaccttttcagaagttaggatgggagctttcttaagagctgcaacttctgatcctgtcactcttttaagagttgcatcaaagttccaggaattcatccgtctcttctaggttttctagtttatgtgtgtgaaggcattcttggtagccttgaatgatcttttgtatttcagtggcgtcagttgtaatatctcctgttgcatttcttagtgaggttatttggattttctgtcttcttggttcatcttgctaatggtctatcagtttcatttatctttctgaagagccagctttttgtttcatttatcttttttgttgtttttttttttgtttgtttgtttatttcaatttcatgtagttctgctctgatcttggttatttcctttcttctgctgggtttggtttgttcttgtttctctagttccttgaggtgtgaccttagattgtccatttgtgctcttccagactttttgatgtaggcatttaaggctatgaactttcctccaagcaccacctttgctgaatcccagaggttttgataggtttatgactcataacagggatgaaaatcttcactgaaaattagtgaaagtggagtgtaaaatgaaaaaaaaatat

SEQ ID NO: 475827 - DNA, 593 bp, Homo sapiens
ctgtactagtttacattcccatcagcagtgtagaagtcttccctgttcaccacatctatgctgacatctattattttttgatttttcaattatggccattcttgcaggaggacagggcttcctaagagccagactgcagcaactgttattgtcctctggatctagccatctagtgggggctactgggctccaggctggtgctggggaaggtctgcaaagagggaactcacagtttttcgactgtctcacagtgtttgcaatggcaagccacttttttcaaaggctctttgaattcttttggttttcctggtatgttcctgtggtggttcttggagcaaaagttcacaatggtactgttccttacagagatgcaatcttaagctcagattgggtgcagctcttcttctaccgggatgtgaagtacagcaattcagtgcttcaaatatattgcggcagtaacgtttctgagcattttgagtaattattatttcacggctgtcatttcagtgtttcttggggttttaattgttttacttttggggtgttgaataaactcaagccatgctcattgctgtccaaagttaatcactgcc

SEQ ID NO: 475828 - DNA, 1989 bp, Homo sapiens
agagattttgaagtgatttttttttccccagcagaagttaaatgccctccttcaaagcaggtggttctggctggatgatcagaagtgcggctgatcaggcccctgtcgaatggccagagagaagccatctgggatcccttcagtgcccctgtgtgtgggcttggctggcctcatgaaccacacagggatttttaatcaccaatccagtccagtgaatggctcctgttatttgttgcatgagaagaggaagaagaagaagaaggagaagaagaagagaaagagaaagaaagaaagaaagaagatagaagaaggggaagggaaagggggagaaggtgacaccgggcttgaaactttcacctgcccacctggccacacagaccacgcacctgttgtgcaagagcccaagaggaaaacgccctggagcctcacagcaatatgtgaaaggagcagaatatattctgcagaatatattccaggagcagaagaaaacagcaagctaggaaaagcaagaggcagcgctggggactcacctgcccatatggtgattcctatctcttccccagacctaagaagataatcatgtacagttgcacagttcttacactgaacaaagacagcaggctgaaatccattctacactgtactctgtgtgccctggcaaagggatgcttttctaaatctggacagacaggactcattttcctaatttgcacacagctaccttgtagggtagtaaaccagctctccccacctcacaacttctctcttgtgttactgctgcatgcagggctttgatgacaagtcacacaggtgttctgtgtttaccagcatcccccaaaccttgcactaccaatcccccaatgcagaagcacaggagacagagttgagcctctatttcctacactttgcctgtgcgacagccttacaagttgtggagaacattgcacatgctgaacctttaacgtggacgatgaatcctgtgaagttagggaccccagctgttctgttccccaccttcctagcaaagcccccagcacacagacggggctgcagcaacgtccattgaatagctcagacatccacttgtctgcaggaggctctgctcccccatccttcccccaggcctgcctggtcccttgggctggcacttatgcgtcccacagcatttggttcttgatcttttccttggtgaaaccttccttgcaactcctgtacaaagctctttgggatcggacccatatgccatgcccatgatggctgccaactgtgggtcccctttctatcctgttcaggcgtcaaggacaggggcaatggcgtcttcattttgtgagtccaatgcccagtgcactgtttagactgcggagaaatgggtcttcagtgattaaataagagtccctaagattttgcttctgagaatctttcacatctttaattaataacaataataatacttagttactgcgttacatattttccttatcttgaattgagaaacatttcaaacatacagaaaagcagagtaatacaataacaactaccaccttctactgaggccagacaaaagctaatatttactacgttgatgcaggcttttttttttttttttttttttttttcaaaataaagcaccatgaatacaggtaactacagataaacctctctgtctccatttcctgtccccctgacacaacttctccactcaagttggtgtggcttcatccatgtatatttttggcttttactacatatgtatgtgttcaaaaactatgaactcttctgtgtatttaaatattacatatatcggattacatggcatgaaacattttataacttgcttttaaaaatttaacacttgaaatttttccaggtagatacatgtagatccagttcattcattttatttcaaaactgtattatttcaaaactagagtttatcaattccatgaaaacctcatcattatgcacattcttgtactaatctcctggttc

SEQ ID NO: 475829 - DNA, 520 bp, Homo sapiens
cttcagttgctgataacgtgtcagtattcattcctgaattgtaccaaatgaacgctataactgtgcaggagaaacaggctgtgctgaaggagctgctggacaagaagcagtcagaggatggagccatcctggggcctggggaaacaataaaactgaacaaaatctatgcgcccctggacagcaggcagtgcaggaccatggccctgaagagcagggaaaatgagttaagccacactttcaccctggccatctccctggaggtactttctgggtcgctcagggagatgagcacaaacacagctcagcgctcctgctgcactgaagaggtgacgggagcactgctcaacgcctgggacaccggggcaggcaccggagatgaggaacgggagggccccggggacacagggcacccgctggctggagagactgcagggaggatgtgggacattcagatgaggtcccaggaacaaggactacacccctgagaatggtccacaggcctgaataagcacaaaactcc

SEQ ID NO: 475830 - DNA, 533 bp, Homo sapiens
tggacctaaacaaatgaacaggagtctgacttgggatgagtgggcaatgccaaggcctgtacgagttttcctgtggctcttttccaactctcagctacaggaaccacacattatacaagttaataataatcacatccttgaattccctgctcccgtccacaccataaatgccctggtggcaaccgcctcctgcaagctcttcgggatcacagacagctcacagtgcagctcctaccttctgcttcggaagcaaagtttaccttctttgaatagtttggtgagcccagaggaaacactggatctccatggaaaaatcacccccataaagggaagcagaccccgacctgggccgcaatcttcacccagccctccatcttctaaaaataacagcgccaggccactcttccttccagctgcaggctcaggacagggactttctaaaaaaaaagaaaaagaaaaagcacttcttcctgtttcactagtactagacacagatggccaaggactccccacacagatgccctaaatttcac

SEQ ID NO: 475831 - DNA, 748 bp, Homo sapiens
tagcaactccttcacaaattcataccttttctgagaggaaaatggtgacagggctgcgtggacccattttatcagctcctccaaaagtggaactggccctccctggcttgcccgggctgagactcctgacttcagcactgaatttggcggccacagaacgggccgggaccggctgcagggtttcagttcgagtttgctggtacctggctggctacttcctgaaaatactatgttccccacccccaaaatcatctcgtgccccacaggggaagtctctagagccaggcccacccggggacagcagagcagagccctccctctacctccaggacctaaattctgcagtagggccatctgccctgacaccttccaaaagggtcatggtagaagatatgaagcagaagtctgcgaggatttcatcttccaactttgaggaccagagtgcccagcgtggagcagggacagaggagaggtctgcgggtgtgtctggaggaccaggttgggagccttgcggaggtttctgtcctggagccatcaaacgtttcctggacacccaagggctgcatggttgtggcaggggagaggtggagactgttgatgaggagcactcaggacgtcagcttttcttgtctgaattggccaatgaaagtaaggcctagcaaactctgaaaacctttggagggaaataaacgcatggaagttcatcagctctggactgccaaatgcttccctggcagagctggagaaa

SEQ ID NO: 475832 - DNA, 690 bp, Homo sapiens
cctgagctggtgatgaaagctggatcattgagtaccatctgctctggaatggctgcagtgcaagcggatgtttgccctagactgggggtacctgctgtgcttgggactcacttcttgaacagaggcaaccaaagggtgttatctctctggttcctaaggttggttccaggccagcaaacaacagggggtgccccaaaaggtgcccccagaaacctaggctcccctatcagggtgcatcgtgtgggcagccccctcttgtgcacacttctctcgaatgttcagagaaagggcgttcgtgctgagaatttggctacatttcatcccagcttcccagggactgtgatgcttggcgtgtgcctggaccagggtaggcactcattttcctacctgatgtgtgggaattctggggttgaattgcttctctttgtttgcgttatcatagacacctgccaacatgtgtgtgtgttggagggtgggctatgacaacaatgggattttcctattttaagggactgatctgtgtaaaccaagaagtgtctttcttcaaatatgaagcctgattatctcaaagtaattgcttgtgaggattactttaactcttcacactgctatagagctttataattcacaaaccagtgtcatatacagtgtagcatttcacgtgactgaccgtaattccttctttgtgac

SEQ ID NO: 475833 - DNA, 670 bp, Homo sapiens
acaggaaaatcaagaactgtgaactgccgtagcatctgctctcactcccagggagggcagctctgggaggaatggcccacggagcatgcgcagctgtggccttccagcctgcccctctggccctcaggtgccgcggtctgcttctcttcttgtcttctgtcttttcaccaccataccggcagctcttggcgtttgttagcaccttccatccatccaagtggcttccagagaattatctaatgaattcataccagtccacagctaaggtgcatgtaataggaatgagagccacctgtgtttcagaaagcgtctgggattttagagctgcttgtaactgcagcctaacacagcctcagccgactgatacatccagtgtcgtcaaaacagagcaggtattgttccattctgtacagtttaaccttaatcgggaccctcatgtgcactgggatcctgatttgggttcatggacggaagacgcccatgtactgtgtgctccagtgctccaggttgtggcacatggccatcttcaatatagcagtccactctgaatttaaatttgtcaccattttccttagagggaatgagaaggaaaatgaatttaatttagtataaaaaataaacatttctgggcactggaaatgtctgtggtgttttaagagctgttatcatt

SEQ ID NO: 475834 - DNA, 863 bp, Homo sapiens
caagagttgttttttagggaccactttgctgcatagccagggtaaatgcccactgccctcatgcccatgaatcacgagtccctggaagctgtgggagagaagtcatgtggaaatgagaccccagtcgagtggtataactgtgggagtgacgaccgtctccggtcctgtccttcatcccaagatgagcagactccattgatgtgcatttcatatttcctgcatgtctcggtgcagaccagcccccctcaaattttcaatggtcacatgtggccagtggctatggtgttcaactgtgaagatgaggacatacctctggtcaggaagcacagcctgggctccgatgctggtgctgctcctgcttacggatgtgactttagacatcgtcctatcctgctggaacccaggcttcctcaagtcaaaaatgaggattttcatcggggtaattcaggaccacattctggtagagatcatcagttgtgagtaacacaatttgatgtttgaaaaaacatgtattgaaaacctcctgggtagcagacattgggcttggatatgggagcttgatgtttaaaaagacatggttcctggtggtgagggagacagcatttgggaactccctgtactttctgcataatttttctgtgcgcctaaaactattctgaaaaatagagcctatatatattttgaaaagatgtggtccatcattagcctgactgtacctttgtacaaattagacagaggcacctctttctgaaaccaattttattgccaacaatcagaaagttgtgctaataaatgtatatgtattacatatatgtatatatttataaatacacatacagcgaccacaatgtgaatgatgcttc

SEQ ID NO: 475835 - DNA, 2006 bp, Homo sapiens
ggttcggaaacacagacagggcctggaaccatgcttgtgttaacacccttggctctgctgatcgtccctcaaaatatttcagcacatggtgacctgagccaagctacaactgcagcaaacccagacctgactcacctgtggatcagggcaatggacctgcccttctgcagcctggcagaatccatctcaccactctctgcagcaaacccagatcctattcacctgcaaatcagggcgatggacctgcccttctgcagcctggcagaatccagctcacccctctctgcagcaaacccagatcctattcacctgcaaatcagggcaatggacctgcctttctgcagcctggcagaatccagctcacccctctctgcagcaaacccagaccccattcacctgcaaattagggcgatggacctgcccttctgcagcctggcagaatccagctcactcctctttgcaggaaagtatcatctacttcactcttaactattcctttctacaagaatacccaacaaaaatcaaatgtgataaaacatgaaaaagcaaggcaatgtgacccatgtaaaataggaaacaggcagccaataaataataccataccaaagaggtatgagtaaaaagtacatgtaacagataaaaaattacgtactagaaagtatttgacttgttcaattgtttaaaaaagacagaaaaggaaagaaactgggagaaagaacaagagggataaataaaattatatcccagcacagaagacataaaatgtgccatgtcaataacaacctgaattataaatggactagacactccaggtaaatgacagtgattctcaggcaggtaaagtagcaagactcaacttcaaactctataaaaaatgtattttaattattaagacactggttgaaagtaaaaggtcttaaaaaaagatatatcatgcaaattatgcataagaaagttgtgtggttattttactatcagaaaaaaagtaaacttcaggacaaggaatactactagagattcagcaacacagtttataatgttaaaaggatcgatgtatcaaaaagacaaaaatatgcaaagtacatatacacctaaaaacagagcttcaaaagtcataggacaaaatataaacagaactaaaaggagaaataaacaaattaattattacagttataaattttaatgcttcttttcctgtaattaatgtaacaaatatacataaaatcagtattgctttggaagatttcaacactatggaccaacttgaagtaattggcacatatagagccctcctcccaatagctgtagaagacaagtccttttcaagtgtacataaaactttcatgaagatcaatcatatgatgggtcataaaaagtctcagtaagtatcaaatatttgaaataattctgagcatattctctgtttttgtatgtgtgccgtaaggaaggggtccagcaccataattttgcatgtggatactgagcaccatttgttgaaaaaatgatttttctcccatgatatgctttggcaccattttcatacatcaattggccacaaaagtatgtgtttcacttctggactttcaattgtgttccacagatctatagttatatccttacttcaataagatactgtcttgattattgtagctttgttctaagttttggaatcaggaagtgtgagtccttcaactttgtactttttcaagaatactttggttattctggtttccttgcatattcatatgaattttacaatcagcttatgcattttttgaaagaacccgctgggatttttacgggaattgaattgatctttagatcaccttaggaagtactgccatcttaacaatattgtcttctaatccatgaacattaaatgtctttccatttatttaggtcttttttaatttccttcaaggatgttttatagcctcagaggacaagttttacacttgtttttaaaactgtatttccttgatgtttattgtttttaaggctatgta

SEQ ID NO: 475836 - DNA, 2566 bp, Homo sapiens
agtctgcctggagagtggggagccaccatgggagtccgagaccacggacaggacaacagaaactcactgctggggctcattccctttgggcagccccaggcagttacaaccaggatgactgcgacgctgtggaaggagcttgcagccagtggcccttctgcgtgggcctctgtgcggagcatgggcagaaagaaaggaaccaacgtactcagcaaacagtgctcggtgtatctgctgccaggcccagtgctgaaccctccagggcctcaccgagggtccatgcagatcttagctattcacaccggatgctcctggagccaggatgcggtccttcagaccttggccatggtcctgcttgcagggtcctcaccaaagcacagggctgcccctctggagggaaaaagcctcaggtggtgctgctcctgccttcctgtgaagtctttccagtctccccacaagcatgggttgagcacctactgtctcccttcacaaggctaagagctggggatacagcagagactagacaaagtgacagtcaccttttctgatgtggtttgcccaagcagtgtctgaattaaatctcgccagttgaagcctgccagggtgctgctggtccagagagctcactggggctgggcaggaaacattgtggcttttgcaccctggctaattccattgcgcagctttcaatgccactctatttaaatccctgtcagaaagcccttaaggacagccagttttatttactgtcaatgtaaccactcctttggttgatactggcctaaacacctccaggaaagaaagcccgggctcatcaactggacctccatcctgccgaaggaacaaaggaggcttcctcctctccttggcatatgtgcatattaaaaaatttattgaacctattttaatatccttcgactaatgggagagttttaagacctttctaagtatagtagtagtaaatcctgctgcgtatttcacccaaagatccaaaataaaaatacctttgattgagagaggcgagtcgcccactggggcccataccttcagtttcagtagctcagttcaacatcaacaacaacaacaacaacaaaaaccacattgtagcaatcagccctctaataagcctctaactcggtttctaccttatcccaaaggtataggaaatagcactgctttttttaaaatatcaagaaaacatcatttgctctaaaatgtccctaaaagcaggtctaaattgccaataaaggctaggtaattgtatcagcatggatcagaaagcatttctcaggcccgatgaaagagtttgcagggctgaaggactccaaagctgctgcccaatcccccccacgcttagtcaacagcccgcaccagcagttcgaagggagattttcagcacaatgcaatttcccttttaaagccaaacgcctctctactccccccattctcattttgttctaatttgttaaacttaatttcttctgaggagttgtctggaagctcaggtcaaatcagagaaactttctggctgtttgtttttgaaaagcagaacgttctccttcctaagcctctgggtctgaattacttaattattctctccttttcctcctcgtccaggtgaatgatatatgcactgaaaaagcaaactgcatgggtggcttgtcttcttaaccacatcaccagcctcgctctccaccttagagcactataatcacttgactagcaaacacatatacagtataaatatttaagaaaaagtaaattctattaagccactgtgtgatagatgcagtggtaggtacttatctttgaaatattaaactctagacatttatatccatacaaaaaagagtttcctgccatttgatgagaattatgtgcctggcactaataaaatattaaactccaatttaaaagataagtatcttatccacttttttcataataaaacattttacagtgctcaagaaagccaatatgcatcagaatttccatacaatactgtatttacaaactttcataaaagttttgtgtctgcatttatcagtggctggtttcacactagcatcctgatcattctccctaatgatacggtgcatttcaataatgcatgatggaaggtgtacaaacagcgctttgtttttgtgtatggtaattccatatttttggttagtggttctccctggcaattaattaaatggaggtggtcactaagattgcattatcccttttggtccccattatataaattaatgtcaaactgatgcaatgtttcatgtttaaaataacagatacaagtgttaaaaattatagcctgcagttttcctatttgacaatgcattattttcagctgcaaatgtcagtttctaacccctgccaagaatattgtggcgaggcaatgagtaataagtgttagttatcaaatttagtgtcttttgaaatttgcccgtgttgccagggtgggggtggggaagcagtcgatgcacttgtgtaaatttatggaagctccacttccagagccctgtgggaaaggaaaaggattctagcaggcagctagactttccac

SEQ ID NO: 475837 - DNA, 1396 bp, Homo sapiens
cacgagtggaatggcatggattggaatggaatggaatggaatcaacccgagtacaggggaatggaatggaatggaatgcaatggaatggaatcatccgtaatggaatggaaaggaatggaatggaatggaatggaatggaatgcaatggaatcaactcgattgcaatccaatggaatggaatggaattaacccgaatacaatggaatggaatggaatggaatggaacggaacggaatggaatggattggaatggaatggaatggaatggaatggaaaggaaaggaatggaatggaatggaatggaatggaatggaatggaatggaatggaatgcaatggaatggaatcatccgtaatggaatggaaaggaatggaatggaatggaatggaatggaatggaatggaatggaatggaatcaactcgattgcaatcgaatggaatggaatggaattaacccgaatagaatggaatgcaatggaatggaacggaatggaatggaatggaatggaatggaatggaatggaacggaatggaacggaatggaatggaatggaatggaatggaatcaacgcgagtgcaggggaatggaatggaatggaatgcaatggaatggaatcatccggaatggaatggaatggaatggaatgcaaagcaatggaatcaactcgattgcaatggaatggaatggaatggaaaggaatacattggaatcaaacagagtggaatggaatggaaaggactggaatggagtggaatggaatggaatggaatggaatggaatcaactcgattggaatggaatggaatggaatggaatggaatggaattaacccgaatagaatggagtggaatggaatggaacggaacggaatggaatggaaaggaatggaatggaatggaatggaatgtaatggaatggaatcaacccgactgcaggggaatggaatggaatggaatgcaatggaatggattcaacttgaatggaatggtaagaatggaatcaacacgagtggaatggcatggattggaatggaatggaatggaatcaacccgagtacagcggaatggaatggaatggaatgcaatggaatggaatcatccgtaatggaatggaaaggaatggaatggaatggaatggaatggaatggaatggaatggaatggaatcaactcgattgcaatcgaatggaatggaatggaattaacccgaatagaatggaatggaatggaatggaatggaacggaacggaatggaatggattggaatggaatggaatggaatggaatggaacggaaaggaatggaatagaatggaatggaatggaatggaatggaatggaatcaacgcgagtgcaggggaatggaatggaatggaatgcaatggaatggaatcttcc

SEQ ID NO: 475838 - DNA, 699 bp, Homo sapiens
agggtttttgtggtgagatgaaatggctacattaattggtcagacaagactgcaaatagtaaaactgtgtgaaagtaacacagataaaatcattgttcctttaaataaggaacagttctacaataagcctgtcagaaatgcaaataaagatgcctccacaaagacaaaaaacctgaatcaagcatcatcgactcaccaggtctgctggagtttgctgggggtccactccagaccctgtttttctgggtatcaccagcagaggctgcagaacagcaaagattgctgcctgctccttcctctggaagctttttcccagaggagcccctaccagctgccggctggaactctcctgtgtgaggtgtccgtcgacccctgctgggaggtgtctccctgtcaggaagcatggggattaaatgaaatggttaaggatctggaagaggtgaatacagttgaagaatagttatcttgggatgggaagaaagagacacagagagagagaagagaagagagaaggagggagggagggagagattgagagctagtgtaagcatgacggagtgcacaagctgagagcaagggcaggaggttcacagagaaaatgattggtgttaggaatttcaaaggtggaatattcctgttgatgacttcttaaacatgtgacactggcaaaagggtcgctgatatggaaggatggatttc

SEQ ID NO: 475839 - DNA, 764 bp, Homo sapiens
agatataattaggagattatcacatcaacctaatttatgccaggctataaatgactgacactcctaaagaactaacagcagctgagcagctgagcagtgcccccttctcacagggattcagagcaagccctcggcatcttagaagacgagttgcagcggccgcagctgcccgtctggaagaagtgaagcccgtggtggaagttcaccatcagagtgagcaagaaacttcagtgaggaaacgaagaatcaagaagagcagccgagtccagccagaattttatcactctgttcaaggtgcttcaatcaggaggcctgtgtggcctttatattgttataaggcagcaccattgtctttttctaacctggtgccctgttggccacaatgccacctttcttcagaaactcagggctcaactaggagctggtcttcatccccttctcacatcctgagcacgttgttctgtgtgctctgatttttctttccttggttctggctcatgggctttttaccaaggctggggcttagaaaatgccattttaaaacttgtaaagtaattttatgactgcaataattttatttgctttggcattagaaaaaagtgtctgtatggctcatctctatgctgtggggagcctgttgttgtttcttgtgccaacataggggagccatcaagatttggcttgaaaatgtctttgtaaattattgaaacagaactgcccttctgtgggggtaactgtgtggcaggcacatgtggagactgtgc

SEQ ID NO: 475840 - DNA, 1085 bp, Homo sapiens
gcagcatttgcaaaaatcccaggcatgtgaggggggcatctggaggaggcaacaatagaagcaaagttgtgaggatacatgaggagaatttctggtggtcctattgagctggaatttaggaagatgatgagaaatagagatggagaagaatctaataaacagaggtggataatagactgtgaatacctgagcttcagaagaactgagcggggtgagggaggagggatagatggaaatggaaatggaaatggcaatgaggagcagaggccactaaggtgcaaggctgagaggtcctgccatgagcacacagctccatgggacccccttcagtcctaccttctggagactgtggaaggtgatgccaatgacagcatgtggaatctcttacaaagttggtgttcttgcagacagccaagaatgataaacaaaaacacaaaaatgatgaaacacaaaaatgataagtcacaacttttacatatattctatccttctaccaggaggactacacctttttaatcacttggaaagccatactcaaatttagaattctcagactcctgagagggaaagagggcttgggactcacttttcagaactgtgttttcagaattgtgtctttacactcaagcatgcatggatttataactctttttagcatttcttgtaggacttgtctggtagtgacaattctctcagcatttgtttgtctgaaaaagactttatttccccttgatttatgaaacttagttttgtaaaataattcttagccaacagttgttctgtttaaggaggttgaaaatacgacctcaatcccttttggcatgtaaagtttctgctgagaagtctgctgttaatcttatgggatattactttaatgtttatagttctttgtaacctaatttggcctttggtgctttcagaggtgaagaatttgtatgagttccttggttttttgtatgaatctttgtattatggctttgtcagatgttgattttagtagcaacgtgcttggtgttttttgtcatgaaatctattttatctgacagtacaagtgagtctctgaccatgctgggctgcctggaatt

SEQ ID NO: 475841 - DNA, 912 bp, Homo sapiens
ttcagagtcaaaatataattaattgttgtggttcaggttcagaagaaccctatggagcccatcctgtgccgtcccctcctctcagacagcggctgcggtgagaagcagggctgggtcccttttggaccttaccaggtacattgcggctttcttgaattcagcccccaaaggcttatcagacatgagcttttagaagcattgagggtgaagccacatctttcagatacacaggttccagaagatgactctgccacagcagagggactgctctgttttaataacttggcatccttaataatattccattgtagcgatataacacttttcttatccattcatccgctgatagacatttgggttgttactgcctttggctttatgagtaacattcctatgaatattcatatagaagtgttgatgtggatatatgtttttgattttcttggctatctactgaagaatgaatttgtcaggttataagttaactctacattgaacattttagagaatggcaaactgttttccaaagtggcttaatcatttttacaagcccactaggaatatatgagtgttccaatttctccatatcctccctaacacttattgtttttcttattttagccatcctagtggtataaagtgtatctgcttgtggttttaattttcatttccccaatggctaattatgtttagcattcattcatgttctcattggccattagtagatcttctttggagaaacgtctaaatactttgtgcattttaaaactgtctttttactcttgagttgtaagatttttgtatatctggacacaagaatctaattgtatagatggtatgcaaatattttcttagtatgtgggctgtttactttctagatagtgtgatttgaagcacaacattttaaatttt

SEQ ID NO: 475842 - DNA, 643 bp, Homo sapiens
agcaggcatttcaacctcgtcacgaccttccgtagcctctctaatgacttctctgctagcatcacagacatatcacaaactttgccccacctctaacactggagattacaattcaacatgtgattggggcgagtacgcagaggcaaaccctatcagtcaggtagctcctttgttggctgcctttggaggtgagaagtgctatggtagcaaagggcagaaagaaaaagaaaaacaaatattaccaccagatcccctgaatgcccatggtcactttagcaccacccaacatgaggaaaagtatgacgcagaaaaggtccttgtggaaagaaacaggagtttcacctggttccagttaaatgagcaaaaacatatcaccatttggtgtccaaaaaataacaaaaggaaaagtgtcaaaagatctagtgagcaacttgttcatgtttcttcctgggataaatctgaggccagctttgcaacagaatcttccgggaattaggagggagtcattaatccttcaaactaggatgtcagaatgttcagaaaacacctcacatgcataagacctttctaaactttccagattataaagggctttcagagacttttgttcaatacgtgatgcaatagaaacttagtcgtaatg

SEQ ID NO: 475843 - DNA, 625 bp, Homo sapiens
gtggaaactggatgtttgactatgggtcaagtcaccatgccacctgaattgcctatcatgaactgggtgctttcagaaccatctagccatgaagtgggttgtgcacagcagcattccatcatcgaatggaagtggtgtataagtgaccggactcgagaaggtcctgaaggcaaaagtaagttacatgaggaagtggctcaaatgcccatggtctccacttttgccaccctgccttctctaccccagcctgcaccaatggcctcatggggagttccttatgatcagttgacagaggaagagaagactagagcctggttcacagatggttctgcacaatattcaggcaccacccgaaaatggacagctgcagcactacagcccctttctaggacatccctgaaggacagcaatgaagggaaatcttcccagtgggccgaactttgagcagtgaacctgattgtgcaatgtgcatggaaggagaaatagtcagatttgcaattatatactgattcatgggctgtaagccaatggtttggctggatggtttgggacttggaagaaccatgattggaaaattggtgacaaagaaatttggggaagagggtacatgtgcacattgtgcagg

SEQ ID NO: 475844 - DNA, 886 bp, Homo sapiens
ttcaaagggatgtggtcctgtttggaagtggcagaggcatgtgtaggggatgtggtctgtaatgcacagttggcctcttaccttaaagcttgctcagcaaatggaaatccgtgtgatctgaaacagtgccaagcagccatacggttcttctatcaaaatataccttttaacattgcccagatgttggctttttgtgactgtgctcaatctgatataccttgtcagcagtccaaagaagctcttcacagcaagacatgtgcagtgaacatggttccaccccctacttgcctcagtgtaattcgcagctgccaaaatgatgaattatgcaggaggcactatagaacatttcagtcaaaatgctggcagcgtgtgactagaaagtgccatgaagatgagaattgcattagcaccttaagcaaacaggacctcacttgttcaggaagtgatgactgcaaagctgcttacatagatatccttgggacggtccttcaagtgcaatgtacctgtaggaccattacacaaaggttagaccatgcaaccttcgacgtccccaaacttccccaggcccctacccctagatccctagctgtaactaccatatctgcaggtactgtttctagaaggaagtaatggatatttactgtttcatagcaaaccaaatctttatatttattgaaaatgtttgacagacatagatctatatctacatctatatctatatctatatctgtatctatatctatatacagatgcatatttacacatttatatttctatttttctttacagatacttaggagatgcacattagccaatgtgctaaaaattgtgatttgttgtatattatgtaataggcatacagctcagagtttatggttttgatttc

SEQ ID NO: 475845 - DNA, 511 bp, Homo sapiens
cacaacaggccccggtgtgtgatgttcgccttccttctcagtaacgttagtccatctgaactccgcagaacaaacctcagagtcttggctccttgtggtttctcagcttctcccagttttggcggccttgtccctccatgcctggccacatctcatcaggttgtgaagagaaggatgtttgccaagggcttcacagccatcttcccaccagaaggaaatagcctttctgggaatagaactggtagagaagaatgcagagagcaatgcttacgtgatgcaaatggatgtaaacatgcttggagagtaatggaagatgcctgcaatgattcagggattaaaaataaggctgctataaatattcacatacaagattcagacaaacataagctttacttcacttatgaaattgtggggtcacatggcatacaaaaaccttgcactcgatgagagtttcatatggacaagacctaaaggagaaagcctaaatattcccgatggacttcgtaaagga

SEQ ID NO: 475846 - DNA, 657 bp, Homo sapiens
tccttgcgggggattgtgcatgtctctgccccagcctctccctggggaccctctccaccaacagcaatggagcgaaaagcccgatgtctgggggactccagcagagcccctcgtgactcttccccctgcttcacggtgatgcctgcaccagcccacagtggaagagagaagctccttgtcaacttctgtgtggcacaccgttccaagggatgtcgggggccagactcccccaggaacaagaaaggcaggtgcagcgccactaatacggcttttaaaagtctcacaaaaccaacaaagcccacacggagacctcctactgggaataccacatctccaggggccacgcctccagcttccacgcctccagtggccatcactgcctgctgccttgtcccagaaaccatggcaagagtgcccaggcttgagcccacacgggtgtcagtggggtgggtgacacacatctcttcaaaaagcagcatccttgttccctgcatgcttgctgagcttgacataagtggagtcccccaaacccagaactcaggtcccccaccagaccttagtttggaatgactgaactactgatcagtaggatactccagccccagaagaattaggaagggctgaggggcctggggagtggtagctccttcctaagaa

SEQ ID NO: 475847 - DNA, 721 bp, Homo sapiens
ctgcaaccagggggtcctcaggatcctcctggaatctcttcctcagcatctggctcatgataaggtttcaggattaactcctcctgcaaaagatgaggaatgcaccatttggcaagttgggcatcactggatcataactttagcttctttccagaccttactagaagtaatcctatcatccctgctggcaatggtccacagactcctgttgggaacttttgtgggggttccccaggcagaaggctcacagcatttgtgcagcataaatctactgcagcagtaccagctgtggcaggggacaaacattgtaaatcccatgaagtatatggggtcccatggttcagcagagcattttccattgctggggcccttagggatctccaggatttatcccagagtgcccataatggacagtacaaaagtgggaagagtttccaagaaagcaaataccccatcatccaccacaaaacacactctcagcttattcatcaatgtggcactggggtccttaatgtgtggcaggcagagacagagtcttgcttcttcgccgaaactggagtgcattgatctgtattttgcaaatattttcttcaatatgtggcttgtctttttgttctcttaacaaggtctcttccagagtataaactttaaatattaagaaatccacattgtcatttcttctgtgtatatcaaccttttgtgtcatttgttaaaattcatt

SEQ ID NO: 475848 - DNA, 967 bp, Homo sapiens
tctctctctctctctctctctctctctctctctgtcacacacacacacacacacgtgcggagcaggacaggttgaaaataggaatgacatgaacccgcgcggaacagctgccggcgcggtgtccagggcggcaccccgcccggtcccggcccctccagccctgggcccgacccctactacgcctctgcctcgacgcgaacgcggagcccgagcgcgcgtcacgccgtgtggggccgaagaggctgctacccagaggcggagtgcgggctcgcgagggtccccaccccactctcgctcccgccagcacctacggactcgcgtccccgccgcgcgccgactcgggagcagcaccgcccccggcacaggagcctcacgcgcctcttacctaacaggaagttgggtggaagcagcgcggacccacggcacaccgaacgcactccaacagaacccgacgcagacacgcgctttcaaccggcggagacactggcaggagcctgctctgtcacttctcccaagatgatttatgacctgttcagaaagcgcaaagtcatctcctttggaggctgcatcgctcaaatcttcttcatccacgtcattggtggtgtggagatggtgctgctcatagccatggcctttgacagttatgtctactctagaccctgtttgcctgggtatcaccagcagaggctggagaacagccaagattgctgcctgtttcttcctctggaagttttgtcccagaggggcacccaccagatgccagccagagctctcctgtatgaggtgcctgttggcacctactgggaggtgtctcccagtcaggatacacgggggtcagggacccacttgaggaggcagtctgacccttatcagagctcgaatactgtgctgggagatctgctgctctcttcagagccatcaggcttttcaaagatgctttaagtctgctgaagctgtgcccacagcc

SEQ ID NO: 475849 - DNA, 842 bp, Homo sapiens
gggacgttctcagtggcagacgccatggcgaggagcggccaccagcttttgccgggggcttcaaaagcccacgtctgcatcccggctgcgtccccgcaagaactgcgtgctgcaggcaccatctgcgccgagctgggactgagccggcctggctcccctccctttcagcagggcagccccacaaaggagagggcctgccagccccaggtgcaggtgtggaccagcttggtggctgcaggaccttgggtgcaggcgtggatcagcttggcggctgcaggacctcgggtgcaggcgtggaccagcttggcggctgcaggacctcgggtgcaggcgtggactagcttggtggctgcagggctgcaggactgcaggacctcgggtgcaagtgtggaccagcttggcggctgcaggacctcagcctcctgctgcaaggacacagaggcccaggacctcctcccagcacctgagcaccaccctgcttttgcccatggacacggaagtctccagctcccaggccccctttgacatcgtcaggctgctcccctcaccaactcccctacaccatggcttctccctgtctctgactcaacagggactgagtgcagcaagggccctgggggaggtctgggctttctactgccttctggttacagcttctcctcccccgtatctgtccttcctcctggcctaataagtccacattttatttatgtgtgagtacatgtgacaaccaataactaatgtcccaattgaaaaggaaatataacacaaacttaccttagtttgtataatatcaactttctgtctcaatccaggtcttgtccaaaaagtattgattgagg

SEQ ID NO: 475850 - DNA, 552 bp, Homo sapiens
ccggcctggcagccactcctgttccagtgcagcactccaccatgcagaggggtcggagaagcagttgtaggtcacagcaaggagtgggccgtggggatcatggccaggtcgtgaaatccaagtggcacccgccatggcaccagccagaacaggtcccctcctttccaaagggcagagctggggctggccctggagatgctggggtcagcaagggctggggctgcgctccctcctgggtctgtgtcaaaagcagccggcaccgaagcctgtccacatcggccaggccctgtgcaagccgcacttcccagcagacggcacggaattgctgggttcttcctcccacttgccgattaaagacgtcagcatttccccacctgacctcagggcacctcagcaaggagcccgcactggcggctccatctgaacgatgtcctggcttcctgcaaaagtcttcatgtgaacgcggcacgtttcccaaagggagcgtggtggatccctcgttctgctcagagctccctgccagagtgtccccaggttgagtgtttgggaaac

SEQ ID NO: 475851 - DNA, 1318 bp, Homo sapiens
gtaaagagcacctgtgcacgtgatgtttttctgcaagaggcaccgccgctcactgcgcgctcatgggcactgccacttctcacctctaaagggcactgccgttctccgagtgctcaagggcactgccgttctccacgtgctcacgggcaccaccgttctccatgtactaaagggcaccgccgttctccacgtgctcaagggcaccgccattctccaggtgctcacgggcactgccgttctccatgtgctcaagggcaccgtgctcacgggcactgctgttctccatgtactaaagggcaccgccgttctccacgtactaaagggcactgccgttctccaggtgctcacgggcactgccgttctccatgtactaaagggcactgcagttcgctgcatgctcaagggcaccgccgttctccatatactaaagggcaccgccgttctccacgtactaaagggcactgccgttctccacgtgctcaagggcaccgccgttctccacgtgctcacgggcactgctgttctccatgtactaaagggcaccgccgttctccatgtgctaaagggcactgccattctccatgtactaaagggcactgccgttctccatgtactaaagggcactgcagttcgctgcatgctcaagggcaccgccgttctccatatactaaagggcaccgctgttctccaggtgctcacgggcactgctgttctccatgtactaaagggcactgccgttctccacgtgctcaagggcaccgctgttctccaggtgctcacgggcactgccgttctccaggtgctcaagggcaccgccgttctccatgtactaaagggcactgcagttctccacgtgctcaagggcaccgccgttctccaggtgctcacaggcactgccgttctccatgtactaaagggcaccgccgttctccatgtactaaagggcactgcagttcgctgcatgctcaagggcactgctgctctccactcgttcaaggtcaccgcagctctccacggcttaacggcaccaccggtctccacgtgcagccagggcaccaccactctccacccgctcaagtgaatggatttcctaggtcataagatctcccttaagtcccaaccctggcagggaactgagggccagggccgggccgggcgaggcctggtaagacggcgccgggcagctcttaaggctcacaagttctctttcctcatcctacacgtttcttcacgccccgccttttctgagttagtttgaatttcaaaacaaaataaaactaataaaaacaaaaacaccaccccctcaacccgacccccc

SEQ ID NO: 475852 - DNA, 2385 bp, Homo sapiens
acctctcagcagcgaggagacagtgtgatgcagacacagatgcagacacggatacagatacagatgcggatacacagatgcagatgcagatccagattcagaggtagatgcagatacagatgcagatgcagatacagatacagatgcagatgcagatacagatgcagatggagatgcagatacagacacagatacagatatagatacacagatacagatgcagatgcagatacagatgtagatacagatacagatacaaacgcagatgcagatgcagatacagatacagatgcaggtacgggtgcagatacagatgcagataaagagacagatgcagatgaacagactctgtcttatatctgtatgtgtatcttccttgaacagactctgtcttgcatctgcatctgtatctggctctgcatctacatctgtatctgtgtctgtatctgcatctgtatctgtgtctgtatctgcatctgtatctatgcctgtatctgcacctgcatctgtatctgtatctgtatctgtgtctgtgtctgcatctacatctgtatctgcctctgcatctacatctgtatctgtgtctgtatctgcttctgtatctgtgtctgtatctgcatctgtatctgcatctgtatctatgcctgtatctgcacctgcatctgtatctgtatctgtgtctatgtctgcatctacatctgtatctgtgtctgtatctgcatctgtatctgtgtctgtatctgcatctgtatctgcatctgtatctatgcctgtatctgcacctgcatctgtatctgtatctgtgtctgtgtctgcatctgcatcttatctgtgtctgtatctgcatctgcatctgtatctgtatctatttctgtatctgcacctgcatctgtttctgcatctgtatctgtgtctgcacctgcatctgcatctgtatctgtatctccatctgcatctgtgtctgtgtctgcatatgtatctgtatctatgtctgtatctgcacctgcatctgtatctgcatctgcatccgtatctgcatctgtatctgcatctgtatctccatctgtttctgcacctgtatctgtatctgcatctgtatctgtatctatttctgtatctgcacctgcatctgtatctacatctgtatgtgtctgcatctgcatctgtgtctgtgtctgcaactgtatctgtatctccatctgtatctgtatctgtgtctgtgtctgtatctgcatctgtatctgcatctgtatctgtatctgtatctgtatctgtgcctgtgtctgtgtctatgtctgtacctgcatctgtatctgtatctgcatctgcatctgaatctatatctgcatctacatctgtaactgtatctgcatctgtatccatatcttcacctgtacctgcatctgtacctatctgtatctgtatcttcatctgtacctgtatctgtatctgcatttgtatctgtacctgcatctgtacctacatctgtctctgcatctgcatttgcatgttcctttgcatctgcctctgtatctgtatctgcacctttacataattttgtttcaccatgtgattgacatgtttccagcagacccaagacacaggtttcagtagtgctactgatgctgatttgcaggaggtgtgcttagggcctaatgtggatgcccctgtggtcactctggactgtctttctctgccgtctccctcatcagtggtattgttgttgcccggtggtggagcttctcaggaccttatacctttggatctgttctgtgttgccaagatgttcatctgctgccctgtcatccaccagtgccaacttaaaaaactcagatgggctgatagtgcagaagctggccctcatcagcatcttgaggggagaggttcctgtgggaggccctggtttgcaaaggcgtatttaacagtatgtaatattttgtgtttggaaaaacaaaaatacagttttttctgatgcaactacaacaacaaagtcctacaaaacctttctggtcattttgagatttccagaaaatagtaatttcctagggaaaggtgcccaggactttcctggaggctcatgtgagaatatcaaggaggggcagggcgggggccttttttctgtccgcatcacagggctgtgtttaaggatgttgagaagctgtgtggtgggaggagagcagacccttgggtttgatgccgtaatttctcctaaacaggcagtcactgtgcagagaaggtgggatgggagtgggggagccaaactaagtacggcttcacttgagatgaaaaaatcattccaacattatatttcctgcaatgaaatcatcatttaaaagatggccttggctagcaatcattccacagaccattgggcacctgtggtgt

SEQ ID NO: 475853 - DNA, 1175 bp, Homo sapiens
acagctgtaaaccagagaccacgatgcaccctgtggccgccattcaaattaaaggctcagagagcagaacgaacatgcaaggttgcaaagctccatccataaataaggccacagagtgtggccttcaactcccctgttgcctcaggctctggcagcagaagaagctgatggaaacgcccacagcctcttcaggacgggtctgcagccctggtccccgcggcacacagggacagagtgccagggtggtcccgggagcgcccgtccacaccggcttgcagccggagacacccggcccttccagtcagtgtccgcctgcctggggaacacctgctcagggctcccaagtgctcgctggcatcagcagcctggacgcagcctgcacatctcagccccatgctcagtccgacagtccccaccaggtgtgtggccaaatcgcccagcaagtgaacgcacggatgaaggagcgtgcggccgctcagccacggccctccaaggtctcatcttccacaaggcctctctcagagccgaggtctcatctgcaaaagggaagcgactctgccttttccctcacattgacggcgcgttcctgcctggcctcagtccagaggacgctcagctccttcaccacgtggatggagctggaaaaggccctggacccggcgctggaaggagagcaccgatcccagccttgtcgggcggccacgcgcttttgcagggtgtgtgttcgttctcacctgcagaaggaggcggggactgcacggacgctcatgtccctcccagagctggagcttatgggagcctccagcaggattcaggccacagccacacctgcaagtgtgtggtgcttggacccaccctgctgcccggtacaggggaacttcaagtgggtctttatggctctgaaacatgctccttctgcgcggcaatgttgggattaatgtggcattgaccacagaggcaggccgccttttgctttcctctgggaaaaataaaatttaagatcattttcattctatgggttgaacttgacccctgattaccgcgggccaagcttgagtgctgtgaccagtcatcacactcaacatttctaggccatttcgactttttccaaacatgctagaaacagggcctgatttcatttgcacaaatccactcattgtactgattaggaagcc

SEQ ID NO: 475854 - DNA, 696 bp, Homo sapiens
tggctgcggggctctggtggagatgagagaagacacgctccagatctcacctcagccagagatctcggtgtttgggtttggaaagcgggtaatgaaggacatggtgatgaaggacacggtgatgaaggacatggtgatgaaggacatggtgatgaaggacctcggtgatgaaggacatggtgatgaaggacatggtgatgaaggacatggtgatgaaggacctcggaccttggtgatgaaggacatggtgatgaaggacacggtgatgaaggacacggtgatgaaggacacggtgatgaaggacacggtgatgaaggaccttggtgatgaaggacatggtgatgaaggaccttggaccttggtgatgaaggacatggtgatgaaggacatggtgatgaaggaccttggtgatgaaggacatggtgatgaaggacctcgatgatgaaggacacggtgatgaaggacctcggtgatgaaggacacggtgatgaaggacctcggtgatgaaggacctcggtgatgaaggacatggtgatgaaggacatggtgatgaaggaccttggtgatgaaggacatggtgatgaaggaccttcattgaacattgttaatgaaggattattgataatgaagaaccattggtgatgaaggaccattgtacgtttcaaacttctttgcattggtagtttttaaaatatg

SEQ ID NO: 475855 - DNA, 2189 bp, Homo sapiens
gtgtgtgcagctatggaagtgccagaaggccgcaggctcgggacgcttctgggaggacggtcaggggccctggcctggagctggaagagggtgcaggacacacacagggtgcagccagggcaccgccgctcactgcgcgctcacgggcactgccacttctcacctctaaagggcactgccgttctccgagtgctcaagggcactgccgttctccacgtgctcacgggcaccaccgttctccatgtactaaagggcaccgccgttctccacgtgctcaagggcaccgccattctccaggtgctcacgggcactgctgttctccatgtactaaagggcaccgccgttctccacgtactaaagggcactgccgttctccaggtgcttacgggcactgccgtcctccacgtactaaagggcactgccgttctccacgtgctcacgggcaccaccgttctccatgtactaaagggcaccgccgttctccacgtgctcaagggcaccgccattctccaggtgctcacgggcaccgccgttctccacgtactaaagggcaccgccgttctccacgtgctcaagggcactgccgttctccaggtgctcacgggcactgctgttctccatgtactaaagggcaccgccgttctccacgtactaaagggcactgccgttctccaggtgctcacgggcactgccgttctccatgtactaaagggcactgcagttcgctgcatgctcaagggcaccgccgttctccatatactaaagggcaccgccgttctccacgtactaaagggcactgccgttctccacgtgctcaagggcaccgccgttctccacgtgctcacgggcactgctgttctccatgtactaaagggcaccgccgttctccaggtgctcacgggcactgccattctccatgtactaaagggcactgccgttctccatgtactaaagggcactgcagttcgctgcatgctcaagggcaccgccgttctccatatactaaagggcaccgctgttctccaggtgctcacgggcactgctgttctccatgtactaaagggcactgccgttctccacgtgctcaagggcaccgctgttctccaggtgctcacgggcactgccgttctccaggtgctcaagggcaccgccgttctccatgtactaaagggcactgcagttctccacgtgctcaagggcaccgccgttctccaggtccttcgggcctcggcgcgcggaggtcgggggacgtggctggagccccgacgcctggaccacgggaaggacttgcgctttctcagcgtcctgagccaccggaatcccggcctcggcaagggctgtgatctctccggctccgcgtccctgtgcgcaatggcccgggctggcgacccggtgctgctggcacggaggcccccggggtctcgtggcgtccgtttctgaccccagcaggatgtgagtggttctgggagggtgacttttctgtgcattttactgtgttttgctgcccccgcccccaaatgtgaagcgactcccaggggggaaaagctgtcctaaatactgcatttctttccagattttcaacacacatgtaaaatacaagctaaatatttactataaatgacaaactacgtatttactgcaagttacatcatttatacattttactctataatatttttgtttttgtgtttttcctgactgtggaagtaataaatgcttactgtaaaatatttaagctactctaaaataaagaaaattaaacaaaaataccatagtcacatcccccaaaacaattcttatacgtggtttggtgtgcagccttgcagacttttcctatgcataacaacacacattatttattttacagaaatggtttagagtaaacattttattataaaatctgcttttctcataacttgtcatgtccagctttggatactgtaacacacaggtttgcctggttctttcttaagggtgcgtgtactgcatttcttagtgcacgtggttgcctaggttttctgtattttcacaattatgattaatattgcataatattattctcatgcatctatgctcaagttatgcatatccttccacagcaaaaatttctggaagtggacctgctaggtcaagagcaatgagcactgaataccttgatggttattgttaaaggttcttcacatcggacg

SEQ ID NO: 475856 - DNA, 962 bp, Homo sapiens
aaaacatgtgctaacaaagaatggatcagaaaaatggaagttctttcactggatttatcctactgggtttctctgacaggcctcagctggagctagtcctctttgtggttcttttgatcttctatatcttcactttgctggggaacaaaaccatcattgtattatctcacttggacccacatcttcacactcctatgtattttttcttctccaacctaagctttttggatctgtgttacacaaccggcattgttccacagctcctggttaatctcaggggagcagacaaatcaatctcctatggtggttgtgtagttcagctgtacatctctctaggcttgggatctacagaatgcgttctcttaggagtgatggtatttgaccgctatgcagctgtttgcaggcccctccactacacagtagtcatgcacccttgtctgtatgtgctgatggcttctacttcatgggtcattggttttgccaactccctattgcagacggtgctcatcttgcttttaacactttgtggaagaaataaattagaacactttctttgtgaggttcctccattgctcaagcttgcctgtgttgacactactatgaatgaatctgaactcttctttgtcagtgtcattattcttcttgtacctgttgcattaatcatattctcctatagtcagattgtcagggcagtcatgaggataaagttagcaacagggcagagaaaagtgtttgggacatgtggctcccacctcacagtggtttccctgttctacggcacagctatctatgcttacctccagcccggcaacaactactctcaggatcagggcaagttcatctctctcttctacaccatcattacacccatgatcaaccccctcatatatacactgaggaacaaggatgtgaaaggagcacttaagaaggtgctctggaagaactacgactccagatgactt

SEQ ID NO: 475857 - DNA, 919 bp, Homo sapiens
tgcactcaaacggaatataatggaacaaaatggaatcgaacggattgcaatcaaatggaacgagatggaatggaatggtctcaaacggaatggagtcgaatggaatagaataacatggaatgggattgaacggaataaaaagaatagaatggaatggattgtaatggaaacatatcgaatggaatggcatggcatggaatggaatggaatggactggaatggaatggattcgaatggaatggactggagtggaatggagtcgaatggaatggactggattagaatggactcaaatggaatggacaagaatggaatggagtggaatggaatggactcagatggaatggactcgaatggaatagaatcgaatggaagggcatcgaatggaatggaatggaaaggaatggaatggtatggacccaaattgaatgaaatcaaatgcaatggacacaaacagaatggaatcgaaaggaatggtctcgaatggaatttattcgaatagaatggaatcgaaaggaatgcaatagtatggaatggaatcgaatataatggaatcgaatggaatggaccggaatggaatggacttgtattcaccggactcgaatgtaatggattgaaatgtaattgtttcgaatggaatggaatcaaataagatgtaaccaaatagaatggaatggaatgcaatgtaatggaatagaatggaatgcaatggaatggaacagaatggaattgagtggaatagagtccagtggaatggaatgaaatgcaaaggaatcgaatagaatggaatcgaatggatttgactggaatgaaatggactcgaatggaatagactggaacaaaatggaatcgaatggattggaattgaacggaatggaatggaatgaattggaatggactccaatggaatggattcgaa

SEQ ID NO: 475858 - DNA, 491 bp, Homo sapiens
acaccttccctgctgtagccagttctactacactcactctccagtgtccgcatgcttaattcttcctggttggggagcctacctttcctggcagcaggccctcagtgcaactgccataccccttctgaaagcccaacccctggaggcctgcattctgccctggggcagatcacctcttctcttacaggagaaagatgcaagcaggtcacacactccatagatctgactgacaggggcctatcttccctggtgacaggtcagaagcacggctgctttgccccacttgatgattgcagctccagcctgtactctcctaaaagcccactagtacctaaaccatggggacttgaggacaagtccattggtccagtccaggtccgattcctccatgactcgtgtatgctgtccaggggaccatatagggacctgagcatcaggggattgccagtccaccactgctggcacctattcacttttcctagggtctgagg

SEQ ID NO: 475859 - DNA, 856 bp, Homo sapiens
gtgaggagttaagagctgcaggctgataagactacttcatctcgctcccttaaagagctatttacccacaatgatggctccttctcttactctaagtatctcatctaagggagacgtgcagaaaagagctgatcccccgtacatgaggcaattaaataatttaacaaagcagaacacaggaccctcagctgcaggtctgttggagtttgctggaggtccactccagacgctgtttgccttggtatcaccagcagaggctgcagaacagcaaatattgcagaatggcaaatgttgctgcctaatcgttcctctggacccacttgaggatgcagtctgtccgttctcagatctcaacttccatgctggaagaaccactactcttttcaaaactgtcagacagggacctttaagtctgcagaagtttccgctgccattttttcagatatgccctgcccccagaggtggagtctacagaggcaggcaggcctctttgagctgcagtgggctccacccagttcgagcttccagaccactttgtttacctactcaagcctcagcaatggggggcgcccttcccccagccttgctgctgccttccagttcaatatcagactgctgtgctagcaatgagcaaggctccgtgggcatgggaccctccaagccaggcatgggatataatctcctggtgtgctgtttgctaagactgttggaaaagtgtagttttagggtgggagtgtcctgattttccaggtaccgtctgtcatagcttcccttggataggaaagggaatttcccgaccccttgagcttctcgagtgaggtgatgccttgccctgctttggttcatggaccgtggg

SEQ ID NO: 475860 - DNA, 1580 bp, Homo sapiens
tatcagtttgacaagcaaaatataataccattttttggaagccacaatatgacaatccaacttgatgttcaaatgaaattccctgggaaattccacagagctcagcaaggtaacctgaaattccaactaccctatgagagtttttataaagaaaacctgtgttcaacagtggagcacattattcaggaacttaaagacagattttcagaacagcacctcaaagctcttaagtgcttatctctggtaccctcagtcataggtcagctcaaattttacacattagaggaacactatactggcatgtatagaagtgacttaccccatcccagtgtgctctcagccaaactgcattgttggggaatcaaatggaaagacagagggaagagtgtagagcttccatccaccatttatgaaactctccacttgactaaatcaagttttttactaatgtgtatgcattgctgaaggtcctgtgtatccttcctgtgataaaagttgagaatttttatcaacataaaatgaaaatggacaaaagcatctcaaaacatacttgaggaaccctttgacagaccaaagattgagtaacttggctttgcttaacataaattttgatctaaagcatgatctggatttaatggtggacacatatatcaaacattatccaattaagtcagaattccccacagataattcagaaatcattacaaatactgaaaagcttctctaaacgggctttatcttacatttgatatttggaagaaaagctatctatgtgtaatgattactgtcttgtagtttcctgatgttcaatccgatttgtttgtccctttcaaattatatttatcaatcaccctgcatatgcaaggatctatataggacaccagagggataataaactgtactgaagactgtatatatatatacaaacttactcagaaaaaagccatcagttgacaagatgcatgtaatctagagtctgttcacaaaggagaaagatgttaatcaaaatcttaaaacattaaaacataaatagaatttaggaatgtgaaatactatggagggaaattcagttacgctttggtcctaaatttcaggttttctggtgcataaacaaaaagtggggagtgtgatccttaaaggtgtgtctaggaatcttcttaagtcataggaatgtttgactatattggaaaatgacattacagtcagtttatttgagtatgtccactctggatcctgtaggacaattagctgcttgatcattctgtggctactcagatatagtcattggaggtaaaaatgttttaacatgactcgataattacattatataaatttattaaaaaacacatagaagtcaccaagacttatgctttaattttatcctttaaagtgacccagagaggtaaacttgctcaaagttctatgtttagtagcagaatcagaactaaaaatttgcagatgtttttgacttccagattgaggaggaggaagaaacaaagcactattttttagacatgctgaatttgataagcttgtgagatttcctagatgatgtctaagaaatactttgttaattatgt

SEQ ID NO: 475861 - DNA, 518 bp, Homo sapiens
ctttctggcacagctgttctcgcccctgcactctgaagaagagtagatacctagatacatgggatcagagcagtctctttgggtagaactaattttgtcttcctaccaagtggatcctgccagatgccctgtattaagatatcttcacactctggctggtgattatatgatctatttccagccctgtgagtcccaggaattgtttggcctgcctgtggaagcatgtcattgcgatgttcatccctctagctgtcctcccacttcccatggtgatgatgggactaagcgttggcataaaggggccgaagagttgcagcagcttagaaggcagagccagcacacagaggagagacggcctggatggccgctcagacctgtagcagaatgtgctcaagcaagaaatcaactcctactatgttgggccattgagacttggagttgcgacaaaagccatgctctggttgaagattgagcagaatacctttttaaggtgctacagaagtgaggactccaaagac

SEQ ID NO: 475862 - DNA, 689 bp, Homo sapiens
gttgtcaagcaagtgacgtcagttgcctcccaccaggagcagcagtcccgggatgtcaacccactgcatggtttctccaggtcctcctctaaaaacccactgtctgagcaggcaccctctggccactcaaggttccaccaggggactggcagggcaaggagaactggagtttgtgttacttgctgtgtcatggcttatcaagtcctttgcccctgacccaggagactgtctcatgtcccctgccagtatccatggaacagtaacagacgtttgctttaccggctacgaaccaggcactgatttgcctttccacatacaaatctcatttcctgcttatactatgggatgtgggaatcgtcagaaggttggagactttccttccagtgaagaaacacttggtaatgtaaagatatttgaattgtcaggaaccaagagtcctaactctgatgccaatacctgtcacttgaacgagtcatatcttacggaggcatggatttctgttattccatgtattacaattatttacacacataatttttagatcctcatttgtcccaaatttggctattgggaatctctcttatgtaaattggttgattattgtggtctcatgtaattttgtatcctttatctgtgctttctttgtgtttttttcatgctatggcagtcttcataatgaccctacacat

SEQ ID NO: 475863 - DNA, 557 bp, Homo sapiens
gtcatcccttcctgcacctgcttccacgggcccttggcggtagcctgggaacagctggtcaggacctgaggtcttcttccactgtcctcactgggaacgtgaatgccgctgcttcccagatccctgccttcagttcaggtctccctgttgaactcaggtctcatctgtgcaacttcctgctgcacagcttcctgtgaccatctctcaggcgtctcctactcaacaggttccatcatccctacctgtcttgctcacgcaggcatccatgctagcgttcaccccataaatacttctcagacacccattacctgctatcatccttcaaagcttggttcagctgcaagcttcccagtatggctgtgcaaggggcattgcaaagaggtggagggtgccctgtgcacatctgaggtcactgtagattatgacaattttctggtacatagtgataaaatgaatggtgccactgagcaatgtctgagaagatcaaagtctgaggagacagatgtgactcctggagaggcatccaatgggtagttctccacttctgccttgcaacc

SEQ ID NO: 475864 - DNA, 1229 bp, Homo sapiens
agccaagcctgaagctaccagaagccggagaaaaggcctgggacagaatgtccctcaggaggagacaactctgccaacacctggatttcggacttctggccttagaaccaggagacgatacatccctgttgcttgagccctgcaggctgtggtgttttcttaccgcagccctagaaggcggctccagagccccagcttccatatctggggaacgaggtccacttcaagcttcaggtgttccaccagacttgaggcctgtcctcctctggcaaaggatggtctttcagttgccagaactgcgtcatccttccagccggatgatgaccaggaagaacagatgggatgcttatacctgctctgctatccaggaaattatatctttattttttcctctcaattcagagcgagacacctttaaacctgaatgtaacctgatcaaaggtgtcaaagcagaaaggacggttggccagcatggaggcgtggaaacggaacatgagccaagtgcgtgaacattccatgtccttgttaccattttggtggggtgtagatacggagattcaaggagttttctgtagacttcaagttattctttttcttttagagacagccatagaaagccagccagcttcccccatgaatatgaatgagaagcagtagcccaaatgattatcagcagccaattgctatcaagttaaaaagaaagaacttgattacatcattaagctgccgaatcagcaacccaattcattcccttattgtttagactggttcgctgtggtttttctgttatgtgtatctgaaaacatctttagtgctctcttcataaagtgtctgagtcttatgaaaatccgtgtgaagagggtttctttatcctgatgtggaaacggattgtccagtgaaatgcaattaactcaccacaaggcccggcagttagcaaggagtggaactggggctagaaccaggatttcagatccctggcctattgttttaccaccttccctctcctgacaggcagtacaactgtcacctctcattttgtgaaaatcgccaagagtcctttgatcacatagctgcagctcttcactgatgccaaattatgtagcaaatatgcaaacagccatgctgctgaacagaggggccaatcatgttttgtaaacggagctttagcagctgtgttctttgcttcgccctgttatgagaaaactgccaaccacgtgaggtgagtcccc

SEQ ID NO: 475865 - DNA, 785 bp, Homo sapiens
ccagttaacacgtcttctacggaatggcttctccaaagccgatgttcttcgagggctgcgctctggttctggtcgtcttcaaggattggagaagtggctgggacttggtagtggctactgtggaacaggaggaaggagagcgaggggtccagggcagctccctgtcatctggaacagctgcgcacccttccgcaggggccccagaacaccacacactgggtggagaggatgagttggtctgggagacagggactcagcagtcttggagatcatcttcgggaacctggacaaagtctggacaaaatgaacccatcttcggagtatcatctccctcatgggaaggtgactgcaaaggagaaaggaagttaaaagcaaaggtcggggcaggcgcagccgcgcagcctcacccgggctcgtctgtgactcatttccctggaggggaggcttctatctgagagatggagacattcctctcctctgggggcagggagggcacctgtggaacaagggtcttgggcctgctgcaggggccaggggatgtggggaaggggacctacagtgacactcggtgactatgcacggggtcagccaggtgaggaggccaagttcccgctgagaacgtgcagatgcgctccccagagaggtcgtgtgatctcttggtgtaggatctaactgggcagggttatccaattcaataacaaggacttaaatctcattctataaagcggatgagctcacctgatgaggggcaggggtggcccatctgtatgtaatacttgttttca

SEQ ID NO: 475866 - DNA, 779 bp, Homo sapiens
cagggagtaggtacaaagatcacatgcttcaaagggtaaaaagcgtaactactaataagggtctaataaagatcacatgcttctcagggaacacgacaaagggcaaaagcagaactactgataagggtccaacaaagatcacaaggcaaagggcaaaagcagaactactggagtgggaatgctatttgcagggtattcacgtcttcagtaatactagtaataccaaactattttccagagtggttgcattcttacaacttgtaatgaatatgtttctgttaaaattgtcccctggcactcacccttctacttactgtttctatgaatcctactgctatctactcttggtcccttatatcactggagtcataagtgttgatttgacaatattcttatcattccttggaaacttaatcagtttagttaccattctcgttttctcatctttatgagaaaaggtagaaagaaaggaagtgaaatgcccaacaccactcatttttgttaatggtattgataaaattggcaccagcctttcaggaattcggatgctttgattgttcttttttgttgttagatttttgtatccattatgcattttgaatcataataaagtggaattaaaaaaaactgccatatttgtctagcatatatggcgttttatgattttaaagatatttttaaagtttggttaaaaaccttaacagtatatgtgaaatggaacactgtgcttttactgtggaaatttatcctatataccttaataaaatagttatttaaga

SEQ ID NO: 475867 - DNA, 942 bp, Homo sapiens
aatattgagaagcagagaggagttaaagcagaaaccaggcatggtgtctgcattagtgaccatgtgtagccatgaagaagatttaatagtaccactgatgtcttcacacaagctatctggtgaacagctatggaaacaaaatccaaaagatattcataccctggcacagtttatttctgcttactcacttgcagatccagagaaaggcacagctcttagtaaacatttgccatcatcagatagtatgtctctaaaagtagatgttgaggctcttgaaaattctcctggtgctacatacatttggaagggtggaaaagttactagagatagtcaaccaaaggaacaaggaaagggagatttgaaaaagaaaaagaagggaaaattgcctaagaattatgacccaaaacttaccccagatccagaaagatggctgccaatgcaagaatgttctttctaccagggaagaaagaagggtaaaaagaaggatcagatgggaaaagggacccagggagcaactgcaggagcttcatctgaactggatgccagaaaaactgtgagtagcccacccacctccccaagacctggcagtgcagcgacactatctgcctctacaagtaacatcatacccccaagacaccagagacctgcaggggctccagcaacaaaaaagaaacagcaacagaaaaagaagaaaggtggaaaaggtggctggtgatgagaatattcttgttgaaggctgtttttaaactagtctcggtaacattaggaatataataaaggtaatacagcaagaagcacagaactgctccctcttcatctccatattttcataaataattccttgtgtttcaaatggaaaacatcttcctcaaagtctgcctagtgagatatggcctactggttgcctcatagctttgtacagattatgaggactgaaaatat

SEQ ID NO: 475868 - DNA, 547 bp, Homo sapiens
atctccttaaaactgctttgccttccttctttggtattgatatggggaggcagcacaacagcatatctctctctgatgtgtctgcaacagtgatggctgttggctacctcagtagtgaaagctgcccaccttatgccagacagacaactggggaccatgatggcacccactatgcagctgataacaatagcccctaccctctttggttcacagcagtctccagattactgagcttgccagctttggagagtccaaaagttccctgtgaggaagggtctccccagtgcaacacagcctctttgccagatcgtggccagactgcttctttaagcaggactctaatccattcctcctcattgggctgtacatcccagtcaggacttctgccactccagccagttttctacagaaatatctctaatttccctctgggacagagtccccgtggagtggggcaggctgccatgttagctgttctggcttctttgtcagtccagcctctggagcctggagaacccataccaagaagggactgaagggatcctca

SEQ ID NO: 475869 - DNA, 1455 bp, Homo sapiens
gcctgtcttttggatataagccattttaactgggggggcatcccatacctagtaatgctgtggttcttgcagacttgtagaagtaccaccttgatgatcttggacaaggtctgggggaaattctctcgattaccaggtcattgggtgctcctctggctcaggaaaggtccagaaatgccactgaagagtcaagtcctggaatcagggaccccaagagcctgctcagtgctctaccaccctgcggcgatgctggtacctaagggccttgatgtatacctggatattgctgctggttattcagggcccaagggcttttcagttagcagttcagccctagaactcgcctatgagagttgcagtccttatggtctagactgtcatttaagtttacttagagatggagagtactttggctttcagtggtgtggtttgtgggcactcaagttcagaccactggaattggcaattcccctctgattaggactggtttaaatgttccctctgtgggcaggcatcagctgagtttggtatggttttcctttctgctctaacaggacagcactgccagggatagagtaggggtggtgtcagtgattcagggttgtcttttctatctcatcagtgcctctttcagtgatatgaaattaaaaccaggtgaaataaattataatagagtgatgatgttgtcttaagacaacacatatcagttcatcagtatctgttccacatattagcatagtatctgcaataaacttataactaaaccttaaaatcttaaatgttaaagtttagatagattcagaatatacagggctttgcctccattttataaataagaacaaatgacatttaagtaaactatactaatgaaagtatatatctcacaatatggattgtaggctaatttataccttattgtatatagccatatatatatatttaaagttcatgtttggtcataatgatgaccctgaaagaaaaggagaacttgactgatgtctcagttttaaacaaggttaaaattatgtcagtttatatcactttaagtgtttttttaaattttattctagttatttcaaaagagtaattattaacttatatatgatttatctcagttggcaaataaatttaactgaattctaattttcaaccatttgttttagttttttcttttttaataggctactttttcaggtttcatgattggtatatataataattaacctggttaacttttaacttattcttggattaaatgtaatgtgattcttcctggaattttatagaaactggctgatatggtttgcatatgtgtctcctccaaatatcctgttgaaatttcatcccaaatattggaggtgggcctagtgggtggtgtctaggtgatgggggtggattcctcatgaatgccttggtgttgtcttcacagttatgagttctctctccattagttca

SEQ ID NO: 475870 - DNA, 584 bp, Homo sapiens
ggtcctgctctggagatttctaaagccagcaagtatacagaaatatcccatatgatttagggcgtaaatggatcaaagttcagtgacctactacatagaaggctttgaggagagtttcaacgtttggatcctctccacaaaagaattcacatttgctttgattctgtgtttcatatataattttccaaatgctatttgcatattgacacattcaaagttgaaaactcttaattggattattttaaggaggccccttgcctataaaaacaatttatatcaccacaaattagtatgtgcaatacttggaaagaagtaccacattgaaaaacaggagcagtttgccgctaagctacacttctggaaccagcctgactacaatgtttcaggaaaaaccaatttctggatcccagaacttccagggacatctagtcacctccacaagcagacagagtctggtggaagattgaagatgaactatggcttctaagtagcaacagggcaactttaagattttcaagttaaatatgcctgtgtcattttctaccattagtcattcttgaactattaatttaaataatacttga

SEQ ID NO: 475871 - DNA, 5345 bp, Homo sapiens
catctgatagtaacaattctaaaatattttggtttgtgctttcaacatttaatgaatcaagtctaataatgatattcagaaaattatttggggggcaaatttcaagagacttggaatgcccaaaagacaggaagatgtggaaacatttagaacttcctagagacccgtttaatggcgtcaaccaaaatgctgatagtgatatggacaatgaagtccaggttgaggtggtttcagatagagatgaggaacttcttgggaacaagaaggccttcagggaagcccctcccatcacaggcccagaggccaaatggaaaaaaaacggttttatgatcttggcccagggctctcccgctctatgcagcttcctgactcctgatatattgccctgtgtcccagctgcttcagctccagccgtggatataaggggccagctcaggtcatggcttcagagggcgcaagccccaagccatggcagcttctatgtggtattgagcctgctggaggagaacaaatcctttagacaaatgtcaaaacaggacaaaagggcagtaagggagcccccgcccagtgaggaaggatgggtcacggtcaggcctgaagatgtgctcgggccacagtctgccatacccggtgtgttgggctgtgtaggacaactattggaaccacgttgtccaatctccctggctccagcaggggagcagggtgcggcctggagctatagagatggatgccgcccttccccagcccaggcagttatgagtcccagtgttggctgctgccccttcccacaaggaaggaactcaaacagcttagagagcaggcagcgcagctgcggccctggtcgccctccctccccggagcttgacaggcttaagcagattctagctaagaggctgttgaaaatctgcatggctccagggttgagaccctaggccctggtggcgtgggttgaacagggcagcgatcatcagggcccgcactgtaggtatgtcagagaaactttgcagggcggggacctgaataaatatttattaaatttgagcgactagtatagaacttggcatacagtagttattcaataaatggttgtactttttgaccatttgtatctcttcttggaaaaatgcctatttaaatgttttgtccatttttaagttgggttatatgtcttttttattgctaagttttaaagtttctttatatattcaggatcttggatattattatttttataccttgtgaatattttctttcattctgtatatagacttttcattttctcagcagtgtcccttaaaacacagaagcttcatatttgatcaagtccaatttatttatttattttttagttaacttaatcttttggtatgatagctaagaaactattgcctaatctgaattcacaatattttcacctatgtttttgttaagaattttatagttttaacatttacatttatgtcattttaagttaacttatgtatatgatgtgaagtaggaggctcaatttcattcttttgcatgttaatatttagctgtctaattactatttgttgaaaaaactatcatgtctttgaattgttttctcacacttgtgtaaaatccattgaccataaatatataggtttatttgtggattcttaattctgtccctctgatcgtgatccgaatgaagattccaagttccttataaagtagaacagaaattgaaaatccagcccatttctttgtattcatgtttatttgaccttcttagactagacatctaaatgttggattgtcctgttaggtactgtgtttttttttccctccttttatattcatactcaatgtttaagtgaaatcttaaaaaaaaagtttaaagttaaaggtacttttaaaattcatttgttttaagtaaaccaatatacatttttggaatacagcatgtccctttgttatatttagcaagatggattccttgctgtgataagtggagcaattgttaatttcagctcaaaatggattctaacaaagcagtaggtcctgttttcagttaagctgttgaaaagttatttagtgctataaatagtctaaaatattatgctaaatattatctttttataaaaagttactgaaataattgaaatgacatttattgtttgctactatagttggtatgttgctgatttaatcttcacagtaacatagcaatgcagggattacaagccccatgctactgaaacaaaaactgagtaccacagagatcatgacactcctggcatgatgggtactatgtggcaagctaaaatttgacctgagttctgtgttattctaaagtccatgctctttttataatatcatgtgcctcttatttaacattttaatatatttatgttcaatttcagcctaaaagcatacctgaatatataagtattagcataaattcaatattatgatattaactaggacaatcatataatttattgtccaaatatggtaattttgaaagttaaagtggtgctattaattgtgcaatggcaatatgtgtaaacaaggactactcaaatcacatgggacatgtgtttaccctaaaattagaagaactctaatgtaatgcatcacaatataaattagagagaatatggtatagtagaatagtcactatattaagttattcctgttggttctggctttaatagtttttggtggtatgaatttaagcaagtcatatactctccataaaatcagagaaccagattatttctaagactgcaattttgtgtatacagatattatttatattcagtaaaacaaccttttattgattattcgttatgaggaagaaacaatgacaagtgccatgacatattaaaatactttagatgttgaataatgctggaaacgtcttacttagcagacctaaaccaatgatcaaagtattggtagcaattacagttttacatcagtgatgactactttgagtaaattgggctggagataattttttgacaaaacaataaagcaaaatgttgcatgacttagtggttataaaacatcaatttatattaagttggcttcaaactggaagaatattccttcaaagttcctatactgcatggttcacaaattctaacagttttattgcaaaacaccttaagtctaagttaaatgttcgaaatatatgatgttccaaatacaaagaaatcacctttaaaatgtttattttattaaatcttcttactatacacattccatttaataataaataggaagactttatttctcagtcttagtaaaacgtgatttgattttatcatgccaactataaaagtaattttcctaagagtcagatgtttctgatagttaccctttatcattcaacatcatgttgaaataagcaatttttaaaaagaaaaaataggcaatactataagcacgaagaagaacttgtgaatttttttgagaatgcaaaatatgtcatttaaataggctttataattgccttatagctaataaattgtttttttaaattctacctaaattacatttgtaatcaaacatttagaaagtaccacacatatggtttaaatatcacatatacagcctcttgaaatttgttttcagtatattgtaatttgaaaactcagagatcatcttttaaaaatgtctactcttctaatcacaaagatctatctacactctacctgtatcacacagttatcagatgttgctgttcttttttatccataagtagagtccacttactttacagttaatgtacaacttttctttttctatagtctttaaggtacaatttcacagatgacaaaaaaaatttccaataattatgaaatataccctgccaagattacagtatcttcagtatcttagaaaacaaaatagatttcctaagtgaaatgttcatgaaaagttttctaatagcagtctttgttaatatatgattggatttcatatcatcaggtagtagagaaaattttctctaaatacaatggatttattcaagaataaaaataaggattctaatccagaatgtatagaatggcaggccaccagcccatttggtctgggaagtgtaaggggaacttttattagccaaaagagatttacataagcagctcagaaacagagttcattagttccggaggttcagagtctgagttgtcagttagttggtggagatgccattactaagcaagtgttcttttgagaacatcttatctgaattactccagttttaaagaatgtctagtgataaactttataaaagcagagatgtgcgaagggcaggaacgagtttcctgtggtgttttttgaaagtccttgaaaacagttcttatctcagacatgtaaacatgtctcagacatgtaagccctattttgtctgggcctgacaaaagtgacatcatcctgtaatttgcaaactcagagatcatctttcacaatataaaattaagaaatagaaaccctagcaatggtgcaactgtcctgttagatgatgcaaaaccttttttgcatctccaagttctcactttaataacattattattatttgcttcatcaagatataaaaataactaatttcaatagagcacttgtcaattatggttctatattggcttagtatacatatctgtagaagtatattgatactttacttcagtcatctacagttatgttttagttcacaacagaccataaatacagtggtggtcccataagattaaaatggagctgaaaaattcctattgtctagagagtatagcactggtggttagtactgttattaggacctcacttatagcttagggcacttaagtaaatggtcagaacaacagtcacctttttcttttctggaaggtaattattagcacaacctctgtgatcaacatattggagcatatggtggctggagggcttcatcctagttaggctctgttgataaatagcctagggaattcacagtgtccatgcacagaagaaaccatcttcacttgtctaggaccaggttctgatgctcatagcattatcttatggctgactgatcactttttttttaatattaaaatatactttcagataccccatcaaaatttgtaaatcattggagtttctaaatgaaagtatttaaaattatatatattttgctttacttgaccaatactacttcctcattcaccctttggaaaatgtatttctaaagcacataaaattgagaaatatattaacattgttagaaaaatactattgtgaaaaaattaggtgtttccaggactatagaagtaatcattactcccttctgggaataaaaaactaattttacattgctaagtcagaaattctta

SEQ ID NO: 475872 - DNA, 1040 bp, Homo sapiens
gtgatgcccttgatatccatccaagttgtgttagctctctctctctttgcctaccgccatccatgtaagacgtgacttgcttctccttgccttccaccatgattgtacggcctttccggccatgtggaacttattgcaagtactggcctacttgtagatatggggatgagtgtacttaccatcatcttgtttcaccttggaaagccttccctaattgtacatttcctgaaaaatgtttgtttgttcaccaaaattgtaaatacattgcaaactgtactaaaccagattgtccctttactcacatggggagaattacagtactgcctccaaacccagtagctataatgccagcaccaccttctagtagtcagctgtatcactacttcctggcttctaaggaaactgaatgtcacttgtatcatccaaaacactgtcgatttaacattcagtgtacaaagccaggctgtgcattctatcaccccattgttactgtactgccactacataccttggaatgaattctacctcaaaccagcaaatgacatccaaagcaaaaagcggctgcgatggtgtctggggtttgcaggactggttctgacatctcataggaagccatggggacagaaatatttattgaattctaagcagaaatcacttgctttggggaaaattattgcaagacagacaaaatatctcctcttaagttctcagtcagtgaaggagggagatggcattttgggagaggagtcatcccataggagaaattaatcttcaacatcaaagacagaaatctgaaaaaaattacattaagcaaaaatgttgcatattgaataattttcagagagttggccttaagaatgtggcctagtgttttgccaagaatatagaaatatcgacctgattacttgtttaaactaattatagttgtgtttatgtgagtgatttgtgtttttgctgattggcttctttttatgaagcatggagatattaattcatttatttaataaacatttactgattgcatcaagcacattttttct

SEQ ID NO: 475873 - DNA, 790 bp, Homo sapiens
aaggtgccaccagccacaggattggtccctggttccttatttagttcatctggtgacataatgttttcttggatggtgttaatgctagtagatgttctttggtgtttggacattgaagagtcaggccctcagtgtagtacatgggtatctctgctggtattcaggaaccaagggctcttcagtgagcagatgaatgctgccagcactgggtcctttccttcaaagtaccaggttcccttctggcccagggtgtggatagaaatattatcttggagccagggcctgaaatgggggtcccactactctgaccaggtgctctgtcctctgtggctgagctggtatccaagatgcaagacaaagtcttcacattcttccctgtcctctcctcaagtgaaaggatatcttttagatcctggaggtgtacagcttggagttaggggaggggtgatgccagcactccctggtctcctccagctgttgtttcagtatgtcacatgtcccgccatgtatccactgtctctgagtctagtttagaactaggactcacctaaaatttgcagtacctgtggcttagattgtcttttaagttacttggagacacagagtgctttagccctctctggcaaggttttcaggcactcaagttcaaaccactgggataggcaatccccttttggataggcctggtttaatgctccttccataggcaggcatcagctgagattttcctttctgctctaacagggtagcactgagttcaatgccttacaattgctgtgttctgcttccc

SEQ ID NO: 475874 - DNA, 3180 bp, Homo sapiens
gcgcctcgtagctgctgctgggggttggcgggcaggggtgatatcggcagttaaatactgctttcctatggtcttcagtgacactttcattaatatgatggcagtgcaaaagggaaatttggggttggagaccccaaacagagtccccactggggcactgcctagtggagctatgagaagagggccactgtcctccagaccccagaatggtaaatctaccgacagcttgcattgtgcacctggaaaagccacagacactccatgccagctcatgaaatcaggcagaagtggggctgaaccctgcaaagccacaggggcagagctacccaaggccatgcgagccaacctcttgcatcagcatgacctggatgtgggtcatggagtcaaaggagatcactttggaactttaaggtttaatgatggcactattggattttggacttgcatgggagcatctgtgactaccattgcagaagggattcagccagaggagcaggatgtcagcagtggaacacacatcttcaagagcaaaggatgtagcttcaaagcaccatttggaagcagagagcagtcctttcccgacaaccaaacctgctaacactttcatctttgacttatttgcctctaaaactatgagaaaataaatttctcttctttacaaattacccaggctttggtgttttgttatagcagaacaaatggactaagacaaaacctaatccccaatatgatgacattagtatctcacctaggatattatcttaccatacaatctacaatttcactccttggtatttaccaaaatgtatcgaaaacatacgttcacacaaaagcctgtataccaatgtttaaagcagctttacgcatacttgccaaaacttgaaagcaaccaaaatatctttcagtaggtgaatgaataaataagctgtgctacatctggaaaatggaatattatttagtgttaaaaataaatatgctatcaagctgtaaaaagatatggaggaaacttaaatgcatgttactaagtgaaagaagccaatctgaaaaagctacatacagtatgattctaactatatcacattctggaaaaggcaaaactatgaagatatttaaaagatcagttattgcctggggatagaggtgggagataaataggtagaaaacaggatttttaagatgttactctttggagatttagaaaaatatatattgaggacagatgacatttgtcactgtagcaactgtgaccatttagatggtataaaggcattttttaaataacttgtcagtgctaaattaagattttagaaaataacagggctggatagattcaatgtggggtgggggtggggtattaatgtaattgaaaagctctgggaaagagggaagagtttgagaatagggattggcttccagaaaatttattgatgcagctttctaaaaccttacagatttgtatgttcctgtttgtacacactgaagaccagcagatgctactttcatgaaattatgttggggatagtgtgaagagacaacataacacattttgtgagataaaaaatgttctactggagatattgtgaagggcaaatagtatatcctctgtgctattggctaatattttaatggatttttatgtattcaattttttcattaaattgtgatttccctgaatacaagagtctgcatcttcttcactgccatttcttaatttcgtagaacatcttaatttcattagcacatctagcagagcttcgaaacctagttaaagttaagtttactaggttaaatcagtaattagaaaattaaagttattcatttatactttagtttttatatgtctttattccacaatatataattattgttgttttgcagtgtaactttcgtatttatcaacagtttttcctttggacccttataattatctgcatgtccatgcttatatttggagtagttttctcagctaccataaatgattattttttgattccatgaataatttggaagtatactaatacattttcaaatatttgagaattttccagagctcttattttcattggattctaatttaatttcatttttaatatattgaagcttgctttattgcaaataattttatttattttggtacatgtgttatgtacacttgaaatgaatatgcattctgatgtttttgtttggagtgttcaataaagtcagtcctttttaatcacgtgaaaggattgtctggttccatatacattttaaaatattttttctagttctgtgaagaatgccattggtagtttgataggaatagcattaaatgtgtaaattgctttgggcagtatggccagtttaaagatattgattcttccttcctcatgagcatggaatgttttcccatttgtttatgtcatctctggtttctttgagcagtgtttttaaattctcattgtaaagatctttcacctccctggttagctgtattcctgggtcttttattctttttgtggtgactgtgaatgggattgcattccttatttggctctcagcctggctgttattaatgtataggaacgctaatgattttgtacattgattttgtacattgattttgtatcctgaaactttgctgaagttgtttatcaggtgaaggagctttgcggtccagactacggaggttttcagacatagaatcatgtctgcagggatactttgacttcctctcttcctattgcaatgcccttcgtttctttctcttgcctgattgctctggccaagactttcaatactatgttgaataggagttgtgagagagggcatccttgtcttgtgccagtttttcaaggaaaatgtttccagcttttatccatttagtaaaatgttggctgttggtttgtcatagatggctcttattattttgaggtatgctatttcaatacctagtttattgagagtttttaacatgaagggatgttgaattttatcaaaagccttttctgtatatactgagataatcatctgggttttgtctttagtcctatttatgtgatgaatcacatatatttatttatgtatgttgaaccaaccttgtatcccagggttaaagcctactcgatcatcgtggatttcctttttgatgtgctgctgaatttggtttgcaggtattttgttaaggatttttagatcaac

SEQ ID NO: 475875 - DNA, 5693 bp, Homo sapiens
cgcctttcagaataatagtacttacccattgccagtatcccaattgtatattggaaaaaaccacagtgatggctcgggaacaccaacatgccaatagccaagttcagttggtctggaagttcttccaatgtcagtggagaggaagatgtgaagggatttctctccagcagagctgacaaattccagagaatatctccaagagacaagagccttgaagatgaggagcttagtgaccagccatgggaagttgacaacgaccaattgagagcaatcatcaaagctgatccccttacaactacacgagaagttgctgaagaacttaacatcaaccattctaaggtcgttcagcatttgaagcaaaatggaaaggtgaaaaagctcttgaccagcattggtcaatgggaagggcccagttcttcttcaagacaaggccctactgcacctcgcacaaccaatgcttcaaaagttgaacaaattgggctacgaagttttgtctcgcctgctatattctcgccaactgactactacttcttcaagcatcttaaagactttttgcagggaaaacacttcctcaatcagcagaatgcagaaactaaggcagaaaaggctttccaagagttcatcaaatccatttcagttcacaagctagagacccagaacggccattgtaagttccagctcaagtctgagtttgaagtgctcatttggaaaagtctagctaaactaccaggttctcatggatggtttctgtgaacacattatttagaagtaatcatattctcctctgatgatatatgtccaaaccaattattaacaaactttaattaaaacttttataatttgtacatcacatgcaattgtaacaaataatacagagagtttatacaaggaactgacattgatacaatccactgattttatcaagtttctgtttgacttgtgcttgtgtgtgtatgtatgtgtatgccacgaatttaattttagcctttcttgcctctcatgattttaccacttaaatgtcatgtttatctctcatgtacattacggaatctgggaccaagagttacattgtccattttcttttctttatgcttaaccaattctccattcaagcacattacttataaataagatgcatgcaataaataatattaattgattgataaggtaatgggctgattatttcccttcatggctctatgtgcttaagcatttaaaaatagaaatgactaatacttttttcccaatagtgatcttcagtcaggctgatcataaatatcaccaagaatactttcagaacaacaaatgcccatctccaaatggaagttcctgatttaataggtgtggggtggttgtgggcaattttggtttcctaggtgtgtctgatcagagtctggctttggcagtaaagcttttagccatctggttttataccaaacccctccttagagatacagaaaactggaaggcaagcccaatacactcatttctagggtgtagtgtaagacaggaaggtggcaaaagaactcagtgacacatgatgttattagagtaatatggatattttctcaatagtcttttgcttctccatagtataaccactaatcctaagaagagcactccatatcacctttcaaaagcttgcatattaatttatgcttgccttttaattttctgatttactctattcccctctattgcacaggtgcagagaatattatctttctacaatcaaggattctaaaatccaacttaaaaattacaaagtacaatttatgtaaatgaactccccaaatctcaagtctaaactctgtattgacagtaaagaataaagtactgaaaaaaattaatgggctgtttacaggaataaaaataaaaatatcatcaacatataaaatttgagggcttttttgtcctacagtagctttaatatccatgacattttatactttacaaacattgaattattttgacattataaaaagcaacttatgctgttaagtaaaaatgtaaaacaaaacaaatattaagaatttgaaatatattttatatatcattagtagacatagtatataactaaatatacagttatataaaactacatattatatatataactatttagattattataattgagaaatatacacaaaatctgtatttgagaaaataattatccttatatataataaatgactttgtaggttgaaaatattcaaaatcctaggcaaagacattcctagataaaagttggtaaatcagctttagaagatgacagacttaagacatattcaattattagctgatgttacctaaatcaagtttgacacataattatatatatttacattattcttgcaatgctagagtaaatagctgtagaatataaatacaagagtcatctatttaagttatattttgttattctatttaatttaaaaatttaaaatcttttttcagtgttaattagtctctgggttggtataaaagaaaaacatgttctggagagaaaaagggatacttaattttaacagcttaggaagagtaaaatcaaaatcagatgttcagttcaatgaaataatactcttgtgaatatgtaatatgatgttatctgcctaaaaacagttaaaatacattcataattattaatatagaatcaaaatgaattaataaaatccacatagcaatatccaaaaaaatctagtctaaggaaaatatagtatttactatttcataagaaataacatttgaaactttacagagattgaaaaatatcagagaaaagcactgacatgattatatttcagatgtgtatatgaaagataatttattaaacagaaaattaatagtatgggaatatattttcataattagtaggaatgattattttaatacatataaaatatttatctcattatgtaaatgagcaaaaacatacacaatagagatagaattgtaaatggtaactaacagctaccaataagattactattgacagtaattaaggatataaatattaaacagttttgagatacaatcttaaaactactaaattaccaaaacaactaacaaaatattaaaagccagcaaactacccaatttgagaaaatagattatttattgcttgaattgatataccgaaaaccttttcaatgatcatattcattaactaagcaggcaaaagatacttgcatgaatttacttcatcgatataatggaatgatgaaaacactgatgttataactaaataaatgtagacaacctagctatccaaaaacaaatggaaaactagattataatgctttaatcttgtgaaatagttggcaactattaaaattaaaataacatcaatcataaaacataaaaatatatatgaaataataaaaaggcagaagacaaaattggacagtatgattataaaaatctgtctcatttaactacctgtatatgtacaaaataccttttatgttgatgggcttaaattcttacctatttttcaaaatgttcttattattattacatttttataatcaaaggggaaaattgctaatttcaaaaaacaagcaaacaaaaaacccttctcaataaaatagttatataacctagttaaatttgcgtaccataaataaaaagcatacattctaatacaatttaaagggaaagataaccaatgttaactttatttcttgtccgcatgactttataggtaatttctttatacaataaattaatgtcataaaagactgactatttattgttgattaaatacaataaatgtcaacaaaagggcaatagttagcaaaagaaattattatacatacaaaaattatgcatgtataatttatacgcactcacttaaatagaaaataaatcactgaagaccaaactttaatgttcagcatttgctttgcagtggaaaaagattcagaaaatatctattatgaaagaaactcctttttaacaaatgtagttctaggtattagactttgaaaggataggagaatgctttttaatgaatgtgaagtaatatttcaagggaaaactgttctctaatagagagttactattcatagaaactaattataaaagaggatttcactaattttaaaggtgtctgaccaaggtgaaaaattaacaatgaatcatattgccattggccgatcacctgatggtgtatgagtactttatcatgtgtacctcaggtacagtgcccatggagttcatcgacccaccaaccacagaactgttcagcacaggactcctagatgtgtgcctgaacaatgtgaaatgattaaaagatgtatttttaaatcctaaatttcaaagaatgtcctttcactaagatattcataattcagcatagtgacaagtaattactctaagtgattaattgacagatagaccttaattaggtaatgctgattttgtaatttcataatttaaaggaaatataaaagactgagtaattaatattttattagatttatttccttgagcttaaaaatataatgtgttctttgcaaatattttcttcatctgtataaaatacaaaggtctttacccacattaagttttccagcatttatccaaatacttcatgcaaaaattgaattttcctcctatcttcacagtttggatgaagttttcatgcatttgcttggtaatgctttgacaaaatgtattagtgacttaaattgtgggttgaaaaaatcaagaaacgtatttcaaaaacattatccttcaacttttgaagtaaggaaatctcatcttccatattaatatttcaacttgttcaatcaaagcattgcatgttttcaaaaggactaaaaaaatctaaaggttttgtatataaaaacagaaaaaacctaaaatggtatgtttcagtaatgcacaataagttagtgtatcataaatgggatttcttcagggaacattcaacagatatcacaagacaataatagtgttttctcctttgaaattgaaagttgataagccttctcacatgatgtttgataaatgatatatatgctttaatattattttttaggccactgtattttttccttaaatgtacttcctgtacggccaaaatttttgagaaaaaaaaagattcgtcttctttgaaggaagaatgatatctaaaatctctgatatttgcatgagaagactgatggatttttatttgccagagatttccccgtgtgtgtattcatgcgcatgtgtatattttctaacaaagaagaaaaaaatttcaattacaatacttggaagcatctgtgatttttagcatgtatataggtatgcatttcattttctgctgaaagaaaatagtagactaggatagccaaaagaagattcatttatagggtctaccaaggctacttgctacagcagtttactaccacaggttgattaacttgttgtgcatgtattatacttatttaatttacatttaacagtgctttccaaatcagctctcaagatagaagcttcttttactgatgtctttcttcacagctctttgcaatctctaaaactcattctgtcttcttacattctgttggaaagattatttccaatatacctcctgggaaatactctctttgaaactagcaacacttaatgaaaaacatatacatattcattaaaaggaagatactgaaaaaatatggctagtttataatcactctgat

SEQ ID NO: 475876 - DNA, 3369 bp, Homo sapiens
cctgaaaagacaagagaaaggcctctcatgccatggaatggctgtgggcacaaggtcctcagagttgtatctactccgcttatgcatgctagagcactgtattataagaatggtaaagaaacttcaagcaacctgaagatatttcagattggcatccacagagtctgctcaagggctggtaggagcagcaataaaaactcattaatgatggagtcccagtccagagcacgacaagacctgggctgcatgttgtacagtgccaatatttgcatctatgggacttccaaaatggggggagatgtaatgaagctatgggctcaagattcaaagaaagagatgtgtattccaaacatgtcagaaagtgatgaccatctggacagttgtcctgccacaaactcattgattcataagccaagtagttttactaattgagggctctaaccagagctttcatttttatattaaatggaaatttatttatcattattttctatttttctgtactgccatatttgagtcataaaatatgcttattcctcttttccttagtagaatggatttattcatttatttgaagaaataaatcataataaagcatggttttctgagactaagtaaacataaaggaaatatacctggacttgatttgcataatgttaggggacaaaactgtaagaatgatatttaaaaattaatcatacttaaacctgaatattagcctgatcaaaataagacactgttcagaaattgtcagaatttttttaaccaaatggaataatgacaataatctcaaaaataactctgaaatcaaataattatgcatcttgttctaaatatattacatatattaatccatttaatcttcataaaataccctgtgagttaggtattattattatctccttttttctacaaatgaggaaaatgaggcccagaacagttaaaaagcttgcccaaggtgcaaagtagagaattgagatttattaaattatttaaagttaaaattgtattttaaaatacaacaaacagcctaaatatgaaaggtcaatgacagtaacagttattctttcatacttttttttgttatttatttacagatactaccatgtatagcaggcataagttaaataaaaagccattatggtgaaaaaggaaagtatattttcatcaaagaaaaaggttgaaaagagaataaagaatttaagtaaaatgttttgtgtagttttagaaaatgcttctattaattgctatccagaaggcatctattaagattgtataaaagtaaagatgcaacaaacaatttgggtgtctaattctgattagactaatgttcaggtttaagcatggttgatttttaaatatcattcttacctatacagtttgggcccctaattataacactcaagcaaatgataaatccatgtacacttccttcatgtttgcctatcctcataaacatttgaatagatagtaaaagcaaaaggctaaaaaggctttctaacctaaatatattaatctttcatatacttctgagaacaataaagcaggatttaaaaaagatgtattgtgtataaggttgaatttttgaattattctttgaaaatatttataatcaatgtattaatataagcatgctattttctacttatgagattattttagaaattgacaatttttaacttaccatcaataagtattgacttttcacatagtgaagataagttgctctaatttattcctaatcttctctagtattggcaataatgaagaataaacatgccagtgcaggataacagccagaataaatgggtgaaaataaacctagaaaaattaatgtgttggccttggcttcagcatcgtcacactttgatttgttaaactatggttgtaaaatataaatagtttatatgaatatatcacataaattcactgttcacacttttatttctttattatttcaaagaatagttactgaggcttaccacatgcatagcaggtatcatttactgatagtacaaaaaattttgcacatgatgctgctttctgggttgtcagcattaactggaacctggcctttgcccttaggaagattacaattaactagaaaataaaatcatataaaaatatatgcagaaaatcatagtatatggacaagaggctagactatagtataggcagaatgctataattctgtgatagtagagaaacacttcaccaaggaaataccttttgaattgatcttaaaaaaataaatgaatatattgagtggagaagttagaaaatgactttttattgagtggaggtatcctgtgcatggaaagacaaaagggcatgagaagtgcctggaaagaataaaacaaacttaaatatataaattattattaaaaatttcacaggaattcatagtaatttttatttttaaatttcacacaccatatgctaattttatattgagagccgtgtgtctggctaagaatcaaggtgattctgcttaataaaattttgccaactaaactactaaattacccaactttgggccttgttaaattcaacaacatttgttataattaacccatgtaattagtatatttatgaaaaagttacattaaaggactgggaattaaaaacagtaaaattaaatataaaacagcaaaaaatcataaatatttaatttttgacaataaattcgcaaatatctgactaaaccatattccaggtacaatttctaacagctttgtaaaagctaaagggaggtcgcaaattgagaaggataattgagttcaaaaaaagcaaaatcaggctataacaacaggcgtcattttcagtaaagtatattcctgaatttgagtcatttgaattacacaagaatatatttctataaattcagttagaaaatctgaagtaattgaaaactgttagctttcattctttaataactatttcaagctaagaaatgtctgctatggatgaaatatagcaattagccaaagattttataaataaacaaaaaaccaacagaagtatactatttttaaaggcaaagtggcaaatgtataaattatttcttttattagaaaaattacatatgcacagctttggaataataaatatttcattaaaagtattatgtaaaattttcaaatggtttcttgctttttcccttcccttcttttccttgctaatcaattcattctaaaagtcattatgcaggattgtgcaaagtaaggctcagcacaggaaatgttcaactactgtggtggccaagtgcaaggtattcaacacaagcaagcatgttgaccaaggtatctgccaagaagggtgatctggctcagagtattagaacccaagtggtataaggaaggtttgtcc

SEQ ID NO: 475877 - DNA, 2521 bp, Homo sapiens
ttcagtctgaatccaaacacctgaaaagcaggggagctgatgcgtcttctgatgcctaatttacatctggttgctaagaaagccttctgtgtgtgtgtgtatgcgcgcgtgcgtgcacttgcgcacatgcatataaaattgcaaagaccttgtgaagctgctgtcatctccagtatgagaagtcagcagcaggcactgccagagcaatcgggaaacaaaacttttactttcctacctgatgcatccccttcaatcaaatctatcccaggaggaggaaagacgttgtttgtcaagccaaacagcagaaagcagtcttctgcatgtcatcacatgagggagaaaggaagcaagatctctggggactcttataaggacactaatcccattcatgggaacttcatcctcatgacctcatctaattctagttgccacaggaagaccccagctcctaatatcatcacgttagagagtggagtttcaactatgcactttggggaaacacaaatattcaatcatgcatttttttattaaatatctgaattcagctattcagctgctgtttctcttggtggcattccaacagacagaaaagataacatagggattaaaaatgccacaacaagccacacgagaacagtaaatgcttcatttcaattttagctccttttttccttttattactacaaaatttggacaaaaaaggtgacaccttccagaaaggaagtttcttacatcagtgcctattttaaaagaacacatgtcctggaaactaaattaagcaccatttaccaattaattcttactgagttcattgtgagctctattactctcttatttagatcctgattttcttatgtgaacacagaaacatacaaatgaaaaatgttcacgtatgtgtaaactgagttcccgctctcctttttttccacattgctaagattttgcttagccctcaggcaaatttctgctttttatatgacccaatttaatttctttagaattcatggcctacctgacctattacaaacagaccttgaattttatgaggcgaagtgaataattaagagctcagctgctttcaataaattaggatcaaattgaatttttataatctgctattattttatattagttttattttaataatcatggcatctgtataatgactctagcacttgttatacattttatgctattttataactatcacacaatattaaaatattataactaaaatatatttaaatataaattcaaacatttaaaacattaataattatactgcgggaaataaacatagaaatgtttctgtataactttaaaatataaagttagcaattaacaagtgatgccctaaaatctacaaacccccaaataaagtatattttagtgttaaatttatttattcagttaataaattttgtaccaaccttttaaacaatcaactgtattattcattgaagcaatattgagagcaacatttttggagtaaatatttttttctttttagaacttacagtaaaatctgaagaaattcaggctatcaacttaataactttaaaaaaatacatgcaatgtttttgcacagttatttgaagctttggggtaaaggtgctataattattgcttatcattcaatacaattacttctttaatgttaagagaatcacaaaatttggggatggttaaaaataaaggatccaagacacatttttaaatttataataaattcataattgtacatatatacggggtatttgactacaatgtgcatcaaagataactttttgggttgaatctatttgggaatttttgagcttcgtgcatctgaatttcaatatctctccccagacatggagagtttttagttattattttattaaacaggttttctatgttttttcccatcctttctcctttggtattcccacaatgtgaatatttgtttgcttaatcattttccacatgtcaataggctttttgctattcttctgtgctcattatttttgtctgactgtattactgaaagacttgtcttcaagctcagaaattatttcttcttcatgatctggtatactgttgaagctcccagttgtattttttttttttattccagtctttgaattcttcaggtccaagatttctgtttgattcttttttatatctgtttctttgttacgtttctcattcagatcatgaattgttttctttattttgaattgtctgtttgtgttctgttacatcttggttagttttcttaagatcattattttgaattccttttcaggcatttcacatattcccttctgtttggagacctacgattgaaatattttgtgctcctttagaagtgtcatgttctttgcttttgcatgtttcttctatccccctgcattcatatctgcacatcttgtggaactgtttttctttcaattttatgaagtagctttcaaactgaagaaagtttacagaactttcttctgtagatttgtcctatactgtaatttgggtatggtgcttc

SEQ ID NO: 475878 - DNA, 955 bp, Homo sapiens
cttagcgtctttgctcctttgttagtccaggggccatctgcaagctgggaaacaagagaggacagtaatggctcagttcaagtccaaaagccttaaaactaagaaagctaacagtgcagccttcaggctgtggccgaaggctcaaaagccctggggaagccacaggtgcaagtcctggagccagcagaacacaatgttgcaggaagaggaagcaaacattttgctagcagatcaacgtggagtaatggagactagttatctgcagaagatggtagagccttactacaaaattctagaggccgcttctgtgattcacctatgggggcctgtcaaaggctcccaacagcattgttatctgtcactgacacctcaaaccctattggatctgctgggtcatatggctcaagtggcagagcagcttgcacagcagcctggacctgttgctgagccttctcctattttaggccccactcaaaactatcagccttctcaaaaaatgggccagagtaacacacctaaatgaagaatgtggtgcctccaaaatacaaataggcccactaggcattgtgttttatcatgattttaggaggggccaaatccaacaacttattttttgccatagaaggaatatctcaacaggccccacaccattgaacccttagaagttttactgagcttgaagtcccctaaattttagccaaatttgttttccatcccttgacatggaaatttcacaccaataagttcagagtggtttctgcttctcactcaatgggtccattgggtccatgatgtcatcaatgtaacggactagtgtaatatcttgtagaagggaaaagcaatcaagatctcagtgaacaaacttatgacatatgggtggagagttgatatacccctgagggaggactgtgaaggtatattgccggccttgtcaactaaaggcaaattgcttctt

SEQ ID NO: 475879 - DNA, 634 bp, Homo sapiens
gagaaaagggttgatgagtggaccgtcctggttcttactcaatcagtcgatatacaaggtggccatggtggtttgtaatattgagagactttgtaatgagaccctaaagagccagaatctatttaaaatactgacagtgaatcccataacagtttttagaccaaagaatgaaggagggggttggttgataaactactcaaaaatagaaactgagttaaaggtgatgttttggctgttaggctttcttcaggccataatatataaaagtaatatttttaaatttcttcttctgcccaaggaaaacctcaaagatagaatgttatgtttaaccttattgtacattccacagagtattttaagaactagaaaaggattgctggggcaaaaaatgattgtagtattgaaagatcagaaaaactctgtcataattttaaaaaataagcaaacactgagaacttcatccgcaatgttattctgaattcagtattctatcgggggacttttgagggatacatattattaacatgacctatcactgttaattttaacactaattcgttggctagggtagtatttgtcaggtttcttcactgtaaagttaagcttttcttcacctttctgtattgtactattt

SEQ ID NO: 475880 - DNA, 651 bp, Homo sapiens
tattatgcccaatttacagatgaggaaatggaaagttatgtagctttccagagaagtcaatggacttttttgaaagacaatcttaaaaaggaagttgaatactcagtgattgactgtgcagatgaaatagagaaaaagcaatctttaagtatacagtcctttggcattaagcacatgcaagttgttattgcaacaatcaccatcatctacctccagaactttttcatcttctccaacagaagaaactctatactcattaaacgttacctccccattctttcctttcctgtaacccttggcaactaccattctattttctgtcgctgtgaatttggctatccagatacaccaccaattgtcacgctgttttccatagtggctacaccatttaatattcccactagcaatgtacaagaattccagtttctacatatccttgccaatacttgattattgatgttgctgtaagaaccatatgaaatataaatatgtgtaatataaatgatgattatgtttttcatatggcttattctgcaaagacatacataaagatttttattggctcttgtgcatgtagtttgccttttgtattgatcttacttcttaatttaattttcatattatttaaaatatcaatggtatgtaagtaca

SEQ ID NO: 475881 - DNA, 605 bp, Homo sapiens
cccatctgaaggttaccaacatcaaagacctaaggtagataaatccatgaagatgaggacaaaccagtgcaaaaaggctgaaaattccaaaaaccagaatgcctcttctcttcgaaaggatcacagctcctcaccagcaagggaacaaaactggatggagaatgaatttgacaaattgatggaagtagacttcagaagctgggtaataacaaactcctctgagctaaaggagcatgttctaacccaatgcaaggaagctaagaaccttgaaaaaaagttacaggaattgctaactagaataagcacatacacaagtatcaatagccgaattgatcaagaagaagaaaggatatcagagattgaagatcgacttaatgaaataaagtgtgaagacaaaattaaagaagaaagaatgaaaatgaatgaacaaagcctccaggaaatatgggattctgtgaaaagaccaaacctacatttgattagtgtacctgaaagtgatggggagaatataatcaaattggaaaacactcttcaggatattatccaggagaacttccccgatctagcaagataggccaacattcaaattcagaaagtacagaaaa

SEQ ID NO: 475882 - DNA, 775 bp, Homo sapiens
acccccatcacatgcgctgcgagggagataagggaacttcaagggaacttttcctgttccactatctccactctttttttttgagacggagtcttgctctttttacctctggggacagagacacttccaagtcttggtgtctcctccccttctgtccatctaatgacaagctgaggaatccaggagagtctgacctagggacagcagcaattctggaattccaacctgaaagtgacaagaatgacagcacaaccacagcaattaccaatttagaggagaagccaaacaagagtacagaagattcaagtctgccatctcatgctaaacctggagcatatcctttgaatggaatggagaacagaggcactggcatcccagtggccattcattccaacaaaaaatatttaattgaatatcacgcaggagaagtagataaatttagaaaaatgcaagtagtttggcctgatgctgggtctaactgttggcattacagtcttacaagctatgctgagaagtaacgctaagatgatgttctagatcaggtgggggaaagtagctctgctaccttcaactgctaataaatttagcttcatttatctttgtctgaatccttatttaataccatggactcagacttcctacactacgttctataatagggagcatataacaatcaaaattacaaatgcctatacaaaatctttacaattgaatataaagaaagtctacagaaacattactagattcatgaaagtgaataaatctgtgtatattt

SEQ ID NO: 475883 - DNA, 720 bp, Homo sapiens
gagcccacaggtatggctaatctgctgctcccttttggcagaaggctcctctttcacctccatcacaaacacacatggtattttttgctgcatggagcccaggcacttcttggtgagcccaacaagcaggaaagaaagaaagaaagaaagaaagaaagaaagaaagaaagaaagaaagaaagaaagaaagaaagaaagaaagaaaggaaggaaggaaggaaggaaggaaggaaggaaggaaggaaggaaggaaggaagaaagaaagaaaagcaaagaaaacaaagaaaaagaaaagaaagaaggaaaaagaaggaaagaaggaaagaaaaggaggaggagggaggaaggaagggaaacccttgtacactgttggtggatatttaaactggtatggccattatagaaaacagtgcagaagttcctcaaaaaaattaaaaatagtactaccgtgtgatccagcaattcgtcttccaagtgtacccgaaggaaacaaaattagtaccttaaggagattaatctctgtgtccctgtgtcttcagagagaagggcattcctttactccaggtatagagcaggcacgtctggagcgagagtcataggccctactttacaggacccagaactgctgaggtttacgacctacttcaggggagaagaggtgaggggaaggacggaggcactcatttccccagctgaaggagggaggtgttgattgacga

SEQ ID NO: 475884 - DNA, 613 bp, Homo sapiens
tgatttcagctgagtgactgtctggatctgggggtatggtgacacaagcagccctgcaaccaccaccactgggactgcactgggtcagacctaaagctagcacagaaatgggtcttgcccaaggcacgctgcaaccactgcctggctactggctatgttcactcaagactctagggatctacaatcagcagatagcaaagccagccaggcttgtgtttttcccttcagggtgcctcaccccatggccaccaccaccacaggcctgtggggagtactactgccgatgtttacttaaggcccaagggctcttcagtcagcttgtggtgaatgctgccaggactggtatccatcattcagggcagtgggctcccctctggcccagggcagatccagaaataccatccaagagccaaaacctggaactggggaccccaagagctcgcttgccacttctgctggtatctcagtgggttgcattccccttaagtccactggatctgggcccagcgcaacactaggacttgcctaggagtggcagtcctcatggcctagactgcccctcaagtttatttagggccccagagcactttactccgtgacggtgacacttgct

SEQ ID NO: 475885 - DNA, 863 bp, Homo sapiens
ctatacttattacttgctattttggttacaggagaggccgtaaatgtccaggtgtccagttgtgacttcccattcagtagaacacttgctgtgtctcgtggtgggactgcttttctcttggcgggtaatacctctgtccatcagactccaaagacatggggaagtttccaaagttctaacttctcacctgctggcagtaagagggcagcaaatcacatcctgtatcctgactgttctctgcaggtgtgagtggggaattggtgtggcagggggaagttttgatggtaaaacgagcaaagctttatcccttgcccatcgatgccctggaatgcagaggctgacctgtgtagactatattaactatatcaagaacacccttgcccttggacttctggttgggttaagccaatgggggcatctgcaggagactggcagaaggacagagtgcaagtcccaggtgtgactcttggctcccttccagctaggtcacctcagcctggctgtgcctcttcagtgctatgaggcattccaaatgaatgaatatttcccagtaaacaaatgcgggaaacaccgttcttttaaaactccaaacaagtaaatttgtaatgctgaaatttagtgagattgatacattgttatttaccattctgctcccataaatttcagatataaagcaatgcctgagcatggactgtataaattatttttggaacactagaagaggcactagtcataaaaaaatttaacatacaatttttaaataatacattgttcagacttagtttgttctctctgtaattctatttggtagcagaaaccttattcttagttttctacttcacagaattatagcaaatgccaac

SEQ ID NO: 475886 - DNA, 1375 bp, Homo sapiens
gccggctgtatcataccagtgccaaacggccacctgtcggcctgggccagcaccatgactgacaatgagctgtctgccttggtagtggataatgggtcagggatgtgcaaggcaggctttggtggtgacgatgccccccgggctgtgttcccctccatgatagggcgtcctcgacaccagggcgttatggtaggcatgggccagaaggactgctacgtgggagatgaggctcagagcaagagaggcgtcctgaccctgaagtatcctatcgagcatggagtggtcaccaactgggacgatatggaaaagatctggtaccacacattctacaatgagctccgtgtggcaccagatgagcatcccatcctcctcaccgaggcacccctgaaccccaagatcaaccgggaaaagatgactcagatcatgttcgaggctttcaacacaccagccatgtatgtcgccatccaggctgtgctgtccctctatgcctcaggacggaccacaggcatcgtgatggattctggggatggggtcactcacatcgtgcccatctatgaaggttatgccctgcctcatgccattctacgcctggatctggcagggagagacctgactgattacctcatgaagatcctgacagagcgaggctataacttcaccaccactgctgagcgggagattgtgcgagatgtcaaagagaagctgtgctacgtagccctggactttgagcaggagatggtcagggcagccgcatcctcctcaccggaacggagctatgaacttcctgatgggcaggtgatcaccattgggaatgaacgcttccgatgccctgaagccattttccagccttcctttctgggcattgagtccagtgggatccatgagacaaccttcaactctatcatgaagtgcgatgtggatattcgcaaggatctctatgccaacaccgtgttatctggagggagcaccatgtacccaggcattgctgacaggatgcagaaagaaatcataaccctggcacccagcaccatgaaaatcaagatcatagctcccccagagcggaagtattctgtttggattgggggctccatccttgccagcctgtccacattccagcagatgtggatcagtaagcaggaatatgatgaggctggtcctcctatctaagaattttttgtttaaggtaatacttttcaaataatttgattattccttattggctttatctgacaacataatctttaaaatgcatgtaaccaaaattaatctccaaaaacactttattttatataacttgctttcagtacattaaaattgcttcatacttgtatacttagatttcctgttatttctcctcaaccattcccttagaatt

SEQ ID NO: 475887 - DNA, 636 bp, Homo sapiens
agatcagcaggtaggtactgggactggatggatcctaaaataactctaagaattaagattctcatggccctgctgggcaaaaccagaaaattaccaaaaatatatggggaagtcctgtgtatccttcacccagtttcctctaatggtaacattttgcgtgactatagaacattatcaaaacccagacattggcattggtacaattggcagagtttatttagctttcaagggtcagtctcttccctcatttgcccccgtcaggaggatcttactctcccagacttgttctcagcctttctggggacaaatgaaggaagcaactggggagaagaaactaaccagaggtttggagatgtttctcaggttattttgagaacagccgatccggtagggacacaagtcctggtttacaatgcagatggttttgagcatactatgaaaatgccaagccagaagtcatttaagagtcattaattcctgcagactcctgctcatgacagccatctcctgatctaacctgctatagttatgggtcgaggtgcgacaagcatttgttaatcatgtctgcatgcaggacaatgaagcagatgacaatcagtgctttgattctttctgagggaaaaggacactacaagg

SEQ ID NO: 475888 - DNA, 1229 bp, Homo sapiens
ggagaaagtcctacaacactgtcaccagctcatctgtatctccaaaaatgcaaggcgtagtgcgagttgcaaaggatgtacgtatgagtataatatggtccctgccctcagaagccttctgcctgaaacaatatccaagaaatccagagtgcattcagctagattacgtctggaaagttaatatggcagaactctggagccttcagcttacagccaagtggaagcaatcttgttcctcctatgtaatagacaactttcttgtttctgccttccctgaactctcaagaggctgcaagttgggagtgaaagagcaatactggtcctccacaataataaggaaagaacagcaaatgaaacagcaaacagctagagttgttccagttccctgcaaagctagccaggggccccagcaaagtgagcttcagccattctctagtccaaggctcttagaagatgccactgtgtggcacagaggaaacaatgcagaaaggaaacaactacatgatatattacttacagagacttcaagcaaaatcagtgggtcaagagaaggttagaactcttaaaaatttatcttgattggctttaggatgccaccctagacatagaagttacaaaaagaaacataccttttagagtctgccaaagggatcagctgaggagaaattaccaaactagaatagtaatcaactattctaaaatactctttctgaccagggtatgggaaagggggagaaggggaggtagaggtaagtctgataatgtggcctgcatataaagtgtttttccttagtctgaggtaggatcaattgtgaggtttattttctcttatattactcttctcattttcttgacctactattcttgctccataatcttctaacataaagcctatctgcctaaatatataattttcaaactaaatagaaaatgtgacagaaaatcttttgaaaattctcttaagtttacatctctaaattaatcctcaaaagaattaaatattcaaatcttactcatttctgaaggtatacggcttttctctgctttaatcaggtaatgtaccatttataaattaatgattcattaattgcttattgaattaatggatttgaaatatgatttataatttattagaaattgaaaataatattgaaatgtggaaatcatcatctctgctagtactcttaaaatatacccatagtaactgcactgccaaggcatataaaaaa

SEQ ID NO: 475889 - DNA, 671 bp, Homo sapiens
cagcactctatgtctagctcaaggtttataaatgcaccaatcagcactctgtatctagcttatctgctcagggattgtaaacacaccaatcagcaccctgtcaaaacggaccaatcagctctctgtaaaacagaccaatcaccctctgtaaaatggaccaatcagcaggatgtggctgtaacactcaccactaaggtctgcagcttcactcctgaggccggtgagaccatgaacctacccgggggaatgaacaactccagatgcgctaccttaagaattgtaacactcacagtgaaggtctgcagcttcactcctgaagccagcgagaccaggaacccaccagaaggaagaaactccaaacaagtccaaacattagaaggaacaaactccggacatatcacctttaagaactgtaacactcactgcgaggcaattctgaggggccatatggaaaacaggttgcaagccagatttggccctcaggctgtcaatttaaacattttctggttcacaattggttgagtttgtctaaagacctgggatcacagaaaggaaatgttcaggttaagatcaaagattgtggagaccaaggttcttctgaagtcttatagtggctccccttagagacaataaatgacaaatgtttcctattcagatctttgaaaggtact

SEQ ID NO: 475890 - DNA, 563 bp, Homo sapiens
gcaacattttgtttcctgtctccatgatctcatactctgctgaccttagaggtcttagttccaaagggagaaatgtttccaccaggagacaaaacaatgattctactgaactggatgttaagatagccactggccactttgggttcctcatgcttctgactcaacgggcaaaaaatatacctgtttgtatactgactgatgtgattgatcctgattaccaagggaaaattggcctgctactacataatggagagaaggaagagcctcactttgttgtccaggctggaatgcagtggcatgatcacaacacactacagcctcagtcccctgggttcaagcaatcctcccaccttggcctcctgagtagctggggctacaggagcacaaaggaaaggccatgcgaggacacagggagaagacaggcccctaccagtcaggaagggagccctcaccagaaactgagctggccagcacaatggtcttggacttgtagctccagaactgtgaggaaataaatttctgttgttgaagccacccagtctgtgattttttttatggcagta

SEQ ID NO: 475891 - DNA, 669 bp, Homo sapiens
tgcctagtgttgcttcctgctgtgacaggacagcactgtttcaatgcaaagtcccacaatcattgctttccttaccccaaggccatggattctctgtgccatgtggccactgctggaggatcatgtaggagtgatactggcaatacatgtctgtcattttaccctcttcagtgcctcttccaatgatatgaaattaaaaccaagttctgtaatcacttacctgattttgggttcttatgaaggtgcttttttttgtgtaaaaatgggagtgaccacagggacttgggtttatagcctaaaagtggtgtcaaggtttcagaaagttgaagaagaaataaagaagcacggaagtaataacatgggattatcagaaaacctgactgattgtgctgctgctggcaatggtgatgatggactaattccacaaagagcagaaaacctgaaaatcagcaatttcctaggacggagaatgaagagtatcatagatcttacctgtgagtagacaaggttttgccagtgttgtgcagcaggataatttccacccggaaacctcaccaggctggcctgaaggagggctgagctcctcgttaaagactttacgtcaagctgcaggaatttgtcaggatggttgttatttggcaaaacagagagatccatgtctcccttcac

SEQ ID NO: 475892 - DNA, 1527 bp, Homo sapiens
tcctgaaaataaagaaagtccctgactggggctgctgccttttgttcagagatgccctgcccacaggggtggaatctagagaggcagttggccttgctgagctgcggtgggctccacccagtttgaagtttctggtggctttgtttacattgtgagcataaaactgcctactcaagcctcagcaatggtggacacccccccgccaagctccagcatcccaggtcaatctcagactgctgcactagcagcaagattttcaagccagtggatcttagcttgctgggctctgtgggcatgggacccgctgagccaggcactggaggaaatctcttggtctgccggttgtgaaggccatggggaaagtgcagtatccgggcaggagtgtactgttcctcccagtacagtctctcatagctttccttggctaggagagggaaatcccctgaccccttgtgctttccagtcaggtccctctgctgcaggtctgctggagtttgctggaggtccattcccgaccctgtttgcctgggtatcaccagcggaggctgcagaacaacaaagattgctgcctgttctttcctctggaagctttgttccagaggggcacctgctagatgccagccagggctctcctgtatgaggtgtctacctataattaaaatcaagaaccagtaggcctcagagggtgaaacataaagtatggcctgtgatgagatctgatatacataaaaaaagactttattcagaaaactgggaaatatgtgtaggaatggattttaagagcgcaggatcaaaatggaaggaatataaagttggatcgtgatgatttcattgacagagctcattaatcagagattctgaattcaaaactgaaggactggaaatgactctaacagttttcttggttagttttccaaaatgtggagcaaaaggtagcctccactaccagatctttggtagattataaagtaagtgccagatctttgctcgtacaatatagagtacgttatccaaaggtttagggagactgaactattttaagtgaatgtagtgactgtttagtgtttgcattttctttttaaaattttttatcttaatttttgtaggtacatagtaggtgtattgcatgaattctctgcttgttgtatgaaacgttttatttattgctatttgtttgaacttattaattatgttattcaactttgatatctgtaataatttttgtcttcacctgtttttgagaagcatttgctaaaacactctgacatcaatggttgattagtctgtttcttctcctaattctgttagtttgcttttttatgaatgtgattctgtaatgataacaaaagaatgtatatttctttcttttaacttagtctttcctttggactttttccaaacaagtgtctattcacaaaatagcattaataaatttaatggtgattttattaaagcttacataggacatatggaaaagggttatattttacagtgtgtagcattcattttaaaaattttcattatagt

SEQ ID NO: 475893 - DNA, 1250 bp, Homo sapiens
ggaggcttctgctttcctcttatcagggccatgattcagtccttttaaaatgtggaaaaagtctacggccataccaccatgaacgcgcccaatctcgtctgatcctggaagctaagcagggtcgggcctgactagcagcggaggggagcccacagtggcccaccatccctggagtctgactgagctcacgtcgacctccttctacgatggctcaaagactcctctccttgtcttcagtgacatgcctgctccctcttcactttccgcaagcactggatactgttgtccagtctaatatgaagcatcagcccttcatagtggtgaataagcacaacgtccaagtagaatacaagggagagacaaaaagcttctatccagaggaagtgttttttatggttctgataaagatgaaggaaattgcagaaacctaccttggaaagactgttaccaatgctgtggtcacagtgccagcttactttaatgactctcagcatcaggctaccaaagatgctggaacaattgttagtctcaatgtacttagaattatcagtaagccaactgctgctgctactgcttatagacaaaaagtaaaggagaacaaagttattatcactaatgacaagggccatttgagcaaggaagacattgaatgtatggtccaggaagctgagaaatacagagctgaagatgagaagcagaaggacaagatgtcatccaagaattcagttgaaagctatgcattcgatatgaaagcagctgttgaagatgagaaacttcaaggcaagattaacgttgaggacaaacagaagattcttgataagggtattaaaattatcaactggctggataagaatcagattcagaagaaggaagaatttcaacatcaaaatctggagaaagtctgcaaccacataattaccaacctgtaccagagtacaggaggcacaccagaaggaatgcctgggggattccctgatggtggagctccctctgctggagcttccccagggcccccattgaagaggctgactaagtcagctcaagtatagatgtagcattgttccacaaagttaaaacattgaaggactcaaatttgtagcaaattctgtggccatcttaaagttgagctgcagtagttaactactggccaatctcaatactcgaatatggaacatgtgcacaggggaggtacataactttgcactttataagtactgtattataagtggaaaaggtaatgtcttaaacaa

SEQ ID NO: 475894 - DNA, 462 bp, Homo sapiens
aatatacagacgtgtatggacagcactgagttcaatgtaaagcctcacaaatgctgtgctctccctgtcccaagcacagagaatctccactggcattgcctctgccaggagatgggggttgggtggcagctgtgctttaagactgtctttcctgccctctccaatgactctttcaatgacatgaagttaaaaccagaaataaaatctacagatacacccccacacacgcgtatttcaaacactggctgttcccttaaacacttctgcatggctggctccttcttcttggggatgaactcctctgaacacaacctggtggggggagtaggaagtgcgcttcagacacaagtgcaggagctggacaccgagcattgtgggcagatgggtcatgcttgaaagctgtgattgctatctctgcagggaagcttatggcctggggaaggtttgagttctgtgcacaga

SEQ ID NO: 475895 - DNA, 684 bp, Homo sapiens
aaaacttctgaacaaatgggttaacttttcgactttagcctattttggtagagggattagtagtgatatggggcctcagtgggccagttctcgggcccccagggagacttgtgagtgctggcaatggcatgtggagcaggccaatcctcaggctgctagatggtgcatatgggtgctggcagttgctgggaaggctggctactctccaggctcctggagaggatttatgaatgccagtgcaggaggctccaaggctctgaggagtgcatgctttagggccctttgctttgtggccactctgcctggtttgctggacccctgttccctggggtataggacactgagtggtctagagtactggggatccagccacacagctgcatccagctggcatcacaacactgaagccctccaggtgaatgtaggggaatgtcagcagggatccaggaccaagaaaaatggcacacaaatatctctaagccggcacaactttcgctcatttatcccctttcaacaagctaagtggtaaatgagaaataaaagaggatagaagaggctgaggctttgtgcaaggtctttatttgtggctgaatttttgtacctggtttcacaggagggtatattagcaaagtaatttttggtgttgaagtttgggctgtgatccagttgatgtcacttaagcat

SEQ ID NO: 475896 - DNA, 717 bp, Homo sapiens
ttacaattcgacatgagatttgggtggggacacaaatccaaaccatatgaactgggcagttcctctaggaagcttcccatgctagaggaatcctgggatgaagatttctctttcccaaactgttcccatgaagacactttcagcagccgtggctttatgcttgctgaagaaagtggtctagctgcaattaaatatgagggcttcaaattagaatgggattcagtcgaggggatccagaaagcaatcatggaccttgtagatgagtttaaagatgaatttcccaccatcctaagattatcacagtctaatcaggcagtctgtgttaatgctgtgctgaagaaggtaaagaacatcttccaggaagaagaatccataaggcaaaacagagaggagagtgaaaattgtagaaaagccttttctgagcctgtgctttcggagcctatgtttgctgaaggtgaaatcaaagcaaaaccttataggtcattgccggagaagccagacatttcagattaccccaagcttcttgctaataagcagagtaataacatccaagttttacattctgtgtttgaccaatcagctgaaatgaacgagcaaatctgaatacaggtatcactgaacagaacttaagagttatctatttaatggcacatttcatctgacaaaactcagagtctagtttacatattctgaattgctctgctttcttaaaaaaaa

SEQ ID NO: 475897 - DNA, 599 bp, Homo sapiens
tcctttctcacttccatgtttctcccacagcatacctggtagcaggccctcttcctgccacaaagattggtacgatgtgaaagcatgctatgttcagtagaagaaatactggaaagacactggtcaccaggacccagggaaccaaaattgcacctggtagtctgaagggtcgtgtgtttgaaatcaacccaaagttgactgagctaagtgaaaaacaggaattttcatattggtatgcaggggtatatcagatacataaacttgctggcagccttagtattcacagccttgcagactcaccacttcagacttttaatctggttcccttttcaggatttgtccatgaccttgaggaagtcaatttcctctttctggaccttatgtggattccaaactttgaggtggctgcaaaacagttacatgatatgtgggtcccaatgcaaaacgaaaatgtgagaccctcttctccaaaaattattaagaattgcaaaatggcaataccagagcattaaatcaagtgtgaggctctcctgagaatgatgccctgtgcaactgcctgggttgtacttctgggaagccagccctgggtgcctgagctg

SEQ ID NO: 475898 - DNA, 642 bp, Homo sapiens
tttccctgattggtccccgtctaccagaatgctaggaaagattggaaagaaaccagaggaaggaggcattatgctcatcaggtcattagggctccaccttcatgaatggattgatgctgacataaaagccctgggcatatcctcatggccctatataccaggccagtacccacaaactgagcctctagacctgtcccagtgccagacagtgccacacagctcctctagacatcagccttgcatggcaaacccaatctctagcctgtaccacgtccaggccatcatcaacagcccacagcttcaggcagcccccacagtaggcaggcctcactggcccctggcttcatttgtgtcccagtctaatgctggctgcatcttccttgggcttctggtccaacccagtgctgtgccttccacagggtaccccaagtttctggcagtgccatgttggttgcagctgccccaggcttctgatgcacctaagtgacatatttgcaactgggctttctcaggcaaagccagtctgtgaagactggaataagtaccttcttcttccaatgcacagacatcaatgcacaaccacaaggagcaaggaaacatgacatcacaatgggatcaaataaggtgctagtgactgactct

SEQ ID NO: 475899 - DNA, 1317 bp, Homo sapiens
tgtgggtgggcttcattgaatcaactgaagtcctacatggaacatatctcggcccctgcggagcgcgacccaccccccagaagcggttccactgcccacttccggtcctgtcacagactcagcgactgccagcgaccgctgaccgccccgctatggcaagtgcgccaaaactaccaccccgactgcgacgccgccgtcaacagccacgtcaacctggagctccacgcctcctgtgtgtacctgtccatggccttctacttagaccgggacgacgtgaccctggagcgtttcagccgctgcttcctgagccaaacctgcgcggtggccgcatctgccttcctgacatctggaaaccagagcgtgaatactggggagagtgggctccaggccatggagtgtgccttccacctggaggagagtgtcaactacagcctcctggagctgcactacctggccatggagaagggtgacccccagctgtgcgacttcctggagagccacttcctgaaccagcaggtcaaggccatcaaagagctgagtggctacctgagcaacctgcgcaagatgtgggccacgggaaaccggcctggcagagtacctgtgtgacaagctcaccctgggccgcagtggggaggagccctgagcccagatgggccccacagccacggggtgccttcaccgggttgggccgccagacagggtgggcatgttgcccttccagaacgttctcttcagttttttcctttcagttttaccattgttggcaatacagttatctggttttcaaagcaataaaggtgtccagttgatgcgtgcctgcaaaactctcactatttaggaataaaggcacatcctcacacaagtttaaagttgatatccagcagtctctccacccagccctgccccatctgcatgcagctcaggatctccaaggttggaggaggaaggtattccatggggccctggaaagcacattagtcttccctttataaactacgtggatatatggagtgggatggggtgggatgggcagtcttgggccctggtgtctgggggtgcttgggcatcgtaaagtgtgaaacacggtccggaattcatccccacctctggggaagaagtgaggggaatgagattgggcagggattaaaatacacaaagaggtcttcatcttgacatgaaaacttttgtttcttaaatatgaaaatgttaacatttgttgattctaggtagcaagctggggatcctggaagatggcatgacagagtactctctgacaaactcacgctgagtgacagtgacttaatgggaatgggctgg

SEQ ID NO: 475900 - DNA, 670 bp, Homo sapiens
ccagccagtggtctgttcactacccgatccccgtagtaagccgtgggtaattggtaatccacctatgaagtcaaacggggaaactggtgagcgacaccacaaagagttcaagttcaacttatcccagattcctgagggtgaggtggtgacggctgcagaattccgcatctacaaggactgtgttatggggagttttaaaaaccaaacttttcttatcagcatttatcaagtcttacaggagcatcagcacaggaaagggtcgaagcctgtccaccaggagctcaggcacctcctgcccttgtccgagggcaaaggagagaaaggcctgctgtattttggcaatggtgctctctgtcagcccagtggtgtatcactgattgttctcattgtacgattacaaaagtgtgccacagaacaacgcaaattcatggggccccagagtgactcggtagcagagtcgggatggaaactgggctctccacatccacgaatctgcactgaccccgctgccattttctttatcacagaccctgatctttaaaaataaaagctcattctgccagctgtgctaccctcacgctttgaactgtatttctctgtatccttattataagtctttaaaatgtaggtgcctaatctagtcatcagaggtaactcggcatgtgctcac

SEQ ID NO: 475901 - DNA, 934 bp, Homo sapiens
gaggagcagtgatggattgctgggggctgcctcacctcatggcaggcaaatggaagaaagctgttctcgccttaggaaagaaagatttaactaatgtacccaccttcttacaatcgtctctggatgctgtagcaaagccagcaagtgactcactgtctgtcctcaaactctttgcagcccccattactgaagagccccacagacaacttagaaaacacagtgatgggaaagtgacagtgtttgcagagttgctggttgccaggggtctacatgcaaggccaattgatgatgaggaacttctcctggaggagcagatgttggttcagttgctcctgagtgaagcccaatcctcaggttccatcgctattcacagggtgacagctatcgcttgtatggagataccaaagctgcatgggagacatcaaggaccaggggtcacagttctctccttgacctcatatggaaggacaattgagtgctctctgcaagagcttccaagtccccagatgcaggcactgggccctctgcgagtgtctcgaaatggaaactctgcagatggggtctttgctgccaaagctaacatcctaaaggctcgtggccccaaacagctgagcggggtcacctctttttccagcaagcgcttaaaaaggctccatatcagtgctccccagacaccacactgaagctttgcaggacaactctctgttctcaccatctgtttctctggggtccccttagccaagaaagagtctgtacagttggttgggagtggggtggggataagattttacttttagttctcacaccttattcactacctgtgtggttatgctcagaaataaaaataaaataagtttagtaagatttctttgctattatagccatcagacaccatataatacggagaataataatttgttcagtttatgaaatg

SEQ ID NO: 475902 - DNA, 900 bp, Homo sapiens
ggtgggaacagctggagaggatccgtctctccctgagagctccggagaccctctgctctggttgcaaatgccagagcagcggtataggtggcatgtggactctccagaagaaatagcacatagatctcagttcatccccagtctttgctgggtatctggagagagtggagctgggtggggacaagatgcagagcacacgactggggccccaaagacaaatttgcttactgtggtccaggacaagtctagcactgaaggagatgcagctgcttctgcaaaggctgccgttactgcagataaaggctcgttattcactgtgacacacctacatgtaccacctccatccatatttgctccagtgggtcaaggcattaccagtggaggatctgtgtcgaaacacatgctgaaccagcgtgtgcaatggggaggactctccaagagtcttctggatcatattaccttagagggccactatcaacacgttattgccaataacacaataattatgtaagattgagttgccatttcctagaaaagaagagagccccaagggaatggagcccagatgaggcaaattattgaaaatggggaataagtgaagaaagctatctatttccttgaatatttctcccttcacttcttgtattattctttggatttccttgcattgggcttcacttttctctggtccctccctgtttggcttaataactaacctccttaattctttttcagctgattgagttcagccctatgctataaatagcccttgtaattaatggctatctgtttgaaaatcagttatcaggaccacagtttaggagcctttacctctgaaattcatagagcctattttatgtctcagtgataagggaatgataatgtgagttcaaagctaaa

SEQ ID NO: 475903 - DNA, 1091 bp, Homo sapiens
gtccctgaaggacagtggtgaaggaaaaatcttcccagtgggcagaacttctagcaatgcacctggttgtgcactttgcatggaaggaaaaatggccagatgtaggattatatactgattcatgggctgtagccaaccgtttggctggatggtcagggacttggaagaagcatgattggaaaattggtgacaaagaaatttggggaagaagtatgtggagggacttctctgaatggtcaaaaactgtgaagatatttgtatcctatgtgagttctcaccaacaggtgacctcagtggaggaggaatttaataatcaagtggataggatgacccgttctgtggacaccactcagcctctttccccagcctcccctgtcatcatgaacaaagtggccacggtgacagggatggaggctaagaagggacttacagtgttggctggggtgattgacccggactatcaagatgaaatcagtctattactccataagagaggtaaggaagagtatgcatggaatacaggagatcggtgcctcttagtattaccatcccctgtgattaaagtcaatgggaaactacaacagcccaagccaggcaggactacaaatggtccagacccctcgggaatgaagatttgggtgacttcaccaggagaaaagccacaatctgctgaggtgcttgctgaaggcaaaaggaatacagaatgggtagtagaaggtagtcaccaataccagctacgaccacatgaccagctacagaaacgaggactagaaggagaaaagcgtgatctcaaggagccaaaagaaggagaaacaggtcaaaagggaggaagttgtcagtgccgtttttgagatacatgaaaaaatttttaaacatgatcagcataaagatggatttataacaattagatttctttactgaccctagattctttataatgcaaacaaatatttaccatattctaattttttctttaattacaaaatagaatttttgaaaaagataaaaatgtattttatactaatcatatgtgaattcaagatatttaaaaagaatatagactttctgtacaaacagccctaatttgaatt

SEQ ID NO: 475904 - DNA, 834 bp, Homo sapiens
tgaattatcacaggagtccaaatgtccctggggagtggggctgtaaagtctacactttcattctcttctctgacccatggacattttgcacagggcagtgtaacaagtcactcgcctcacagagccctctgggaaaatcccgcagaaattcggaagtcatctcttcctacttgcagtggataccagactctttctcaaaaagctgagcccattcatgtaatagaattgcccttgaagaaataccggaagttattgggaaagaatttttatttttgtcgtgtggaaataaatgaagaaaaatcaaatgagaataagcaaaggctgtttacttactcagaacgtgctatgagcaagtcagctgccatcacttgtcttttggcagaaactcagaggcaggcagaggagtggggaagcttcatagtgggggaaagggaaggctcggagagtgtgctgattggaggctgctggtgcgggaagctggagggggctcactggaagtgaggtgtcccatgggatttggtagagtgcaacttggctttctctgcttggtcctcagaaatagggacagaaattagaaaaactgtcagtttttaattaagtcctggcccttttggagcaaatgttacaacggtttttgttttgcttcctggatggttactagagatagcgtctgacttcctaaaagtctgtgtcatagacatcaggctggcttcctgggctggctcctgcagatgatgggttggtttcctgggctggttgcatagattgtgggtcactttttaaaaaatgtattaatgaggttttactggtggcccgccttcatctataactgcc

SEQ ID NO: 475905 - DNA, 888 bp, Homo sapiens
ttttgcttcatcttgggtaacatgaaggattttcatctcctcctcatgggccagccagtggtctgttcactacccgatccccgtagtaagccgtgggtaattggtaatccacctatgaagtcaaacggggaaactgtggagtacgacaaggagttctcccctcgtcagcgacaccacaaagagttcaagttcaacttatcccagattcctgagggtgaggtggtgacggctgcagaattccgcatctacaaggactgtgttatggggagttttaaaaaccaaacttttcttatcagcatttatcaagtcttacaggagcatcagcacagagactctgacctgtttttgttggacacccgtgtagtatgggcctcagaagaaggctggctggaatttgacatcacggccactagcaatctgtgggttgtgactccacagcataacatggggcttcagctgagcgtggtgacaagggatggcctggtgggcagagacggcccttacgacaagcagcccttcatggtggctttcttcaaagtgagtgaggtgcacgtgcgcaccaccaggtcagcctccagccggcgccgacaacagagtcgtaatcgctctacccagtcccaggacgtggcgcgggtctccagtgcttcagaacaggactctcagatgtgaaagctcagttgtgtctcaaggacaagaagactccatcactgtgtcctccctcccatccgctggactccagaaaaatgcacctccatatggctcctttcaagttagcccccaacccctcccaggtgtactggcccccagagagacagaatcaataggatatatggagatatatatatatataggaggagatttattatgggaattgactcaggcaattac

SEQ ID NO: 475906 - DNA, 2262 bp, Homo sapiens
gagctgcggcttcctgcctccccaggcggcttcggttccaagggtgcctggctgcctagcgtcccgcagtgtccagggctttcagacctcacctaagcaaatgaaacctgcccgtgggatgccctttggcttttatttcacgagtgatcagaagctggctaccgccctggtggcaagtgtgagcttactgtcacttactgtctgggcagcagtttatgacatctgtgcatatgcagtggaaactttattcattggactgattgacatgggatcacatgtggaacaaggagagaacaggacccaagagggacacgaacaagagacgggcaaaagaagaggagccaaggtggacaaaaattggcaagagaatctgaaaagacaagccacaggtgatcaaagtaattgcaactgcaatatgcgaagacttttgacaaatcaacactgcctcttggaacccaacagccatgatgtgaaaagcccaactcacatgcaagaccacattggcttccaattggtcatggtgggagtatttacactttggagatcagcaaacattacaaatcagatcttgttctatgggttgttcattgtccggaccagaggtctgcaaaagttgtctgtaaaaggccagatagtatatattttaggctttgtgggccacacggtctctgttgcaacactcaaccctgttgttgtagtgcaaaggcagtcgtggataagtcatgaacgtggctatgttccaggctttattggcaaagccagatagcaggctagattcggctcaagggccatggtttgctgactcttggtctagacttaagaaagtgatggagaaaataataagaagaagaattaacatgagtgttatgtctgagtctgttacattgtgatgagcacaaaaacttcaggaaatattcttccagtattcaaaaactatcatctaattcagcaaagaagttgctcatgtcattgatagacaagtgaagttccaacatacatatttgttgtctcatttccattttaattatgaataaaaatgaaatatcaaccaacattcatgtttgaaccacacacatttgtcaatgatatgagcaacttctctgctgatcaaattataattaagcttattcagagtattattttgggacacaatcatggatgataaaattattaacgacattggaatttttaagaaatagcaagtcacattgacattatagaatggaatttacaataaagacttgtatattttatttgcaaattatgtactatacatcctttttattagtaaactttgtaattatctcatgtacatatctgtgtacttatagtgtttttatgttgttaagcatttaccagtatagcattgtacataactgttcagaacttggcttttgttcacttcatatattttgaagaatcttttgtacatatatacctgcctcattcttttcagcaactctatatttttaaacaacttctagtattttagagtccctgtttgtttaaatactctcttagtgatagatatctaggctgtgtgtcaacctttctccattggaagcaatggaaagtttttaattattagccagttgggtttaatttagattgtgcagtctggctccagccagtggagacaggacacagtaacagggacaaactgcgtaagggataaaaattgcttccctcctttgttcaggtgtgctcttgccattgttccatctgcaaggagcaccctttctgcagaaagtaaaattgccttgctgagaaaactttttgtctaaatgctgatttttccttgtggtaccaaggaacaagcattctgtttctaaataaacattttacttataacagaggcctaaggtagaaggattgctgggagttcaaggctttgccacccagtccactgtgctaccttccaaacatttgttgtctctgtcacccccactcattggatggcatcctttggtctaggctccatcacctcatgcttggtgctgaaatgatctcactgtcttcagcaaagaccccttctaattctacattatttttatatcagatggtaatacgttacgtttcctttctttggaaattaaaaggtgagcagtccccaaagaaatgtgtaagaaaaaagggtgttagtttcctctcaattcccctccaattccacttccttgaaggtaatcattgttaacaatttgatgtgtacttttccgtattctcctccatgcttgtgtatagtttttaaaaaatgggtcctat

SEQ ID NO: 475907 - DNA, 770 bp, Homo sapiens
ttccgtttctgtcctatcagaatgcccttgtttcaatcttccctgcaattgtctacttttaggatcctgctgataggtgcgattctggcttggaaggagcaggatggagaagtaaacaccgagctccaggggatattttttaattccgggcttcagcatcatccatccccaagagccccagattttatacattctctcacatccaaggttgtagaacacctgacagtatggtcttcactgagacaagaacaagctaatggtggtatcctgggtgacgttgcagggggttccaggcattgtacaatcagggacgcattccttcctaatcagattcagcaacctgttcagatgagtctgctcttaccacaacaaaaccctcttaagtggcagcccatgacacaaacctcacatcttttacataagaagcctccaactctctgcccagctgtcttcatagaagcagatggtgtacaggctgaaagctgccccagccactggggaccaggaaactgcggacttgctttcctgactcctgaagtgaccaaaatggagaataagccaaaaatatcttggcaaagttaacaagggaacgtcataagttgagcttagagaacactcagaaattgcaccatgcactccagcttgagcaacagagcgagacctgtctcaaaaaataataataataatcatttaatctaatgtaaaaacttttttaaaaaaatggagggatttacttcgggctgattaacttagggatgaagacaattgtc

SEQ ID NO: 475908 - DNA, 656 bp, Homo sapiens
atgcccaggaatggccaaggacagcttgcagatcagaagcaagatggagtcaactatgtcagatatctcttactgtcataattttgcaaaggtggtttcaattgtggtctccagaggtcatctagcccaacctcatcgtcttatcaaagaggatgtggcagcccagagaagtgatgcgacttgcccatggccacacagtctgtcgggaagagaaccagggcagagcctgggccacagccaatactgtgtccacaagaccacagaatatatgccagaaaaagcaggtgctcaaatccctgaaatcacaacggacatgtggccccctaagaaggaagtgctctggattgagttcaccctctccctgcacggttgcaagggtagggcctgccccactgcacaagccctgggtgctgggcctgacagatgctctaatggcctcatgagccaccacaccctaggagcatcacgagggtcggtggagcccagggtgaggtacactggggacctgcaagaaactgggaactgcatggatttgggaggactcattggggcacaataggagggtctcttctgtaaggtctttcaaatcccaccaaaatactggatgcctaagacttggaacgtcagagccttaccttagggcaacagcctcttgc

SEQ ID NO: 475909 - DNA, 984 bp, Homo sapiens
ctctgtgtgcagtgatggagagtggtagcttgaaatcagccatggtggcggtatttgcaccatgggagttaacaaacaccacaaatcagagctttttttctcctggagatctggttgttaaacacctaccagcacacaactgtttctggagcatagtaggattagaccatttcttgagacccactttgctctatgtcacattgttcagagaggagaagttagggaagaggagggaaaatcaggagaaatgtggaatgaaattgcaaacagattatttcaagagcagacattcggcagggttggggagtgggtgtgtctcagacgccctgttcttagggaggacgcagctgagctggcagcagcagcatatgaaaatcccaaacctggcattccacatcacctggaggaagctggctgggcaagagtgtctctctaatgcagggaattgaagacttccccactcatcccaaaggtggtttgtgggatcatttcttagtagtgtacaagggagccaccaccaccatgctaaactccaccatttctgctgtcctggtgaattacttctggtctcctcatcctgctagtaaggtgaacacagtctctcctcatttttccagcccccaacaattgctagggtcacagaacaggcaccttcacatccttcccataagcctaagaaagtggggtccctgacttggcattgcactttgaaaatgtcacccgtaacgcaagagggaagctgtggaaagtattgaatacaatctttagaaagcaaagcctttttagtgaggaatgcacatttatttgacagtgttcagtgttcagtgcccactgcaaggcattttgctaactgtcatattctatgaagagtggtgaaagcaaccccctaaagaagtctaactgggatgggtcccggcatagaagacaataaagctctgggccctggagaaggtgtagaatatattagctgtccattaggtttgt

SEQ ID NO: 475910 - DNA, 1144 bp, Homo sapiens
atctgatttttttacatccacacagctcaggcagcagccctgagggttctggagcacaacttgaagaccacaggggagagggggtgatggggacatttagtgcagtctggttaccacttcaaggcaagcagaaagtcggcacggctgggcttagactgggttttgggaagagagagacagtgtcatgggctaagatttggaaactaaaagagggagtaaggaggaagaaccaactccgaggcaaaggccctgcctgccatggtgcccaggtggttctgagcaagcaggctcaggatggggttctgggtgaagccataggggccaagcaccagggagcaggacgtttctacaagatgcccccagacacagccatggcagtggacagagtttttttgcaactgttggttctgaaagtctgtgtgtggccactacgccctgtgcacggccatcatgcacaattgggcaggttgtgcactgcacaatatctcccaggcaagggatttggataacttagaacaagttgcttccctttcatttctggtgagtgcatttggtgagttttatgtttactgtatcaaactgacaaagaagtgtgtacaagctgacctcaaacaacagagatgactgttttggcacctggtttttagcacagttgcatgtagagccgtctgataaatgatagaaaaatttagtagatttggggagtttggttttgatgttgattgaggactgagtaaagattcaatgcctgacaacgtgtggcttgtagattaatagctctgattgttgcatgtatcagataaaatgatcaggaaatctgagcatctcttctggtggttaagagcctgagctccgcactttgtagttacctgatctttttaagcttctgttttatcacttgtgaaatgggaacagcaatagcatctacctaatagagatagggtgagaattaaataagacaatgaatttagagcattgagcattgtgcatggcacgtattgaaaactgtttatagatgtttatttgaaaaaaaattcaaaggctttcactctcattttgttctctacagggtgttattttacttgttgcaatgcatctccatacatctctcttaaaatactattttttttttaaactctaagtt

SEQ ID NO: 475911 - DNA, 656 bp, Homo sapiens
tgcagcagcatccatccactgctcatacacggaagagacctgaggatgatcccaggcatgaaatgttgagagggggtaaggtgatactggaaattgcccatcagatttggcaatgtgaaggtctttatgacttgatgagactaatgttagcctggttgactgagctagtgtatgtggaggggtggggacgagggaagatgtgcaaatgtttggcacttcctagagacttgttgaatggttttgaccaaaatgctgatagtgatatggacaatgaagtccaggctgaggtggtctcatatagagatgaggaacttattgggaaatggagtaaaggtcactcatactatgctttagcaaagagactggtggcattttgctcctgccctagagatctgtggaactttgaacttgagagagatgatgtagggtatctggcagaaaaaatttctaagcagcaaagcattcgagaggtgacctggtttttcctgaaaatgtagttatatgcattcacaaagagatgatttgaaattgaaacctttgtttaaaagggaagcagagcataaacgtttggagaatttgcagcttgaccatgaagtaggaaaaaaaaatattttctgggggagaaattccagctggctgcagaaattttcataagt

SEQ ID NO: 475912 - DNA, 785 bp, Homo sapiens
aaattgagttcccaggtaatcaactctcacagctccctccaaagtttgttttaaatccttaagtctaatcataatgcttaaaaaaacagcacttcatattgacgataatgtagttcttcagaacgttgacccaaaccgtggtcactttgccattagtcacgtcagctttggtcaatcccaacccacatgtttccaaaacactgtggaggtgctctggcaagacagatccaaggccatcaataggccaatgaacccaagcggcctcaggtcttgggcgtctctgaatggaacacctgcagggaaatgcaagcatgagagcaagtccacagagcccaggctagtgggtgctcaggacgaaggcattcaggtgcttcgttttgtcttgtgtgaaacagccttcagatgttctaaagtgagacagtcggctcgctatggcagacctctaagttccaccctttccaagcggacttcctcaggaacctccacaatcaacctgtgcaggtcccagcatccagattattatcaacacctgggaagtgtttgctttgagtgcctttctctctcttccttgcccaactcctaccagctaaagcctccaagacacgcccataagatgtcctgccattgagaaaaaaaataataataaaaactgtgagtagagttcttacaaggaaaaagtgctttttaagatttttaaaaatattttaagaatgagaagggggccagttgtgcgtggttgctcgtgcctacaattccagcactttggaacgctgggataggaggat

SEQ ID NO: 475913 - DNA, 816 bp, Homo sapiens
ggaacggggaagaaataaagtcctgtgaggacatttggtaatgtccagagatatagttggttgttataactgggtagagtggagtgtgctacggcgttgcagctctaacccgcaatgtgactgtgtttggagacaggccctttgtggagaagaggaagagacaccagggctctctctatctccacacaacaaagagaaaaggccaaatgaggacacagtgagaaggcagtcatctgcaggacaggaggagatatctcaccagaaaccaactcagctgaagccaaatgagggggagagaagaagcagcaccagccggtgttattttaaagctgccaatgaggaccccactgtaggtagcagcaggaggagcacagatcgtcccgggtccaagatagccactaagtcagtgaagctttcaccagaggcgcacgtggtggcataccagtgaaggccagtgcaggtatagaatcgtatcatcaatgaggagagatagcttgacttctcctcttcctatttggatgcttttatttctttctcttgcctgattgctctaagacttcaagtactatgttgaatagtactggtgagagtggtcatccttgtcttgttccagtcctcaaggggaattcttccagcttttgcctgtgggttgctgctttgaaaaacagtttggcagttctttaaaatgctaaacatagagctatcatatgatccaacaattccacttcttggtatatgcccaagagaaatgaaaaatgtatgtctacacaaaaacttgtacatgaatgtttgtggcagtgtcattcactaatagcc

SEQ ID NO: 475914 - DNA, 546 bp, Homo sapiens
gaaaaggaagcccacggaaggatagctgtctacgcctgtccctttgtcaagccagaagcgaggcgagaatccgagtatccagagtgagcatttggcgtcaaccagctctccatggcctcatccaaaaaacacagctgcataaggatgatgtttattcacacaaatagcacaggaggacaccagccccatgcagacagcagcccgggggtcacaccagtccttctgtcctcacattggcagatgaagctctctactccagagccttcatgggggcctgggcacctttggaagcctgagcaggagctagaactgaagctggagctgcagctgaagccgaggcctgggccttgccaagatgaacatttaaatcagcagacttcaggtaaaggagatctccttcctggatgtgagtgggccacatccaatcagtggaagacctggacagaacaaaaagactcgtgtctcctgagcaagagggaattctgccagaaaacggtctttggacttcacctgtaacatcaactcttccctgggtctccagcctgc

SEQ ID NO: 475915 - DNA, 839 bp, Homo sapiens
tggatggatggctttgggtggatagccgggtgctgtgagtacattcattcactattcattcagcagatatttttattgactgcctactctgtacaaattagtgtggatgaaactatgccctgcccacaggaacatgtccagctggggagcaagatggaacatgcatgcaaagccctcgctcgctctcggggcctcggccttggcgcccattctggccgtgcttgaggagcccttcggcccaccgctgcactgtgggagcccctttctgggctggccaaggccagagccagctccctcaacttgcggggaagtgtggagggagaggcgcgggcgggaaccggggctgcgcggcgcttgcgggccagcgcgagttctgggtgggcgtgagctcggcgggcccctcactcagagcggccggctggccccgccggcccggggcagtgaggggcttagcacctgggccagcagctgcttgcccagtcccattgaccgcccaaaggctgagaagtgcgggcacacggcgcgggactggcaggcaactccccctgcggcccgggtgcgggatgcgccaggctacgacatggatgaaccttgaggaaattatgcttagtgaaaaaggccagacacaaaaggacaaatattgtcattccacttagatcaggtccttacagtagtcaaactcatagagacagaaagtagaatgatggttgccaggggactggggaggagagaaaggggagttagtgtttaatggggacagtttccgcttgtgaagaagaaaaaattcgggagatgggtggtagtgttggttgcacaaaattgtgaatgtacataatgcc

SEQ ID NO: 475916 - DNA, 1216 bp, Homo sapiens
cttggggaaatgggacactgcagagaaaagataacttccagaaccccctcgaaggcagaagcatgtaagcccactcggccaccccaggactcagaaccgctcccaagcaaagccgcagctccgggctttccacactgcaccaagctgagcaactagatgctccatgaggctgccacgaaccgaaaacaaacgaacaaaacaaacataagcacccaaaacaacaacctggctctcctccagaatccaaatgaccacttggcttacatgccagaggaaatctggggtctcaagtggcgcagggtcgggagctcggctggtgccacagcccccgccctgctgtcccgccctatgggactcaggctgcccgtccccgccagattcagaagcccagctagcttcacccagtggatcccgcactggggccgcaagtggagctgcctgtcagtcccgcgccgtgcgcccgcgctcctcagcccttggatggttgatgggactgggcgctgtggagcagggggcggtgctaagcccctcactgcccggggccggcggggccagctggctgctccgagtgcggggcccgcggagcccacacccacgcggaactcgcgctggcccgcaagcgccgcgcccagccccagttcccgtccgtgcttctctttccacacctcccggcaagctgagggagccggcttcggccttggccagctcaggaaggggctcccacagtgcagcggcgggctgaagggctgctcaagtgccgccaaagtgggagcccatggaaaagaagtgcccagagcgagtgaaggctgccagcacgctgtcacctctcactagcactttaggaggctgagacgggcggatcacctgagatttggttgtgtcctcataggatcatttatcctgttcctgcgtcctgtgtttcctgtaaactgctagttacatctagtggccacatagttcaggttcaatgtttttaggggcaggtgaggtattttacagatggttctgtgtacttccttttacatcacaacaggagcacctatggggctggctgctccgctttcaatgacaaagcaatgggttcgggtactatcagcctgatccaaccattgcaaactttcccaccagctcttctcagcatccttcacaataatctatgagggaggtgctactattacttccacaatggttacagcatttgccttcttaatggtgt

SEQ ID NO: 475917 - DNA, 669 bp, Homo sapiens
tttctgctcctgtgtgtctgtctacacccagagctatcctgtctgaaggcgcatctgccaagggatgccctgccaaagcctctcagtgccccctgcacgtacctttgaggcctcgcatgctttggtctcttcccatccagcctccctggctgtgggcactccagccttgctgcctgctctcccctgccctggcatctctagtgcctatcctggactgcccttccttaccccttttttaccatattgcctgcacttccttgagagttcaactcagtgcttgcttcctgaagaaagatcacataatatatatttcgcaagatattttaggctaaatggacaaaatatagaggatgaggacagccccacaaacttgtctttctggctgggccactggacctctgcatttggcaggcagggcaaagtaaggtgggcctgctctctggtagacctcttcgagttccactcaacgttagcttccatcctgcaaacttataagctgttcttgactctgtctcattcctcacatcctcagtgtggcgtgtggaaagaagaggaaccagaaaagaatgtttgtgaagttctggcttgaatctcgtgccgggaggtgagtctgcacacagcccccgatccttctaaatgcacgaggatgacgacttctattttcccagg

SEQ ID NO: 475918 - DNA, 570 bp, Homo sapiens
tgcttttctgtctttaccccatctggccaagactaactagagaatgtcaccaaactatgccaattggaccagctgcaaatttaggctaagccttaccacatgtgactgttcagacctagatctggctcatttgatgcagttgtgctgccagtgtaaactacacatcagatttcacataaaaaacaatgtcaagtgtcagggcagcaggcctggccatggctggattcatccatttccaaagaagaaagcagacaccactgtaggtatttcaaagcggaagagatttcatataggaaatctggttaccaaattcttattaaaactggaaaaacaaggaaaatgtggtgtttccagaaatcctgaactgcagaaagctgctacctcttttacaggatccagtgctcagtgtgtcattttagtatgtgctatttatggaaatccctttactaattcaccatcataaacccatcgccaagcatatgtaggccatgattctaataagagcaatgggttttgctgagttctacccactctgttaccctgggctgttaagaacatttactttaaggc

SEQ ID NO: 475919 - DNA, 688 bp, Homo sapiens
caacccatatttaaacaggattaaccctgcattgcctgaggaaatggtaatggccccctctgaaacagtggccaaccatgacactgctgattctcccaaagacccacctccaccacccttctttgcttctagacctataactagactcaagtcccagcaggcctctaaaggcaaagtacaaagtgtgacccatgagtacactaccctccaaaagaactacttgcattttctaatttatatcagcagaaatccagggaatatgcatgggaatggagagtggtttgtgagaggagtcccagcatccctgaagagctccatgattattcttctcaataggtcagatcttctagtgggaaccacagatattcaactggaaaacttaaatccagtgggtataataggattctgggatggcaggagccaagatgcagctgtcatcccagaatcctgccaaaggcaaggtgggcatagttaccataaaaaacagcagagacaaagcaaaaatcagaatagtctgacctatgtaaatctacgacatttgcaaattaatcatggtgttcctagaagtgaaacagtcaggaagcctatctaaatttttgcttgatctgtataagtagaaaacttgcaggtcaagtgaacaaaagtttaactcaaataataaaaactgagactcaaatcatggcccctc

SEQ ID NO: 475920 - DNA, 721 bp, Homo sapiens
gcacacatctgtgtgagcgactgagtgtgtctgagtatctgtgtgtatgggtatttctgagcatgtatgcctctgtgtgtatgcattgtctacgacgcgagtgtgccacctggcaagtggatcctctggccccagtcaaggagctgcagctgatggtgcatggagcagagagaaactgccctgctgagccctgccaaaatcataaaattacttacggtcagcccctaagcttctcggtgaagggaagagcaacattgaacatccgtcttggacaccttgccccttggttcttctatctcacgagtgcctcgcagtggctctgcctgtggacccttactcatgttctctggaccagggttgttaaccatagcagatcgtctctggatgctgtagcaaagccagcaagtgactcactgtctgtcctcaaactctttgcagcccccattactgaagagccccacagacaacttagaaaacacagtgatgggaaagtgacagtgtttgcagagttgctggttgccaggggtctacatgcaaggccagaattcctggtgggctttgctgtcatttcttcataacgcctactggggacactattgctttctcccttagtatctttcttgtgacaaccgcatgcctggagaaaccagcaaactccatgatggctatttatctataatttatttttaagaacattctgccaatgacatctcaagcaaga

SEQ ID NO: 475921 - DNA, 575 bp, Homo sapiens
ttaagtctgcatgtatgcagaatgcaagagtgaagaaggcttggtggcttccacccagatttcagaggatgcatgggaaagcctgggtttccaggcagcagacggctgcaggggtggagccccacagacagcctctctacttggacagtgccgatggggaattgtagggctggagccccaacacagagtttccaccagggcactgcctagtggagctgtgggaatggggtcactgtgcttcagacaccagagtggtgtaggcactggcagcttgcactttgagactggaaaagccaaagacattggactccaaccttttagcaaccctcatgaaaccattcccatcagagaaggacccagtatggtgaaaaaggaaacaaaatgcctgaagaaaaagggctttggcattttgggagcataaaaaaattattgaatgggggtaaccaataacaggaagagcctgaactatggagtaccagggagagtaacagtttttccctactccattagatgaccattaggataattcattcattcaatacatgcttattctgtaccaggtagcaatgtataca

SEQ ID NO: 475922 - DNA, 1898 bp, Homo sapiens
gctgccctgggaagatagatgagcccacttggcctctggccagcacatgccccacagaggtgatgagatgatgagcccaaagacacagcgcggtgcgtgccacggaggaagtggtgttcgctcgatagtcctgaatcctcctgcttaccaacgagctcccggttcccacccatgccagagagggagaacggatgacttgggagaaacgtctccacagctcctccttggctctgggcacagcctttctcttgagtggactcacacagccctcatgaggccaccaaaaagacaggacacctcccaagccacagctgcagccctgagagggaaacgtacaagctccccacctggaggcagcctcttcctgagtgagcggcggggtgctccgccatcaacttgtcagtcattcatccggggaaggatggaggaagccgctgttgaccgcttcgcccacaccccagggtggctctgaggcgctcctgtggcctgggacagaatgtttctgtgaacagcagcccatggccaggcaaacacagaacatctcccctggaagacccgcattcaaagggccaccagattaaactcccacttcacactgagggggagctgataagcaataagtgaaggtgctcatagcagtcatcaatgtgcttacagagcatttagctcaaagttgcataatctttaaccttccccaggccccagcctgtcggtctccacaccagccactgtgaggacaggatgaattcatttgcagaagacaagcacaaaacctccgatagaaaataaatgcaatgtaccatagtaaatgggagcagcttaaaaaaaaaaaagcacaaaatccattggggaccctgttgccataggaactggcattacagcttgcttccgataattaatggagggttttgctattacagtattcttgaaacttcggtttcccctgtgctgcactgcagaatgcagcatcctctccccattcataaatatttcatgactaccggctgctgtgtttcatcaccgtggatagcactcggcctaatccaccccttgccaaattcatgttgtcctgtcagagagcaacttccatttcttcctctttcttctgcagtcttcatttatctggtttgaagttctttaccttcccaaccccagaatggtggctttcattgtggctttgtcttcagacgctggacatctctttcctgtgcctgtcttattttcctaacggtcccgtgggcctcccccaggggcattggttgtgctccggccgtactgccttctgcacatctgctttaatggagtcctgggaggatactgggcttttgaattctggtgtctcaacatgctggctgagcctctgttccctcatggttaagtagagatgccacctgccctgcagggttggagagagagagccagaaaagatacaacacgtgtaaagtaccagtccccccacgggtgggctcaaatggtcacagtggctgctggtgttggtttgttctcttatatctcttgtttttgtctagataaaatccgtaactttttttaattgacaaaattgtatgcatttgtgtgtacagcaagttttgatattttgacatgtagaatggctgatccaagctaattaaccgtgcattacctcacatacattttttgtgatgagaatacttaaaatctactcttagcaattttctagtatacaatatattaattgtagtcaccatgttgtacaatagatgtcttgaaattcttcctcctgtctaaatgacaattttaatcttttcatcaacatctccccaagccccccaacccccaacccctggtaaccaccatcctattctttgtttctatgagtttgactttttttagattccccgtgtaaccgggatcatgcc

SEQ ID NO: 475923 - DNA, 1984 bp, Homo sapiens
agctgggactacagagccatgctggggtgcagcgtgtggactccatgccctgatttactttcggtgtggttgggtgggtgacaaacgggattgtttcaatcctttagccactttcccttgatttctcacaagccccaaatatgggtggtgccgatccagagacacctccagccttctcagacttggggctgggctgtcccatgctggctctgattggcagcataggccatttaccggccaaaggcccctttgaaggaaacagtacagtgagcgccctcggcctgctacacacagaggctctggaggagagagggaggaagtccttaagccagggtctttgctcccaggttctggggttcctgatctgccagaaggagaaaaggcagaggaaacacacccacagagccctggaactcagcgccactccttggttcccagctctgacaggtccccagcagcacaaagctgcccagggcacagctggaaagccagccaggctgggtgctccccaaggccctctcagctctcaccttcaggggtcttgtgccatggagttttcaggaggggccctggagacaacaggaccggtggcaccgcagcctttccctttcagggtgcttaagtgccccgggctggtggagggctgggcacaggagagaggcaagtggcaacagcagtgtgccaacagcttagatatagagtgtgagagagaagagtggaggctggttctcaggctccagaagcataagcctgcatggagcatagcgtcactgagcaagacaggtgtggaggatgagaagcgggccacaggatgggaagggaatctgtgtggaggcggtgccctaaacatgctgccttgaggagggacctctacatggggtggccgggcacagccaggctacccatggggacctcaacagctttgccattgcacactatctttgcagacaagatcttaatcacatccaactttctgcagttgcacagggtacctcagacccacatcccagatgacattcctcagaagctcgcagctggagatgacatcaccttagacaacatcaccctagcccaagacatcgctattagagatacatcacctggacactaaagcctccaacccagtgacactctcaaggtgctgacaaaatggacatggacatttgttgcttttcttcttttgaattaggaactctattgtgtttcctgaatttactgtctgcttggcccatgatcctggtatgttccttgctctctgccaaaacatgcaccgtcccctccacacctaaaggaaaacctggtagaagctactactctcaatgccattctaaaattgacgaagagtattattttccccaagaggcagctgctgcaggccagtgaatcctctggaccctggggagagggtcatacactccctagtgacttctactgtatgctccagctttccaccaggacctcctgccctgtccccaactgtaacgaccacaaccaccccatccccttggttacacacaaatatcaccagtctttacatgtactttactgacttctcagataataccctccaacaagataactgcaggacttgccaccatgacctgagaaatacaccaagatattattgtccaatttttttgagatatatatatatttctcatacttttaacatactctgcaatccaccaagatattggtagagaccctggaaatttcaaatctatttcgtctgctaatgccatgtgaatgggaaacttagatacaggctggcctacaaggactccttatacttcaatttttgttcctcctttcaactctcataaaaaatattttctgtactatttagggcaaatgatggccttctttctaagtctcatccatcattgctgcaaaggtgccttagtttgatgttaaagtgtcacagggccaatgtattgaccatgtttctggcgtctataaagtcgatgttttaatatctgtccta

SEQ ID NO: 475924 - DNA, 535 bp, Homo sapiens
aaaggaggcgccaggacgaccttctcccttgctgcttcccagaatggctgctttcagtgaacttttagctgacaaaagtcaagatgcccctcccgtaaagatggaagtaaatccagaatttgaagagggacacaagagaaatggagatggaaaatcccatctgaccaaaattaatttggacaaatccagccccaccactacagaccctcctgcccccaagatttatccgtttgaattaatgagcaaacccttccaaacaggaccatctctgggaatgttaactcattgtaacccttctagtccctcataccttagtgtgacattgttgaatgcaggtaacaagaacaccctgactgaggtgattctgatgagtgacgctggctcagagccgctcttttacgtggctctaatactcaagtcattgaatgccactgaacaaccattatccaaggcttccttggttcaagatttcatagttgcgtaatttttatgttttatccaagttgttggctgaaaataataatagctaataatt

SEQ ID NO: 475925 - DNA, 2717 bp, Homo sapiens
tgagacaattgtttatagtaaatctccttctctctctctctctctctttctctctttattctcccttccttcccctccccttttgttccctcctctccccttctccttcgctcccccctctctccctcattctctctctctccctctcttttgaatgctgagagttcccagtgcgagtgatgcacattgctggtgctacaggtgccagtagaaggatctccagggcagtagaatcccatggcaacacggcagataaaaatgactcagccctctgctgccaaaggtctttgccagtgtgtgaagagcaaggatctcagttcttagctcctctagaccaggggtccccaacctccaggctgcagactggtagcaatctgtggcctgttaggtactgggttgcacagcaggagacaggaagaagaagaagaggaagaggaagaggaagaagaagaagaagaagaagaagaagaagagaaggagaagaagaagaagaagaagaagaagaagaagaagaagaagaagaagaagaagaagaagaggaggaggaggaggaggaggaagaagaagaaatgaatcaacagggaaatattatagctacatttgagccttttccttttaaatttgggatacaccatgaggggcccatccctggccttgttccaaactggggcattttcggctcaggccattccctcacccctgtacaaggtttgtccccgaccacagccagtagtgccacagtagatttatgctgcacaaaagctgaggatcctgaggaccccctgattgcagccatgtcgagactgatgctgaggaggaccccaactgtcatgagcaacaccagtcaaacacagccacccatgtgcggacagatcaagaagctgtcacagatggtggaagaaaacctgaggaaagcaggacaaccagtcacagcttctgaatgggagacattcctctccatatacccgtaaaaatcttttatgcattcacttagaactctgcattaatctttgctaggatcggttttcttaagtgacactaaactactgggctttcatcttgtgctgctctttgcatcttaacttttcctggaagtctacccaagaaagcccctttagatggtatgaccacaaggtctgtaatcgtcgatgcctcctctctttcccaacttgctgaaatctactgcaatgaccatttgctctacctacctgtggggaccctttgatggtcacaacgttctggtcagttaggacagctggaacccaatagttctcaccatttctttttggtgtcagccaaaaaggattaaaggaaaggactttaattttctcttcctaattttggacatgaataacttctaggtagtgggtggctatgaaaacagtatctctgggaatgatgcttcttttccttgttcttgtaaaacatacctattctttcacaacattggcacagggacaaaatacctaagtttagcatatgcaattttgtaattcatattttacctggtgccagacaaacaggaaaatacttagaaccactttaaaattttccctacaaatataaaaggtttattgatccttgatgtataaaatatagactattagaaaagtgcaaatgaaaggtctggaaatctggagaagctgttgtctgagaagtcagaagtctcacccaggtagctgtgatgtaggcagctcacttgtgctctctgaggatctgttgcctttttccataaattaaagaggttgaattagatcattgtgaggacgttttctaactgggtatgccaaatttaattagatatcaattagcacaaggattggctaactaaggcctgcaagtaaaatctaaataaagttttattggaacacagtaacgctcattagtttacatattggttgtggctgcttttgctacaatagcagtattgagtagctgtgactgtaactgcatctcccacaaagcctaaaatattcactatttgatcacttagagaaaaagtttgttgactaatggtcaacagttttgaaatcggcaggtattccattgattgaacaatgccatatttttattgaagtataatatatatacataagagtgcacatatcataaacaaaatgattgaattttacatacctgtttaactagatccccaggttacaataaaaaccaggtcactgccaacgctctagaagactttttgtgctaccttccagttactactctccccaaggatacccactgtcctgatttctaacattgatttctatcaatactttataattctattttgaatttcatagtatgtgctttgttggtgaatagactctttaactctcattatgcttgtgaaatgcaccagtggtatgctggtaaaccagctctttgggggaagaaaacgcctactttgtagcatttgctggtttctgtggcacaaatacacccaccatggctgatttcaagatgccaacttgacatcattgaacgcagattaggaagagatgctaacagttcttgctagtggggaaagccagtctttaaactctgagattttctccttaacttggtctagtctgctattaatacttgtgattgcattatgaaattcttgtagagtgtttttcacctctatcaagttgattatattcttttctatactggctattttgtctgtcacctcctgtatcaatttattttgattcttaccttccttgaat

SEQ ID NO: 475926 - DNA, 1400 bp, Homo sapiens
ctctggacacatctgaacatctgaaggagtaaatcccagacacaccatctttaagagctgtaacactctcccacgatggcactcctcacatcccagacgatgggcggccgggcagaggcgctcctcacctcccagatggggtggccgggcagaggcactcctcacttcccagatggggcaaccgggcagaggagctccccacttcccagacgggatggccgggcagaggtgctccccacttcccagatggggcggctgggcagagatgctcgtcacttcccagatggggcagctgccaggcagaggcacttctcacttctcagatggggcagccgggcagaggcgctcctcagttcccagacggggtggctgggcagaggtgctcctcacatcccagatggggcagcttggcagaggcgctccccacttcccagatggggtggcggccgggcagaggcactcctcacttcccagatgggacggccaggtagaggcactcctcacttcccagacagggcagccgggcagaggcactcctcacttcccagacgatgggcggccgggcagaggcgctcctcacttcccagatgatgggcggccgggcagaggcgctcctcatctcccagacggggtggcagccgggcagaggcactcctcacttcttcccagacggggtggccaggcataggcgctcctcacatcccagacgatgagtggccaggcagagacactcctcacttcctggacgaggcctccacagaagcagacgcctgtacagcctgcagaactgtgagctgattaaacctcttttctttatcaattacccagtttcaggtatgtctttatagcagtgtgaaaatggactactacaagaaactggtaccagaaaagtgggacattcctatgaagatacctgaaaatgtggaagcagctttaaaattgggtaaggagcagaggctggaacagtttggagggctcagaagaaggcaggaaaatgaggatacatctgaggccactggtccagaaggtgcaagctgtaagaagccttggcagcttccatgtgtgttaaccctgcatgtgcacagagagcaggagttgaggcttgggagcctttgcctagatttcataagatttaatgaaacacctggatggccaggcagatgcctgctgcaggagtggagccctcatgtagaacttctactagggcagtggggaagggaaaagttggagcccccacacagagtctccactggggcactgcctagtggagctatgagaagagggccattgtaccccagacccccgaatgatacatccaccaacagctcgcaaaatgcatctggaaaagctgcaggtgctcaacaccagccagtcaaagcagcctaaggaatgtactgtct

SEQ ID NO: 475927 - DNA, 664 bp, Homo sapiens
gttagactgacacagtaggattcacatgtatgtagaaggcttgaaggacctgagtgacatgattatgttccagccactctctctgcctgaagagaagatgaatcttgcatacatccttgaaagagccactacaagattattccctgtctgtgagaaggcactgagagaccacagacaagattttcttgtgggcaatcggctgagctgggctgatacacagcaacctgaagtcatcttaatgactgaagagtgcaaacccagtgtcctcttgggctttcctctgctacagaaattcaaggccagaatcagccacatccccacaattaataaatttctccaacctggaagccaaaggaagcctccactggatgaagaatccattgagactgtgaagaatatatttaaatttgaacatggcctgtttcttaaaaacatgagcactacagtagctgagtattaacaaatgaaacaaagtctaagaaacgtagtaaatatttcactatgcattggtagcagacccataaaaatatcataaagccacattaatgtaataaagtaataagacatgaggaaataaactgcctaatacctgtaagttacagagcctcttctacttttcataaaacaagaaaacaccaattaatcagagccatccaaatatgaa

SEQ ID NO: 475928 - DNA, 653 bp, Homo sapiens
aggaaaaccagagacctttgttcacttgtttatctgctgaccttccctccactatagtcctatgaccctgccaaatccccctctctaagctgctctgacccccgactgcaacagaacttagctgatgagtccaaaacatgaaattgactccagctcatcttttccattcttgaatttggctttgacaagaaccacagaagtcaatgggacctctgttggagattacaaaatcagtctccccttcccatggacccacagcaccaacccaggacaggcaggcaacaccaagggattgcaaacttcctgcttgcacacacttagctcctgggttggaaatggcaagagactctgcagaattgtctaccaaattgctgtggcaccagcagcctggggccaaaaggccactgacaggcatggaaggagacagacagcaggactcaaggagaggaaggccaagcagaccatgcatggcggcaagatggcagccccagtaccagccaacatgtctccatggttcaaatgtggatttgagggcaaactcagaagcccaaacagaccctccaaaatgagactgagttatgttcttatccctgaaccaatcactgaccacaggagaaactgacactctggatcatatgccagtcctgggtcgg

SEQ ID NO: 475929 - DNA, 797 bp, Homo sapiens
gtcaccaccagcacgtgcaccatgtcctcccgctgctgcgtgctcctctgccagtggcaatggaagaagagatccccgcgctcttcattgacaatggctccggcatgtgaaaagcagctttgctgggacaatgccctccgagccatattcccctccatcatcgggcacccccggcaccagggcgtgatggtgggcatgggccagaaggactcctacgtgggcgaccaggcccagagcaagtgcggcatcctgaccctgaagtaccccatcaagcatggcatcgtcacaaactgggacgacatggagaagatctggcaccatgttttctacaacgagctgtgcgtggccctggaggagcaggtggtgctgctgaccgaggccccgctaaaccccagggccaatagggagaagatgactcagatcatgtttaagaccttcaacacccaggccatgtacgtggccattcaggccgtgctgaccctccacagctctggttgcaccactggcattgtcatggactctggagatggggagatggccactgctgcatcctcctcctccctggagaagagctacgagctgcctgacagccaggccatcattattagcaatgagcgagtgcaagtactttgtgtggatcggtggctccatcctggcctcactgtccaccttccagcagatgtggattagcaagcaggagtacaacgagtcgggcccctccatcatccaccgcaaatggactgcgagcagatgcatagcatttgctgcatgggttaattcagaagtataaatttgcc

SEQ ID NO: 475930 - DNA, 757 bp, Homo sapiens
aggtaagctgtgtattccatcaaaggtctgtgtgtgcaggattgcatttccaagagaaggcattcctggatcatgatcattttgtctgagctgcatgtggccaaaagagaccacatagtgagtaaagcgtggaacagcaaggattccaaccctgtagcgcagctttatgtctggaggaagcaagtcttagactgggactgtcaggccaggaagaaaactcagagcatggacaaaaggttcagagggagtgaggaccgatttatatgtgttgagggcctgagccaggggaaggcattggccctgagctttgcctgtgtttccagatggaggccattgaactttcagtggatccaaagtctaacaaaagacaatgtcttgttttcgtcaccccccaaagaagaggaacctgtgagaaatattctggagaaatttaacaccatcagtggaagcaagaggtcagataatgagaatggttataataccaatgcaaccatgaccccatcactgaagaagaaggctaaacgactatgtaattttgatgatggatggaaggacacatactactgaactaggaaggtcttgtaatctttaatatgttaataaagaagcacatctattatgtgacagatttaaatgtttaagaatttgatttcaatgaaattgcatttcaataaaattggcttcctttgcaatcctgtgtattttattttgtgcatttctccagactgccaaagaggttggtgacacattgaaagtt

SEQ ID NO: 475931 - DNA, 1035 bp, Homo sapiens
ggagtgcatgcgggccgctgccatgacgaccgccatcttggagcgcctgagcaccctgtcggtcagcgggcagcagctgcgccgcctgcccaagatcctggaggatgggcttcccaagatgccttgcactgtcccagaaacggatgtgccccagctcttccgggagccttacatccgcaccggctaccgccccacggggcacgagtggcgctactacttcttcagcctctttcagaaacacaacgaggtggtcaacgtctggacccatttactggcagccctggccgtcctcttgcgattctgggcctttgccgaggctgaggccttgccatgggcgtctacccactccctgcctctgctcctcttcatcctgtcgtcaatcacttacctcacctgcagccttctggcccacctgctgcagtccaagtcagagctctcccactacaccttctactttgtggactatgttggcgtgagcgtttaccaatatggcagtgctttggctcatttcttctacagctctgaccaggcctggtatgaccggttctggcttttcttcttgccagcagctgccttctgtggctggttatcttgtgctggctgttgctatgccaaatatcgttaccggaggccttatccagtcatgaggaagatctgtcaagtggtgccagcaggtctggcttttatcctagacatcagccctgtggcacaccgtgtggcgctctgtcacctggctggctgccaggagcaagcagcctggtaccacaccctccagatcctcttcttcctggataactgtctacacctggcagttttctctgacgtgctgttcactcacatccctaccttgcatgaggttggaaacatcttcccctgtagcaaggcagtcaccttaaagctgcctctacttcccgttactcctgctacttctccgacccttctcactaccctctagttgttttaactcagtcatggggatccttgacacatccagacagagagagagagaaggcctaaatttccacaagcagtagc

SEQ ID NO: 475932 - DNA, 584 bp, Homo sapiens
gaatccaatcaacacgtatcagacctagttccctttcagattgcccttgaaagccacagacacaggcagtatgcaaaatgatgaaaaaatagataagattaaagagttatttttatcccctgccaaatggccaactgggaaaagtaaccatgatactaatttcacatacaggatgctaaagaactgtgcctgggatcctccagccctgaggacatccaggaagaaccctggaagctactctgagtgtgaaagccaggtttatcgggtctttctccctaaacgttccagggcctgtttgaaaaactccaaactggatgaactcaggaagtttaatcgatccttcccagagacattgagaattaagccatggacccagttctggcccatgcgacataaagagaatctgctggtcatggctctggaaaaacatctgttagtaaaggagacagtctatggtcccttctgttttatcctccctcctgaattgaatgcaaatgttaaggttggatttgaagcagttatcttgagaccatgagggaaagaccaagagaatcacagaatcacagagatgtcagtcctgatat

SEQ ID NO: 475933 - DNA, 1425 bp, Homo sapiens
tctcccagaggactgctcactccctttgtccctgcagccttcaaatgcataatgcttgtttgtatccgcatggctgtgctcctgagggccgtcctgaacagtgagctgatggatgagaacactttggggccagtgaaagcagcaaggagggaagctgtaccctgcaaagccacaggggtggagctgcccaagactatgggaacccaccttttgcatcagtgtgacttggatgtgagacctggagtcaaaggagatcattttggagctttaaaatttgactgcagcactggattttggacttgcatgggccctgttggtgcaaaagtaattgtaactgcaacaatgcaattacttttgcaccaacctaatacctgggtgtggtccggtgagtcaagctgtggaatgtcaggaaatttggctggtgaccaagagtcgtcatgtttgaccggtgtgacatcatgggctgccacttactggcacaggactgatgatgatacaggaacacacataaagggacacagcagcaatcacaaaaccacacaccccactgggtggcctaacctagatttctgccctgaagaggggctgtggcaggatgagcaaccgcaacccgtgggcagcagtccccattctctgattcctcttgatttcttacggaaatggagagtttgggcttgtgggacctttgaacatggatatcaaggtcattcaaacttaccagaaaacatgttttcttaaaggttctgtctttttatagtgtgaacatgtttttattgaacaccaacttaatttcaggaacatttcaggtacattgtcagaaataaagactcttaagaatgtattattatgtacccaatactggtttcaggcctttacatgtattctcatgaaactctatgaagtagatattattatcaatattcctactttacagatgaggaaacccaggcctggagaggtcaagcaacttgctcaagtggcacagctggagagtggggagctgggacttgagcccaggtagtgtgtccccagcaccttcaactaaactccattctgtgctgccctttggaacacccactcaatggccttcacactccatgtcctacttgggaggacatgtgatctcaacagcactcacaaatgaaggctttccagacaggatattgaagatgggaggtgtgagctgtgggagagagctgactaagaagaagaaactccccagaaaggtggcctgccagtcttcacgatgtatgggagcaggtgggaaaagagctgcaagtgtttgcacttcatcattgaaattgttgaaactgctgatcaggaaacacagaatgagtttaaccagcgatgccaacttctgcaagatggactccagcttgggagctctgtatggaataaataagatatcccagacatcaaagcact

SEQ ID NO: 475934 - DNA, 3137 bp, Homo sapiens
agatcagtatacacacggatgtggactcctcactacgtattgtttgaatgactgcttcttgcactaatagaactgaaggacttatttggtgtccatagctgtgtcttgcatacaaaggccacatgaacaagatcctgaagatgattgtgtccttcacaatcggctttcaaaacatggtaaagaataccacctgtgactggagtctcacgaggaccagccccgagaggttgggaacaagggctctaaccggagaggactgcaagtgctccctgagagcccagttctgctccatgctgtttttcagctggcagttcgattgcactgacctctgggagacttgtgtgcgttgcttcggggatctccagccccctccggcaaactccccagtgctggttcatcagatcaaccttctccctctggcccaggagacgggcctgttctatgtggatgaaattattattgcagacacaaacctctttctggaaggctgcagcctaagcaagacaggacatccttcagacaaggtcctcctaggtgcacaccccaacccagacgttaatactttgtttctgacgtgccacagctctgtgcccactgaaggaacagaagagggatctggactggtcctggtgacgacacagagacgacagcggacaagtccacctctaggaggacactttcgcatccagcttcctaatacagtgatttctgatgtccctgtacaaatttctgctcatcaccttcaccagctcttacagaataatgccgatgacttcacatccaggtacctcaatgccagtgacttcactgtgaaggaggatctatacacttgctacgaacacgtgtggaccttgtcctggtccactcagattggggatttgcccaattttatcagggtctctgatgaaaaccttactggagtgaatcctgctgcagccacgcgtgtggtatatgatggtggagtttttcttggacccatatttggagacatgttggctactgccaaccagcatactcagttatttcctaaacatctgcctatcttctgtagggttgatctccacatccagtacctcacagaagttttcagcatcgagccttgctgtgggtccctgctgggagggaccatcctcagcatctcaggaataggcttcagcagggacccagctttggtttgggtacttgtgggcaatcggtcctgtgacattgtgaacttaacggaggcgagcatctggtgtgaaaccctgccagccccccagatacccgatgcgggcgctcccactgttccagctgccgtggaggtctgggctggcaacaggttcttcgcccgtggtccttcaccaagcttggtggggaaaggcttcaccttcatgtatgaagcggcagcaacaccagtagtcactgccatgcaaggagaaatcacaaatagcagcctgagcctgcatgtgggaggaagtaacctctccaactcagtcatccttctggggaacctgaactgtgatgttgagacacagtccttccagggcaacgtgagcctgtctggatgctccatccctcttcacagtctggaggctggcatctatcctctccaagtacgtcagaagcagatgggatttgctaatatgtctgtggtgctccagcaatttgcagtgatgcctcggataatggccatcttcccatcgcagggttcggcatgtggtgggaccatacttactgtgagggggttgcttcttaactctagaaggaggtcagttcgggttgacctctcgggtccttttacttgtgtgattttgagtttgggagaccacaccattctctgccaggttagcctggagggtgaccccttgcctggagcttccttctccctgaacgtcacagtcctggtcaatgggctaaccagcgagtgtcaggggaattgcactcttttcataagggaagaggcaagtcctgtcatggatgccttgtccacaaacaccagtgggtctctgaccactgtgctgattaggggtcagaggttagccaccacagctgatgagccgatggtatttgtggatgatcaacttccttgcaatgtaactttttttaatgcaagccacgttgtgtgccagacaagagacttggccccaggaccccactacctgtcagttttttatacaagaaatgggtatgcttgttctggtaatgtttccagacacttctacattatgccccaagtgtttcattattttcctaagaatttcagcttacatggtggaagcctcttgaccatagagggcacaggcctgagaggacagaacaccacgtcagtctatattgaccagcagacctgcctgacggtgaacatcggtgctgagctcatccggtgcattgttcccacagggaatggctctgttgccctggaaatagaggtagatggactttggtatcacataggagtcattggttataacaaggcctttaccccagaattgatctctatttctcagagcgatgacatcttaacctttgcagtggcccagatctcaggagctgcaaacattgacatttttataggaatgtcaccctgtgtgggtgtctctggtaaccacaccgttcttcagtgcgtggtcccttcccttccggccggggagtaccacgtcagaggctatgactgcatcagagggtgggcctcatctgccctggtgttcacctcaagagttattattacagcagtgacggagaacttcgggaatgtctcagctgctgtgtgtggtgctccctgccgagtcctggctaatgctacagtgtctgccttcagctgcttggttctgcccctggatggtaactttaccttctccctccctgaacttccccacaaatgcttggccaatggaccgatggagccatcagagagtgtaggctgggtggatgtggcctggcagccgtgattcacaagtatgaaaaaaagccatagagaaatccagcagattgtacaatgtttattcaaaagaaggagggattttaagaaagtagatagaaatgtgtaatatttataacaatcatgttctttgaagtttcaggtatcaaaaaaaatttgcaatgaaacaagttttagtaataaagaatgtatccaaatgatatgatactaagtcaccttt

SEQ ID NO: 475935 - DNA, 672 bp, Homo sapiens
gggctctgtaccgcagtgcctttgaagaatttgagcttggatgcataaacagacatgctgtctgttctcatggagcctacagtcaagaagatcctggtgataatagaagccacaggaggtgacaggatccaggaagaatgtgcagatgaggaagaagaggacgtatgcctgggacttacagtgtttgttctcttgcagctccactcatctggcttaggtagtggagctggcttagagagtggaaatagaaaatactacaatatactaaacttcgtaaggcagtgtggggtaaggactacagcagtatgtgcaaagcctggtggaagcagtaagaaggatgagaagcttaaagacttgagagaggctgagtataagaagggagtaagaagattgccctttctgaaatctctggatctatttcctcttttgcctggactgctgttactggtagttggtgtgttattcaattatctctacgttttaaccttggtgtttacctctaatgttgctcaagtcagtaaatgattcattgcatttggaaccaataaacagggtttggcagaaaagggacaatgtgtggcggatgtgtttgggctaaagggaacaatgcatttgaaactgggctctaagagcttagaaattcaattatgccttcatgcagacaaggctagg

SEQ ID NO: 475936 - DNA, 1049 bp, Homo sapiens
taaaggaaaaaggggggttgttctctggcgggcaggagtggggggtcacagcggggcaagctgattttcatggccccaggacccatcgagctcagggcacacgccatccttgtttctgatggtggagagctccggattggatccgaagacaagcccttccaaggcagagctcagatcacactctacgggagttcctactcaactcccttctttccctatggagtcaagttcctggctgtgaggaatggaactctttctctgcacgaacctgaacgaagacgacatggggcagtgctgcagctgacctactgctctcatctggcttcattttcagtcaaactctgccctcatggaggcagaaatggcagtcctgtgactccagatgaaagggaatgcctctttcccaatggctgtttaacttctgagcaaatttcaacatttccccatcaccgtttgacattgctccttcggttttcttctccttagctttcaacattatttaatgtattatgtaaggtttacttttcacatttttttgtatttattttattacctctcccagaagaatatatacatcatgagggcaagcactttactttttttttttttttaatctgcattgcctagaacagtgcctggactcataatatgctttaaaaaatatttgcttgaataagtgaatgaaaaacttgagcaaaagcctcaggattaactttcgccccatttgagtcataagccatttgagagagagagagagataaaaagagagagagagataaaaagagagagaggaagggagagagaaggagggagagaaaaagagaagcagatagagagtccaagtccaaaggcgtaagaaccaggaagaccaatggtaaaaagttaccaggcccttattttaatcagtctagaattgattctgatatagtttgtcagttatctattttttttcaaatgaatagccaattttcacagcactatttattcaaccataggctaaaaaatgacacccatgtatgtccatgtcctaatccttggaacccatgaac

SEQ ID NO: 475937 - DNA, 1126 bp, Homo sapiens
cctgtgagtcatttttggatgggtcctgctcacctcttcagaatgaagggacagatgtatttatggaacacttacatgctagacactgtgaaaggcattgatattgtgacggtgaatgaacatagagcaactgcccatgccctagacacagtgctggctttagaagatgctgtggactggaaccctggggatgaagttgtcatcatcagtggaacaggtgttaaaggtgccaaaccgatggaagagattgtcactgtggaaactgtgcaggatacagacctctatcttaagtcacctttgagatattctcacaactttacagagaattgggtggctggagagcaccatattttaaaggccactgtggctctgctcagcaggagtattaccatacaaggaaatctcactaatgagagggagaagctgcttgtttcatgccaggaggccaatgctccagaagaagagcccagccaggtccagttgaagggagtgcagtttcaagtcttggggcaagccttccataagcatctgagctcactcactctggtgggagctatgagaggtgctttttctggaaatgaggagcagttacatgtgcagatcttggccagacatgaagatataagaagggagcaggaaacatcaaattcagagtctttcatacagggctgcacagtgaggaactccttcagtagaggcctcagcatgtgcgggaccttgggcctgaaggtggacagtaatgtattctacaatattttaggtcatgcgctgctagttgggtctttgcacaagctctctggctctgttcatgccacttactcttctcttgcaacattctctctcccagacaagtccttctgtttaagctctttaagcgccaatcagtacttcttgatttaaaattatataccacatttctggtcatctgattaatgtctttataccaccggatttcttgaggacattgtctcctgaacacttagcatattaactagtgcattgtagatctattagttgaaagaaatgaatgaattaagaaacaaagggtctccagttttatcagaataaaaaagcaaatcagaggttttcactgaaagtgagaatataactgtatttgttaaatacc

SEQ ID NO: 475938 - DNA, 786 bp, Homo sapiens
tcactcaggttaaggagtggttcaaaatgccttgtttattgagtgccttttatgcaaggtgtgggggataccatgatgagcaagatggaatgaactttgactttatggggtcttatgatctcttggggatgtcagtcaaactactaacttctacctctgcccctgaatcagctttaaaatggtccctccctgaaacatggcaaggtgttgaagaaggctggggaggatacaacaataccattccaggccctggggatgacgttctcattttacccagtcttctggggattgcaaggtctaggttttttgtttgtttgattgttgttgttgttgtttttgccttgagccatctgagcaaggtgacaactatagaccttggtttaaatggcaatgccatgtcgtccactctgatttctttgaagtctgatgaagagaacagtagcatagcaccgtctctagatttaaaacaataataataaagcctgggatgagagaaggcacagattcttttctatttttatgaaaacagcagcaccttctggtattctcctttcagaatttgggatgcagaggactgatctgatacagttggtaattttacttaaaaaccttcctattaaatagattcaaaatatttctgaagaacagatggtatagactagaggaagaaataaacattgtatgttaaacattttattgatcaattaaaatatcataatttaaaatgtttattctactatgggaattatgcatgtctgtgtgtgattgaaaaagacacagaaagaa

SEQ ID NO: 475939 - DNA, 791 bp, Homo sapiens
ttccttgccttctgccgatcttggctttcgccttgaggagaaagtcttcaaagaaacagaaaaatggctgtacagcctcggtggagtcaacagggaagtatgcctgttcccagacctagactctttcttccagtgattacaacacatctgttgctttcctacctaaaactcatcacaaagcactccagaaatcttcacaagaaagttgtaagcttttcagctaccttcctagcagattgtctgaggccttatattcctgatactatctgcgcctcattcatcatcggagagggccacactggtgaaatggaggttcttattgggccatgctccaaagtcagcatccggtttctaacagtgatgatgaagcatgataacattggcgaatttgaaatcattgatgataacagagctgcgaaaattgttgtgaacctcacaggcaggctacacaagtgtggagtgatcagcaccagatttgatgtccaacttaaaaatctagaaaaatggcagaataatctgcttccatcccaccagtttggtttcattgtactgacaaccgcagctggcgtcatggaccatgaagaagcgagtcaaaaacacaggagggaaaatcctgggattctttttctagagatgtaatacatatttacaaaaaagcccctattctataccatgaaaaatcaatgcaatggtttataaattactcatggttatatttttctcaagattatatgtttccatgaacgtgtttcacagttttaaaatactacaacatccattacagactaatc

SEQ ID NO: 475940 - DNA, 872 bp, Homo sapiens
aaagaaagaaagaaagaaagaaagaaagaaagaaagggagaaagaataccctttgggatcactatgcccagcaggtcccaaagagatcttagagaccttatgattagatcccctctagagaatgagactacggaccaaaagaacgtccagcttccatggcccgagaaagagaacatcaaatttccaaaagaggcaatgagagaaaactcaaagtcagagagcattgttgatactggcaattcaatacgcatcgccttatgtctttatgtgggattagaagtgaataaacaggaccctttgatgggttgccacggtcatttcaaaagtgctgcccaagaagaagtcataatatttcaaaatacttcagaacagtttaagcctgtttggaaattctgggcaactaatagtgacctccacaagtatttcttcaaaaagccacataagcatcctaaaccaagatttactaatcctaaaatcagcgagtgctggattaagggttctcatcatcaggccactgaatctcttggggctcctgggataagccctgtggtctggaatccaggaagcagggaagatgaagtggttcttccgcttggaaggacagagggttccgtacctgccattcttggaccactggtcaaggaagttcggatcatcatctgaaagttgtctgatgccttcatttgaaatgctctctgcagctctctatttattctttcaattgttcctacagagaactccccctgtaaacttatatttccaggatttgaaagtttaaaaagagagactgttgctcctcttacatacactgacacacagacttacaggaaagctttttaaaacagtacacttatgttcttaaaataggaatg

SEQ ID NO: 475941 - DNA, 928 bp, Homo sapiens
ataggtaaacaaatcatcctccccagttaagacttccctgacagtcccactacgagaaagctgtggtgtgcctgggaaaagactaatcatatgaaaacactggccatgagaatggatgccctggtctcacttgatcaaagaagagaaagctgttaatgtactggagcactcttgctgcggaaatgagtcacaccatagagcctggctgctgtggcatcatacggaaactgtagcaaaactcaagggccgctctggagtgaaggagagcttggctgatggccaggaaaagggagctggaaaaaaatggagaaagccacacagtgttgaactaaggccaggatctgctaactccatgccccaactgtgcaaaggtatctccagtctcccagtgactgacagccatagcagagtggttggggtatgccaaagcttgcagctggttcttcatatggagcgggtgaaggtaaaaggaaatgtcagaaaattaagcctaacactagagggtattttcttttacaggtttccagggaaagctttgtttccatttaacaggctccgttagtaatgaaaatgtactcagcatttccactttggccttccacagctcagtcatgggaaggtttccttttctttctttcatccctcacctggatataatactacctaagtaaagagtcgcatggctctggaagcataggaagcacatcattgctgttgctgcagatccatttcccctcctgtttgtagaaggtgaaagatagtgggagaaaaatggatggaccctactgactttgaagggctgattgtggctaagttcagaaaaacaaacaagctgcttcgccatttgtgagaataaccagcagatcaaaaaaaaaaaaaaaaaaaaaaggtgtcttttccaaaataggtcaaatgttgaaacagtatt

SEQ ID NO: 475942 - DNA, 533 bp, Homo sapiens
agcagctcctagaggttatgtcttatgactcaccaacatgggccacgtttgcaccaaaaccatgaagaaggctgcctgggtcatcatagaaaagtactacatgcacctgggcaacgacttccacacaaacaagcacatgtgcaaggagattgccattatccccagcaagaagctccacaacaagacagcaggttatgtcacccatctgatgaagcagattcagagaggcccagtaagaggtatctccatcaagctgcaggaggaggtgagagaaaggagagacaattatgttcctgagatctcagccctggatcaggagatcattgaagtagatcctgacactaaagaaatgctgaagcttttggactttggtggtctgtctaacctgcaggtcactcagcctacagttgggatgaatttcaaaatgcctcggggacctgtttgaatcttttctgcaatgctgtattattttcaataaatctgtgacaacaacaaaaaagaactaaaaacagaactaccatttgaccaagcaa

SEQ ID NO: 475943 - DNA, 714 bp, Homo sapiens
caaattctacgcctatacgccgtggccatgccctcctcccagcacgttcgggacgttaactggtcgagttacagatgactgccagagttgccctccgtgcagcctgggcaagtcacgctttgttaagtccattggccattatgctgattttaaaaattttaaagagcatttttatgcagaggactctctcgacagcaggtgtgacccctatttgggctctggacgcctctcgcctgagtcagctccagaaggctgcagcccttaggagagaggaggaaaagcgaagagcagggtgggcaggaactaataggttttcgaacaagtgggcgaaaaactacctgaccttgctagcttgtgaccagcacgcgggctcccggagccgtgtgcgacggctcgacgcaggctggcgcggcgcacgcgcggttcgttggcccgcggtccctgtgcccggagcgtgtgttattacccagtctcccaactggtgtcggtgattgagctctggaaacctgaaggaaagacagtgggagtgcgccggcatgtgacccaggggaggggcatggcgggacccaagccgggaaagtagacccggggagatgtttgactgacctcatcctgagtaagcccatggggttatttatgaggcctgatttaaagtagtggctgccaggaaagtgaaaaaggagctcacctcaagctatgagaggagctacagtc

SEQ ID NO: 475944 - DNA, 917 bp, Homo sapiens
gagaacgggccatgatgacgatggcggtttcaagaaaacacagcatgatggaaatggcaaacccatttgaccatgagggactccgggatccggttttggtgcttctttggtcttgtacgtgggccctagtgctgctccctccctccggttccatggatgcaggggccattttgttcagcaccacatacccagcaccgtgctcagacgaggacatggatgaagctggaaaccatcattctcaacaaactatcacaaagacgaaaaaccaaacaccgcatgttctcactcataggtgggaattgaacaacgagaacacatggacacaggaaggggaacatcacacaccggggactgttgtgggcaccagacatggaggaacatctggcctaggtcttcatctgttgatgctggcttctgtattttgtgatgctaggcctggaagtctgccaactacatttctcataaccctttgcaagctggattctaatttggttctgcaatggggcacagatgggaagtggaaggaaggaagaaaggggggaaaggatgttccagcatatttccagttcctgctatcatccttccagcagaagagacaatgacctacatttttattggcctagaagtttgagaattgttaatagtagaaaggttagtacaatgtgataccaatcaggtttcttgacacattcaggtttatacggaccaaactttcattcaattagccccttgcctttgcagccaggaacctcttgttttcagtgtcttaactaaaggacaatgaagttataaaaacaagctatgaaaaaagaaagcatcttaaaagcaaaagttttctctgatcactgtttctgttctctttattgaacacagacctgaatgcttttgtgcctctaaaggtttagaatacagccatc

SEQ ID NO: 475945 - DNA, 653 bp, Homo sapiens
agtgggtgcagcacaccaacatggcacatgtatacatatgtaacaaacctgcacgttgtgcttattcttcagtgttggcagtggtggaccagccatgcctgatcatggaccccacgatggcatattgtagcactagtgtcagtgcgaccaagtgggacaattcttgggcctccaggttgcttgcctggatgccagtctttgcagtagtaagccactggaattggtttggagcctgtgaatccccttacatgtcagaatttgtggaagctccaagtgctgagtctttcttaaatcttctaggaggtcttagaatcatcaatcacgtcaaaaagtgtttgataagtgccaagctctttgtcctggatgctgtgcaagttaaagaagatttgcaagttccatgtgaagaagaagtagagtccttggacctgggaaaagaagggtgaggtgccagaggccctattccttttgttctatttttaaaaagtctgtttcctctctgttgttcagattgggtaattttcattgttctgtctttaagatcactaattattttctcttccagcgccattcctctgttaagcagaatccattctttttttaaaaaaattatgttgtatttttcagttccataatttccatctaattctttataa

SEQ ID NO: 475946 - DNA, 1931 bp, Homo sapiens
ctctcccctcagataggtctttttattgtttatttgtggatttgcaagtggatagtggaaaattgcgaaatactttacactgcaggatgacatatttacaggtgcacttttgctactccgtggagaatgaatgggccgcagccaagagtgggagcagggaaggcatgccacagttcattgctgaaggaagagcatatcctgtgcgacttccctttattcaatttgaatataataaaaagctagaagaattcacccatccaggatttcaatggtatgaaaatcctggactaactggtctggattatagggaggaaaaactgcttgggtgtagaattgaaagaactgaagtggaggagaagagagacagaactgacttaatgcagcacagcaatctgtggtgtgatttccaccatcgggcagccaaaccaggaatgtttgatccttttggagccctagaaggagaatgctttgaaaacagaagcttatgctttgcaaatcatgagccagaaatttttcaggcctctctagatgcttcgaaattgcagagctacattaaatagtccagccctgtatttcaaaaatggatggtttagatagcctttcttaaactgagtgctacagaatatatgtagattgttaacaggaattctttgaaaaaatttttttcataatcaaaataatgtttggaaagtcttaaataaaacagtgtatgtggtttcttcattttaggacatttcagtgatatttttggaccaaaatctataaacagatagaatacattaataaaatttaaatatagtgtatgaagaaagtattttcacaaacattcaatgtgcacttttactgtgtcagacattgaagctatttagggatataaaatgaaatgcagcatctaacatttaggaatttgaagttaaaagacaaagttcaatgtgtatgcatgagtaaaaaagtacagtttaatataaaaaattacagtataatacaatatcttaaagccaaagttgcctacacaatgccaaagtaagttagagaaagaggcaattacatttggagaagaggtggacttcatagagaaggtgggatacacctgtatctgttgtgaaacaggaaattgcagaaggaagaaaaggcatttcagacaagggaaaagcatgtgtaaagtcacaagatttctctggactacaataattttttttgacatatatgaaacagtataaaatattactagtttgatttagaagagattggtaaataaaatagactgataaatacctgaatattatgtttcctgcacaggtatggtcatcatgacattactataatactgtttctatacttgttattacttcatagagatatgtttagataataaaataagtgaacctacttctcattattatctaattggattatctaaggtgagactattctaactaagcccaaatcacctttcagttgaagggaaaatttaaaaagtatacattcaatgaatactaaaagtactgtgtaaatttcatgctgctactggagttttactaaatatttgtaatcactttcctttatgctagtcaatgtagtttcttaatataaattatgttataccttcaaacacgtgtatattttataacaattataatcatagcaccaatggctaaaatgacagtttaagtacttattttactgacatatatcatgtttaaaaactccaaagcaactggccatgagattcatgtaaaaagcatgattgtatttattttcctagtgttaaacttatgtctcacacagcaagtttccttaacacagcatggcaagtgttttttcaaatgtggatttcaatgttatttattaatagaacagtgattctctattgttagatcactggaaattattagaaatgtgaatatgtggcccagtgtttccaaggcctt

SEQ ID NO: 475947 - DNA, 1654 bp, Homo sapiens
ttcctacagaaagggtgacacaccatctgtacattttggaggcattcttaggctcaggattgacaaataggtacctggtgatttgcagcttgtctctctccactctcagagcagctcctctttccatctgcagccccagtgctgacagtggatgcttttctgcaggcacacggaggcacagccacccagaggcaaccatgtcctatagacctttctcctgctgccttaaaggtaggaggagctctaagtgtccaggtggcaatcttaacttcttgtttaatagaaccattgttgtgtctcctggtggcagttctcctctctctggaactgagacctctaggcctgcagaacataatgtcatggaacgagtggagcataaagttcttgtccctgatgaaagtccacccctctcagccccaagcagggagttttggggctctggaccctcagctgcaggtctgttggagtttactggaggtccactccagaccctgttttcctgggtatcagcagcggatactgcagaacagtggatattagtgaacagcaaatgttgctgcctgattgttcctctggaagttttgtctcagaggagtacccgaccgttcagtgtaaaaggtcacccaaattagatgatgcaaatacgtgatataatcattgaaattattttaaagttgtaatatatttttaatcaccatatagtttttattctgtaataggagattatgtgcaaataaataatgtgtttttagattcagtctttttgaagatgaatataaggacaaagacaacgctgtctgtatgaccaatcatagctaatgagagaaaattagggattgaaatatggactaaatgcaaaatttaatcttgtgcatgacataaaaagagcctaggtttcaaatttagagtacataaatcaagaattataaaaggggatattatttatataatttaaaggcaaaaatgcatttgtctttattattaagttattccatataattccagactgttgccaacaaatatacctgcgcatgtggtactgtccactaggctcctgaaattcttgtgtgggatggtaaaggcaaggaaatattttcacataaatatttctttacaaaatatatttactcatgaaaaatatttgtaaaaccaggagatttcaacattgattgagccacaataaccagtgggctgaactactacactgaaattcagatattacagtggtcatttgtgaagaaggtgacggtcttctaggcagctgtgatttaaagatgcttagtatttgcacatttaactctcacccatactgggtgagtattgggcatgtgcaaagaagcagacaatcagataatacaaagtaattattatctccctattaatttatttaactttgatttgttgaatgccagagaaaagttttaggaaatgcctgtggaggttatgcatatctatagatgaataaaaagaagaaaatatttatttctaatacaggtatgtttcaattctcaagagagaattgcaatgtagaaataagaacatgatttaagattacctaatataacatgtgtttcatatttctacaccataaaaattctgttaattttggaaaattactttggaaatataggaaatggttctcacctttcccttc

SEQ ID NO: 475948 - DNA, 2350 bp, Homo sapiens
ttggcttcaggggtggagccctctcggagaatgtcttttagagcagttatctgagtgtagaatggaaagatggggtcagagccccaatacagagtccccactggggcactgcctcatgtagttgtaagaagagggtcaccatcctccagatgccagaatgttagatccaccgacagcttgcaccatgcacctggaaaagctgcagacactcaatgcaagactgtaaaggcagccaagaagtgggctgtaccctacaaagccacaggggtacagctacccaagaccataggaactcacctcttgcatcagcataatctggatgtgagacatggagtcaaaggagatcattttgaaactttaaggtttaatgactgccctattggattttggacttgcatggagactgtagcccttttgccaattgtcaaaattgtgaccaaagtgccttactatgaccagatggtcactttcaaaaacattgctacaaaagtctttttgtgaatagtcagggtgcttgcacatgtatggatctgtatatttgtagcacgtgtattgaagaatattgggagttttagcattgagaagcttggagaaatgactctgcaaagctgacactcagacctcttaggagggtgtgccacccctcttttgggggcataataaggcttatccagtgaagaaattggagactgaaatgaactatcactaatggggagacctgttgctggggtatggtggctgtggcagcagccaaaaagaaaggaacaggctttgtcctttggccttgcactcttcattgagtgcttcctattggaagaacctaacagaaacttagctggaaagctgaaacaatgaaaagaacattatgaatattactgtttttttttctgaaatattcatcgtatatgtgagtcttttagtttgcaaaaaactttcttatatgtttttctctctaatcaaagcagcgataatatagtgagtgttgaacaggtattactacctttctttatattttggagcctcacatatacgtatatatatatatatgtgtatatatatatatatatagagagagagagagagagagcatcttttataaatagtgtaacttcatactggtttttatattgtgattcttgaaaacttaagatttcacagagacaccatagaggcaaatatggaggaaagcaaaggggagaccaagcagggctctaggaccctcacctttacaccagctagaaatgctctgcttcttctcttttatctgtgaagaaggatttgcattaaatcatcctctctccctcccctggtactgttataatgaactgacctgaaaataagtgcattaagtggccatagaacatgaagacactaattagttcacttggggatcaaatccatgataacagactgattcatgcttttctctatccccaaaactattcagataaaagcaaagagagaaaataaatctatcatacatatgacaatcctcaagaacaaacacttaaagtttcaaatatgatcttgttgattctgtcagaggaaaataattctatcactagttaagaataagcgataattgagtctggacaagtagcaagtaagatttcacagcaaaagaaaggcaaatagccaaaaaacattaaaaaggcttagcctctcttgtaagcaaaaaaaaattataataatattacagtgagactattttgagactttcaatttggcaaatatgttttaagttattatataaaatgataaaattgtctcttcatacactgttttacatagcacatactagtaaattatttctggagggtagtttagcattttgcaagagccttaagcatattcttatgctttgaccagtatattctacttccagaaacatccaaaggatacaatctcatattaggcaagaatacatactcaagttttatgttagcagtgtatataacttaggctcttttaaggaacagatacaagtttaccttcaggcattaggggcttgttagataatggaaaaaagaatattatcagaagtccaggggtgggagcagcgttgaaaactttcaaacttaatttgtccccataatttcagatatgagaaattcatatgaaaaatcaaagcactagaaagcagaagctaaagactcattctctgcatctctctgttagactagagcttctaatccctgttatcaatgctttacacgaaaggtttgaagggatcaccaactgccggcatacaggtttaaaccaagtgaaatacaaaatcttgaacttaaattctgctctagagacttaggaaggctgccagctccctgtctctgacaagccagcttttatc

SEQ ID NO: 475949 - DNA, 541 bp, Homo sapiens
tttccactttccatttgcaaacaggtgctctgctccctgacagtggtggagccttggtttcacacgctcaattaagagacctaatgcaaactcttgtttcccataacccatggttcctggaagaaggcacgttagacctagagctctgggaacaagtgaggagtagtcttaaacaacatcatgcacaagggcaacgggtcacagtaacatctttaacattatgggccttagttagggctgctttggccccactctacccagaagagcctaaaaagcgaagaggggaagaaccatcacctaccttactgcctgctcctcctcccttagccccaccattacagggtaaagataccaaagagaaaacaaaggtttttcctgagctccctcctccaataaattggaagaaagacaagggatacactacagctgtgggaccctgtcttaggcaagcggcattagaaggggagctcttagcctgcccggtaatgcaagattggcaaggcaatcggatgtatgtacccatttattttggtgcttagaa

SEQ ID NO: 475950 - DNA, 678 bp, Homo sapiens
gtaacctcgggaaagtatgggtcaggctaagagtaagtttgctaattacttaagcctggtgcggccgttattgcgctgcggaggggtaattgtgagtacccaatatctcacatctttgttccatctggtagaaaagtattctccttggttcccggaatatggaaccatgaatgtaaaagattgggacaaggtcggatcagacttaaaaccagcacaacaagagggccacgatattcccttctccttttggtctgtgtggtcggcaattaaaacagcactggagcccttccacactgaggaggaggaggaggagtttcaggatgacatagataagtttaataatcaggagtccgatgatcagcaaagtgaaccatcacagtctagttttaaaaagggggagaaatgggaaggcagccattcaccaggcacgagaaataggggatttggatgcttggcagtttccagtaattatttcttcggctgaggagcccggagaacatgctcaagcacgctgggagccatttccttttaaaatattaagacttaaagtaagccattggaaaatatgggccaaattctccttatgttcattccttgttacaatctgtggcttataaccggcgtttaaaacctctggattgggagtcattagcccgatccaccctgtacccctctgaa

SEQ ID NO: 475951 - DNA, 2876 bp, Homo sapiens
taagaaacgcctgccagaagatattatttcacttggcatgctatgtttttaagtggtgtgtttagcccatttatattccagctcttgaattattttactgaatggcttggcttccttggatgggatttaaccttgttcctggctcttgatgagcgtccttgccttccagattctatgttccatgactttcatttcagtcatttcagactggttgagaaccattactggggagctagtgggctcatttggagattgccaaccagtgaacaatattctcacctgagtaaccatgcatctacaggtgatgtcaacctacttacatctctggaagtgtatgaattcttaaactccagtcttcccaaagaccccgtatatgatgagcagtttgctctgcttgaagatacaattcctaatcatttcttaattataatatattcagaacaagtaaagctttactcccttttggagaagtatattattaagtcttcagaaaaaaattttaaaagcctgtataccctgagtctattcttataataagctttatttttactttaataaatttagtacatacattttttgaagacattaaagacagcttgttccacataattgcctatcatggtgaaagatgctcttggttttccaagtaaaaattatcaaagaaaagaaaaccaatatttctaaaataaaatattaattttctgctctacttttcttagttacaccttttattttctcccctgtgggaatttccccaaaaggttttccatgtttcctgacagtacatttgttctgattctcaggataggaactattggctttgtatataatttgtggatgcactattctggttaataatacatctagagcctcctgaagtcacttgtgtgtgtctgatctacagacaagaaaactaaaagctgaaattttttcaagaactctgctgtctgttgtgccaaagggatgaagttgatggcatttgttcttaaatatgacttaagccatgagtttaatattgaggtcaatttattaaatcatacctaatccacgatgacgtactctaattttactaattctccatggcctgctttttcctactgcagcctaatattttacaattatattggcctcctttataatgtattatatgtagcaatacagtgtaatttatgataccagagcataaaacataagaagagttttttttctgctcaaaacatataattcaaattctctttcaactataaaattgaaagagagagagagaattcattaatttgtattccttttggtctctgagcacatatcggaatggtaatttggatatcatgattttattatattatagaacttttatttgccatacagatacatttgcatgttattaatttagaaactgataacagcattggttgtctatttagcaaaaagacatttttttttcattctttttatgggtggtagattcaactttgtgctttcatgaaggtagaagagtgatagtaatgtttagttctcaggcccagcttttacataaatatttaaattgccctcaataagaagccttcaaaatagaaaatgttatgtgctatttcacaaaagtacgagagaacatcacatggtcagtatgtcaggaaggaatggggataggttagtgccaactattaagcagagagagaaaaaatggataactaatttgttatcattgcaagcataaagcctctttgcccttagaaattatttttgttttattctaagtattaagtgaactgtttcaatttatcctaaaattatttttgtaaatctacacttctttttctttttccttttaaataaagcaggaataataataatattttacttgcatacttgctccaaggtttaaataatataatattgcatgtcaagtgctttagaagactatctgtactgagataggagactggcaggactcgttttatggtaacaaccctgaagactaaaacaggatctggtccagacaggacaaagtgaagaaactggcaggaatcagcacatggctgacaaaagtgatccctagctgcccttattgctcattggcataagaccctcccaccagtgccatgacattttacaaatcctgttgtaatgactcagaggttaccacccctttccatggcaacagtccagaagttaccacccattttctagaaagttctacacaacctgccctttaagttgcattaacctgctccttaatttgcatgttattgaaagtgggtttaagtgagtataaatacagttgttaagagtgcaaaccttgctgactctgggtctactgcctaggagtttttcctgttcttactactactactactattactactgctactactactgctgctgctactactactgctgctgctattaatactacttggtttcatcccctttgctagtccctaaggtataataatacaaaaatcacaagatattactctacactttcagaatctcattgtctatgacgaagaagatatttcatatatattgaatatatgctgtaaaagccatctatacatagtgctgtgaaaagacagtgaggaaagtcaccgtaagttctgaaggaatagaaagtctccaaagaggagataatacttgatcaaggtcttaaaggatcagtgaaacttcttcagcaaaggaattgtatgtgctagagcataaaagcatgagaaagcatgatatattcaaagcaccagaaacacttaaaacagctgtaacataaagttaactatagaagatgagcagtatctatatatgtctgatttcttcatttcagaaataatatttattgtagtgacttaaaagcaaaatcatttatttagagacaattatgt

SEQ ID NO: 475952 - DNA, 2553 bp, Homo sapiens
accacttccgaaagggggcacaatccaactcttaacaatcccaatggatttagtacttgtcactattccatccaatttatcccctgtggctggagtgaccacaaaagtggcagcaggggagtttctgcagggggtacttcaaactctcctgagtgggcactggttgcaattccaaagacagaagcaaatggagaacctggaagtgggtcaatgtgccttttttcttatagaaattttactgagtctacaggatctgactctggatacaacaatcgatgtttcagtgttttccatttgtcacatttctctaaggaactctccagttctacttttgagaagcaaatggatttgcagcaatgagccaaccataaaggataattcatgggtattcaaatgtgaatttaatgtgaatgtaggcttaagatgggatgtagctgcaaaattcatatcagcagaattttaagtgaaaataaagcaatgattcattttaagtttggcaatagagcctgaatttctcttctttaagagtgttggtctttcattagaattgaagacctgagttattatttatttggagagtgttaacaggccaattaataaccttacaatggactcgaggtattcatgtggatggaagggttattggcctctcattttaatttgaaagctagagataactatggttagtgaggaaggaatgtcccaatccaagatatactgaaagcaaggcctcttacaccaaatggatttaatattttttcaatgtttttctttctatgtttagtcaaattgtaaggtgctatatttgccttagaatatcttttgtttgtatctttaaggctgcagcctctttctcatatttattttctaaaatttaattctaaaattaagaaaaaatacaggtgactgacactcttctcttcatgaaggtacataaagcataatgaagtgatggggagtatatattcacattcagagtatatagacttctgtatgattagggagaataaaatatttctctatttaaatttattttctatttgtcttgacatcttttttttttgtcagacctgataatttagggcatttttatttatttatttatttatttatttatttatttatttttattatactttaagtttcagggtacatgtgcacattgtgcaggttagttacatatgtatacatgtgccatgctggtgcgctgcacccactaactcgtcatctagcattaggtatatctcccaatgctatccctccccgctcccctgaccccacaacagtccccagagtgtgatattccccttcctgttgtcttgacatcttataaaagattaatttaaaacactaatgggaattattaacaagctgctaaaagatataactcctgaaatacattctcagctcctctaggaaatcttcaatttcaattatttgaagaaatatgacagaaagggtcacagaaatatcatcatcatctaaggagacaaggtgtctgcttttaaagggcaagattttaaggctagaccaaaatgaacattttgaaagtttctactttcctgggtgagaaataaatttagacatcaaagcatactttcttttgttctggaaagatctaatttttaagtacatttatttagttattcacttagttcattagcctatgcttttgatcagtattctaataccatgaaaaaaaagccaaatgcatattcattagagtgaaatagtaaatattctgttcagtattgtgaattgaatatagctatggcagaatgctgtttctgtgaagttggaaaaattttatggtctaaatatgaatttctgcctactcattgctaaaaaaagaaacgataagattctaaatgaaatagaattaaccacagaacggatgtagcagaagaagagattggaactaaattacaggacaattgaaaatgtctagttagaaagggtagagacatgaatcacctgtatccaatacaccctccattcaagcacatgttaaaaactgtttttttctcctaccataggagaataatgtatgttaaatgtatagttaatttatgtcttctctcacttctgtattctttgctgtgtttacctttttctacatgtcaactaacttaactgcttgcttccatcttttcttccttggacacttaccaatcgctagtagatgcttaggttattgaaataaataaaacatatttctgtccttaatcagctcatcatctactgtccctctgtcttttagcttctcacctaaggataacattggttaacaaatttgggaataaggatgtcaggaagatttaggatgcaaagggcttttctcagtgttaatatgaagattgctgtccctctaatgctactgtcatgaagataggtaaatctttttttgaagataaaatgttttataaattgacactgatatttcctatttacatttaaaactagagaggttttgattaattttgcttaaaaatatattatattattttcttgtatgcttgcattttcttgtatgctttcttgtctttcttggtt

SEQ ID NO: 475953 - DNA, 2634 bp, Homo sapiens
tgctttagaaacaagccttttttttgtcaaggtgacgatgatgatgttgatggtggtggtggtgatggtgatggtgttggtggtggagctggaacccacttgtgaactgagtatggagggatctaggttgtgcaacctctatgagaatctaatgctaatgcctgaggtggagcaaagtcatcccaaaaccataccatctcccacctctacccccatccgtggaaaaattgtcttccacaagaccagtccctggtgccaaaaagctatgctggcaccaaaaccacaagatgcacttcttcccactcttctctcccttttctccaagcagaggagtctctctccatattcataccaccacaggcccctgcatggcattagtcctgctcaacaacttcttgtagcagaatccaggaaatcatctgctacacttagctatcaaagctcaagctgctctcctgcagagtagctgatcagtgacatgaaggacacagtcatcagcaaccatttttcttagaatctaggatcccatggactgtaagaagcatggcgcccaagtcatgaaaataaagaaggtttaaaagaaaaaagaaaagaaaaaatgttataaattgcattgtaaaatgccatcaattgtaagactcagcatcatttcggagaagttaaaatatgaaaacatatgtctttgaattgatgaaatatgataaattgttcctcttaaatctttagcgagtttatatctgaagattaaataaaagaaccaaactggcaagaagaaaaagagtatttttaaagtaaataattagcttacatttttaagttatcatctacaaaaagtaaatagaacacatgaaaatgagaaattgtgaagctatctaaatagcagtaaggagttgagattaaaatttaaacatctttcacattttcattatacaagagtgtgtgtgtgaagtttttgtctgtgggacacaaagggttgggggcgggaagtgtctgtgcatcttgggcagttttatctttgtgtagtcatgtgatagaacataattcctttccatattcctccaaatgcaatcagtgtcaataaactacatgcaaggctacaaaaggaaattagtggaaaattagaaaatttcttgcagaaagaaccaggaaacataatgaggattacattgcttgcatgataatcaagaattatagtaatgaaaaatctcttaaaggcgtctaaaaactccatctacaatttgttagaataaacaaacacatagacaaacaaagtttgaccatttgtaaaaattataaccagcacttatttgaatgtgtacaatgtattagtcattgtgcaaattattatttgttttaattagcaaccatactatgaagtccctatagcatgggtatgttattaccctcattttatagatgagagaactgggttatgcaaatagcaaatattacatcgaagattacacaatccatttattaaacgatcatgacttacagcctcaaacttcaatagtttttagttgtgacaatatcatcctgtaggggatattttggaaaatagtgtgatggtattctattttgtttatttggttagttggtttggtttgattttttgtttttttatgtaatatttgagtaaggcactgctgtctatagctgatgaaggaaaggatgtttagcatcttgcaatgtgtgggaccactgaaaccaggaaaaaaaaattgtcctatgtctcagcagacactcatgtacataaattttttaaaagtacatataaatgatttgagcatagcaacaaactacttaaaatactttagcatggattaaataagcatcacattttcatggtttgggactggtactctggtccctttttcaaattttcacaaaagtcattcaccatttcatcatactaaaaataccatgctttaattttgtttagattgtgtttaatctacatcaatttgggaagaactgatatttggcaatatcccatcttccaaaagttgaaaagtctatatctctgcacttatttaggttttagtttatttttcttaacaattatttttagtattatcagataaatttaggatataaattatcaataataaatgttctagtggctgttttaaaatgtcaatttccaatcaattgttagtagtttagagaaagaaaaggtatttttctattttgatgttatattctacaatcttactaaattcactaattttgtctagaagcactttgtagattcttggatcattgcatagaagcttggagttgaaattcttactttttttcaaatttcatcctgaaagcattgctcttctactattgcatatgatattcgctgttggtttttcaaaaagccctttactgagttgagaacatttccctctattcttttttatggacattttaatcatgattgatgattcatcatgtagtataattacctgatacagaaaaataaaatatttcttaataataaataatttttctctattttaaatttttatttgtactattattgttattttatccctgctttcgttggattttattttctctcttctttctatacatttaaagtttgaatcttaggtaattgatttgaaatgcttcttcttcact

SEQ ID NO: 475954 - DNA, 985 bp, Homo sapiens
gaagggaactgccgccctctcgtagagatgtttatttgtccccaagagatgatgtgtagtctactaaagacagctcttcaagcagagattacccaagttcttgtaatacaagagattatgcaccaccaccacgagattatacttaccgtgattacagtcattccagttcatgtgatgactatccatcaagaggctatagcgatagagatggatatgatcatgatcatgactattcagatcatccaagtggaagttcctacagagattcatatgagagttatgataactcacatagtgctccacctacacaagggcccccaccattttatgctggaagcagtcgctatcatgattacagcagctcacgtgacggatatggtagaagtcgagacagttactcaagcagccgaagtgatctctattcaagtggtcttgatcggcttggcagacgagaaagagggcttgccccttctacagaaagggggtacccttctccatgtgattcctacagcagttcaagctgcagagcaccaagaggtggtggccgtggaggaagccgatctgatagagggggaggcagaagcagatactagaagcaaacaaaactttggaccaaaaccccagttcaaagaaacaaacgaaaagtgaaactattctgtcatagctaccgaaggactactaaaaggaaaaattgtgttaccttttttaaattccctgttatgttcccctccataatttttatgttcttaaagttaatattttcttgtctatttagcattgtgagttaactattgttgtgattaatgcagtttcttgatttcaagttgttctcatttgtttgaatcctgaaatagctttaacgaatggactgtgactataaacaattccaattaaaaagcaatcacttttcaactagctttacaagaattgattttctattaaaatactcaggccgtgtttcaatcacaatgcaataaagttccca

SEQ ID NO: 475955 - DNA, 703 bp, Homo sapiens
gtactcaggaaatagagcttttctttgtaacaacgagtatatctcttttgtgggcaccatctgatcagctgccagcacagctaggatgaaagcaggcagaggaacgtggaaaaactacactggctacgttttctggcctccatctttctcccgtgctggatgcttcttgccctggaacatcatacactccaagttcttcagcttttggacacttggacctacaccatttgtttgccaggggctctcaggccttcggccacagaatgaaggctgcgctgcgggcttccctatttgtaaggctttgggactcagactggcttccttactcctcagcttgcagccagcctattgtgacacttcaccttgtgatcatgcctccactaaagcagtgcttctgcaatggaagcctggtgcaaaaacagcaacaaacaagtttgacaaacaaagagcttgccagtccgggggaggtgaaatgcagaagaatctccacttttgaggtaatataaacctaagatcctgataaatattactctgaagcacaggcagacaattttttaaaaggatacatacccacgtatttacatatataccctgaaatatatatcctgtcagctaacaggaatgagaagcaatgagcccagtagtaatgagaacacctagcacctagttcgcagtttctaataccgttcttcagtaaaaggaa

SEQ ID NO: 475956 - DNA, 981 bp, Homo sapiens
gcagccagagccagccgggtgacctggaactgtctatgtgtgccgttgcaatgtgtgctcgaccacacaaagttgataggtgtgtagtggaaccaaagagagctgtttctagagaggattctgtaaatcctggtctccatttaggagtgaagaaactttttgttggtggtattaaagaagatacagaagaatataatttgagagactactttgaaaagtatggcaagattgaaaccatagaaattatggaagacaggcagagtggaaaaaagagaggatttgcttttgtaacttttgatgatcatgatagagttgataaaattgatgttcagaaataccacactattaatgggcataattgtgaagtgaaaaacaggggtggggactttctaaacaagagatgcagtctgctggatcacagagaggtcatggaggtggatctggtaattttatgggtcatggaggaaactttggaggtggtgaaggtaattttggctgtgatggaagctttggtggaagaggaggttatggtggtggaggtggtggtagcagaagtagttatggaggagatgatggtggatagaatggatttggaggtgatggtggcagctatggcagtggtcctggttttagtagtagatggggctatggtggtggtggaccaggatatgcaaaccaaggtggtggatatagtggcggtggtggaggataagatggttacaatgaaggaaaaatttttggcagtgataactatggtggtgttgggaactataatgattttggaaattatagtggacaacagcaatcaaactatggaaccatgaaagggggcagttttggtggaagaagcttgggcagtccgtatggtggtggttatggatctggtggtggaagtggtggatatggtagcagaaggttctaaaaacagcagaagagggctacagttcttaagaggggagagagcaagaagttgttaggaaa

SEQ ID NO: 475957 - DNA, 2220 bp, Homo sapiens
tatgacagaagagagccagtaatgcccatatctccagctgccagggagtggggcaaatttgccggtgagtttgtctttggccagccacatgaacacatgaatgataagaatgaaaaacagacttactgctatggagaaagtttgaaaggtctagatagaagatcaaatcagccacaacattcccttaaaccaaagcctaatccagagcaaggctcaactctcttcaattctgtgaagtctgagagatgtgaggaatctgcaaaagagaaatttgaagctagcagaggttggttcacgaggtttaaggaaagaatcatttccatacataaaaatgcaagggagatggagacccatggtgtgggatgtgatttgcttgaggaaaagaagacactgatgtctgcaggatttatgtgctgtcactgcagtgacaccttggtgattggcccagtgggcccagagcccagaccttcccatctgatatggtctcctttcattttcccaggtgtatgcgatggtgtctgtacagactactcccagtgtactcaaccttgccctccagacactcagggaaatatggggttttcatgcaggcaaaagacatggcacaagatcactgacacctgccagactcttaatgccctcaacatctttgaggaggattcacgtttggttcagccatttgaagacaatataaaaataagtgtatatactggaaagtctgagaccataacagatatgttgctacaaaagtgtcccacagatctgtcttgtgtaattagaaacattcagcagtctccctggataccaggaaacattgccgtaattgtgcagctcttacacaacatatcaacagcaatatggacaggtgttgatgaggcaaagatgcagagttacagcaccatagccaaccacattcttaacagcaaaagcatctccaactggactttcattcctgacagaaacagcagctatatcctgctacattcagtcaactcctttgcaagaaggctattcatagataaacatcctgttgacatatcagatgtcttcattcatactatgggcaccaccatatctggagataacattggaaaaaatttcactttttctatgagaattaatgataccagcaatgaagtcactgggagagtgttgatcagcagagatgaacttcggaaggtgccttccccttctcaggtcatcagcattgcatttccaactattggggctattttggaagccagtcttttggaaaatgttactgtaaatgggcttgtcctgtctgccattttgcccaaggaacttaaaagaatctcactgatttttgaaaagatcagcaagtcagaggagaggaggacacagtgtgttggctggcactctgtggagaacagatgggaccagcaggcctgcaaaatgattcaagaaaactcccagcaagctgtttgcaaattgggctatggatgccctttggccattgctgccatcactgttgctgccactgaacctggcaaaggctatctacgacctgagatctgctggctcaactgggacatgaccaaagccctcctggccttcgtgatcccagctttggccatcgtggtagtaaacctgatcacagtcacactggtgattgtcaagacccagcgagctgccattggcaattccatgttccaggaagtgagagccattgtgagaatcagcaagaacatcgccatcctcacaccacttctgggactgacctggggatttggagtagccactgtcatcgatgacagatccctggccttccacattatcttctccctgctcaatgcattccaggtcctccacctctcatctgggcttttaccaaatagcggtaggtttggtattgttctcagcgatgaataccaggttgtaacatctttatggtgccagctgtatacaacccatgcacctcaacaggcctctggtgtttggaaccatcctggatccaaaggtactgaatgtaaattcttcttgttgctttttctgtattatcagtacctggccatgtaaagacttgtaaaggctatttattgaaaagctttcacttcagtcatttgtacagatgtatgaagtctggatcactgctgtttacaatgcaaatgatattgaccagtttgcaagctcttatgggaataaatgttttatgtacattagggctgattcttaaaacaattgtaggtattactattttca

SEQ ID NO: 475958 - DNA, 655 bp, Homo sapiens
ctctttgatataagatttcctttcttttggatagaacttccagcaccatgttgaacaacagttgtgaatgtggacatctttttcttgttccagatcttacaggaaaggccattttttcctctcatcagtttttccccattcagtatgatactagctgtgagtctgtcatacatggcttttatggtgttgagtttaactggttttgtaaacgctacaaaggtaacctctttgattacctccctcactgccaaatatattttcacagaataatgttgggccttactgagaccatggcactgagtgatctgacccatgaccagaaacctgaatccagcaaaggacaaagttgcgcacattgcgtcagatacaatttctgccatttaccaggaagaactaggggaaccaggagaagggccacctgcttggggcgggtgagtccaggcgcccagatgacttgggccttttctaagagtgaccggaggaatgctaccgtgggactgtgcattgaggtagctggtgattttcctgtgcctgtaaggcccaatttctttgaacgcagagatattctgcgctgttctgtgagcctctaagtgcttctttatcaagggtgggggtcgggggagcgcatgaaatgtgtctgatggaggccactcaa

SEQ ID NO: 475959 - DNA, 597 bp, Homo sapiens
aggttagggggcatggtgggtgaaaaggcaactttttgggcacgaaacaggaatgtctgttctcatttagaaccggggaagagtctctcccaaagctgtgagctgtgctgcctggaactgggggaactatggcacaagcactcccttggctggccagctgatatctcactgggttgtgtgcaccccaagtccactggctccaaacccagcacagcatcaggacttgtccaagaattacagtccttgtggcctagattgcctttccagtttatttataaccccagagtgtgtcagttcatggtggtggaattagctagaactcaggttctaaccaccgatagggacaattcccctctggccagggctggtttaattgctccctccatgggtgccagcttaactctgtcctgtgttgcattccactgtttagtcctcaaagatggattaccccaaccatttctgccaggaatgtgaactaagagatttggaaaagccagcaatcatctcatagcatatttacaccttctatatacctatcaaacaaacaacaaaactttaagtaccatgtttactgaagcttttttaaattacagaaat

SEQ ID NO: 475960 - DNA, 1035 bp, Homo sapiens
agggggttgtggcccaattccctcaactccactaagcagcaccccagtaacatttatcagttgttaatatgggcttgttgtcacaactatcatctcttaatcctcacaacaattttatgagacttgttcttactggcatcatcaaaaatagagagctccatagtgccttcaaagtcctgttgaaaaacagacctcaaacactcatccaatcatggttcagcattgtggactggaagaatattatacatgtggaactgtgcaatgtgttggagctggctcacactggagctacgtgcaattgtgttcatctcttccccacttcatgttcagggatatcatgtggattacttgaaatttgctatggtgggagtatttacaccatggatattggcaaattgctgaaaacatgtcagctgagtacaaaatgtctggacaagtgtgcaggaaaagtttattaccagaaaatgaagcaaaatgttactgttggacagggcacctggaggagtcactaatggctccatcctgaagtgacttcagttctttcctgggtctttgttgaaggttaattcacatatcataaatttgcccactttaagttacaattcgatgattttttaatgaggaaactgagacttagagaagttaaataaacttacccaggtcatggagcttggtaaagagattcaagaactttgctatatggtaatgctttttaaacttgctcatcataatgaccacctggtatattgttaacagtgcacatctcaggattcagaaattctgggataagatcacaaatctgtgttttctacaaacaccatagatgattcctatgattagccaagtttagagatggttgctatgatgcttctcatcaatattgaataaatattaaataaaaaataagctaactaaaaattttggtttggaggattagggaaatgtgtaggtcttgacagaaatgagaaagacaaggctgccaaagggaggaataacatgtacaaaggtaagaggcttaatgtgtgggttgtgctt

SEQ ID NO: 475961 - DNA, 660 bp, Homo sapiens
tgagcgagaacacgcagtgtttggttttctaagtgtcagggtaacaatgggacaggtgtggggtctggttcgtttcaccttggaactttttcacactgatgatgaggaggaacgagagtataatgaagtaacagaagaggttacagaccaggtctatgtgccagctaaagctaaagcggcaaaggagggagaggttcaaccctacctttctgcaccccctccttattattttgaagaaaagaccctccagatctttcttttccagaggacactgggcaaaaaaatacaccccccagatcaacagggaaatattatagctacatttgagccttttccttttaaattcgggaaagcacatttagttgattatatcaaggcctgtgatggtatcggaggtaatctgcataaagctactctgctagcacaggcaatggcaggactgagagtggataaaggaaatactctatttcctggaccttgttttaactgtgggaagcatggtcatactaaaaaagaatgtagaaaaaatcagtgagtcaggctgccagatatgggaaaaaagaaaactgctgatcctgaaatatgtccaaattgtaaaaaaggaaaacactgggttaatcattgtcactctaagtttgataaagatgggaacgcgatttc

SEQ ID NO: 475962 - DNA, 707 bp, Homo sapiens
tccttcagacatgaagttgggcaatgatgcctgagcttaatgtaaattaccttgtaggttggtgtattaacacaaatgagggaactgagcccgagcaaggtgaagtaacttgctcaaggtcatacagtgtggtcctcaagccagcaacatcagcatcacctaggaacttgttagaaattcaaattctcagaccctacccagaccgaccccagaatcagaaattcagagaggaagacccagcactctgtgtcttaacaagccccctggaaggaaggaaggccctcctgttgcttccacaaatccgttgtcagcagcagcacagtagctgctcttatgttcccagatgttattgcactgatataaggagtccaacagaaccctgccccaagggcctgaatctcagtccctggtcccctgctgctgcatttaaccatttatcatcaataacaaacaagggagtatgaagaatgaattccttgcgtgacaaacatttttctccctgcccattgtgcaacagaagtgacacttcctccagatattcagggttaattacctctgctagaattgtgacttgaattactgttttaagccaactcattctttaatcaagttcagacttttgcctcattcattcgctgattgttacagaggtgaagcaaacttagtgatagagagtcatactcaggaaatgtgttacagattgctct

SEQ ID NO: 475963 - DNA, 926 bp, Homo sapiens
tctgctgccagtctgatccactacagctttctgaatcccagcgaaaccattacgtctaagaagtatgctcaggaaattgatgagatgcactgaaaactgcaatgcctgcagccggcactggtcaacagacagggcccaattcttctccatatcaatgcccaaccgcatgctagttgactctaatgagtatgcagggaaggttggtctaaaggcaaaggcaatctacggccataccatcctggacgcacctgatcttatctacaggcaaaggcagtactggccagtcacagcaattccacatgcttgtgctatgagaggaatgtccgttggggatggctgtgacaactcgaggcatgggctgtctcaaaggggactgtgtgaaagtgtttggagccagtacaccagggctggcaggggtgttggagtaaccttgacaattgcaagccgtgactaccaatggagccgtgagatccagaaatctgcatttttcaaaagctccctaagtggtcgtgatgtggccatttcagaactggttcccagatctgtgtttagaaatcactgagctaaatgttctcttgatgcctgtgtcagtcagggttccagcaggacaaaaaaggtgagaagcatgtgaaacagcaacagattcaaaggatattggaaagtgcctgttgaccagacaagcagaaacatttaaaatgtttttttaaattttgtaatttcccacaatgctgtttacacaacgggcaatgatctgtagcttgaggtggcaactccttagaaacctgtagattgagttgcacttgaactaaacagagagttttgcttcagatgagggagagtcagctctcagtgactggctttcttccaaaaccctgaaaatccattccattaattctggaaccttgaacccaagagtcagactagtg

SEQ ID NO: 475964 - DNA, 659 bp, Homo sapiens
tctgctgccagtctgatccactacagctttctgaatcccagcgaaaccattacgtctaagaagtatgctcaggaaattgatgagatgcactgaaaactgcaatgcctgcagccggcactggtcaacagacagggcccaattcttctccatatcaatgcccaaccgcatgctagttgactctaatgagtatgcagggaaggttggtctaaaggcaaaggcaatctacggccataccatcctggacgcacctgatcttatctacaggcaaaggcagtactggccagtcacagcaattccacatgcttgtgctatgagaggaatgtccgttggggatggctgtgacaactcgaggcatgggctgtctcaaaggggactgtgtgaaagtgtttggagccagtacaccagggctggcaggggtgttggacggttctaccacctggtggaccggtctctccaaaacaaacaggctcctcatcatgcctccaagcctgagccctgtgctgatccccaaatgctggggaacagagatgacccatggactccttatcaagtgccttcaaacaccacttgctcataagaagtttttacattcattaagttcatgctaccaaaggtcaagttcccactgcagaaatgaaaaaaagaaaaatgaggaagac

SEQ ID NO: 475965 - DNA, 604 bp, Homo sapiens
agaatcaagtagccttctctggttgacaataatctgtgcgtattgtcatgcatcattgccagaggagtcacattcctcattctactgggacgttggtcactgccattgcagcccaggacacacttctttctgagtgcccctatcaaggacagcttcacggatgtgtgacctgtcatgaatctgctctttttcccaaccagttctgtgcctccagcttccgtgtcttagttcttcatggattccctgagaacagtagagtgaaggaattacagaaacagtctaagttaggatcattcaacaatgataagccaggggaagtggtttccatccaagtgctacccacgccctggcatgaggttcagcccagacagactgtgaaggcagcttattccgtctgtacttctcattccagaaaagaagagtcaggggagaatacctcgcattgttccctaacgtgttcagtatttgcagaatatatttagtaatttagacccaagtaaagagacagcgcattctggaaaaagtacagaaatttaaagaccttgtggaatttgacttctgtgtacttttctatctcccaggtttgggtcatctgcaaaaagac

SEQ ID NO: 475966 - DNA, 955 bp, Homo sapiens
cagataaggttaagaaggttaatctcaggttaatctcaaggagagaaaaggtccgttatgtcccctaagctgcaaaaccagcaagtttttattagggattttaaaaggggagggggtatacaaacaaggagcaggtcacaaagatcacatgcttcaaagggcaataaaaatcacaaggcaaaggcaaaattagaattactgatgagggtctatgtcccactgtgcacgtattatcttgataaacatcttaacagaaaacagggtttgagagcagagaaccagtctgaccaaaatttatcaggctggaatttcccaatcctagtaagcctgagggtactgcaggagaccagggcatatttcagtccttatctcaactgcataagacagacactcccagagcagccgtttatagacctccccccaggaatgcattccttcccccaaggtattccttgctgggaaaagaattcagcgatatctctcctatttgcatgtccatttatacgctctctgcaagaattaaaatatggctctattctgcccgaccccacaggcagtcagaccttatggttaccttccttttttccctgaaaatcgctgttattctgttctttttcaaggtgcactgattttcttattgttcaaacacacatgttttacaatctatttgtacaataatggtcctgaggtgatgtacattctcagctgacaaagataatgggattaagaaattaaagtaaagacagacataagaaattataagagtattattagggaagtgataaacatccatgaaatcttcacaatttatgttcagagattgcagtaaagacgggcataagaaattataatagtattaattttgggaactgataaatgtccatgaaatattcacaatttatgttcttctgctgcggctccagctggtccctccattcgaggtccctgacttccc

SEQ ID NO: 475967 - DNA, 568 bp, Homo sapiens
ggttccggtgtccgaggcactgttccagccttccttcctgggcatggaatcctgtggcatccatgaaagtaccttcaactccatcatgaagtgtgatatggacatccccaaagacctgtacgccaacacagtgctgtctggcgtcaccaccatgtaccctggcatccccaataggatgcagaaggagatcactgccctggcatccagcaccatgaagatcaagatatcgtgcccccagagtgcaagtactttgtgtggatcggtggctccatcctggcctcactgtccaccttccagcagatgtggattagcaagcaggagtacaacgaggtacaggaaagagagaggaaaaaagggcagggaaggaaaggcccagtgggtaatgacagacaacctgtccccagaagcagagaaggggatggggggtttccatgttcttagaatccccctgacctgatcttcctgaattgggctgacaaccaccagagattccttgaatctttgctgttgtccttagacagccataggacccagaattgtccctattgatatttaacctgtagaagac

SEQ ID NO: 475968 - DNA, 647 bp, Homo sapiens
agcctttttgggaaggtgatgagcctcttactacagtttttcccaaatagacagttcaaagactactgggagcaaaatgaaacatacttcaacattactgttcttcaaaatcaagccatcaccagtgctgtattagtctattttcatgctgctgatgaagacatacccaagactgggcaatttacaaaagaaagaggtttaatggacttacagctccacatgcctaggaaagcctcacaatcatggcagaaggcaaaaggcacttcttacatgacagctgcaagagagagaatgagagtcaagctaaaggggtttccccttataaaaccatcagatcttgtgagacttattcactaccatgaaaacagtatgagggaaaccacccccatgattcaattgtctcccatcaggtccctcccacaacacatgggaatcatgggagctacaattcaagatgagatctgggtggggacacagcgaaactctatcgagtgctcacacatgcagaagaattgcatagacttgccataagtagaatctcaagctcaattttgtttataaatgtattaacttaaacaatctttgctattcactcaacatgatatgtttttggtccattgtgtcattcttatgcatttgcatcctca

SEQ ID NO: 475969 - DNA, 656 bp, Homo sapiens
tgtgagcgaaaccattaggaggggctggctctagagcaggcctgtatgaaaatgactgctatggaaatgcttctgacccctgcagacccaggcaggggaggaccaagtgtgtcttcagaaagggactctgctctgatcgccttttctctccacctttcctgtaagctgagatcaaggagtggaagtgacatcagcctaagagctgaaggatctgtaacctctgtcctgggaaaacccagggagagagagtccaaatgtcctgccagccagcagggcttggcagcagttggagatgaaatgactgtgccttatctccaagcagacaagtccaaggtctctgaggattgccaagccccagcagcagcccagcgatcctacggatgcaagaggagggcagagactagagtttcctggagctccagcaggaggcctcatgtcttaggttggcaccacgtgctgaaagagccgctggacccaaatcgacttttgtctgtatgtgagggttgtggccaagactccaggatgggaagtgctcaactcggtgatggccagcacggacatcccacagatgaggatgacaccccgcagcccaccctcactgctacagaaaccccctagatgaggatgagaccaccccagcccaccctcaccagtac

SEQ ID NO: 475970 - DNA, 655 bp, Homo sapiens
acatagaaagttatcctttattcattgtgttctactttgtattatggtcatttctgctcatgttttatctccttatgtaaattctcctgaacacatcctttgggccaaacactgttttggcccagcatgcaagctagatcccttgcatgtgcagtttacaatgggctgtgcgttcctaagagaatctaatgctaccactgatctaacaggaggcggagctcaggcggtaatgctggcttgcccactgctcacctgctatgcggcccagttcctagcaggccacggaccactagcgcagtttcaggttcacagcaaaattgggcaacaaaaggtacagggagttcccgtgtgctccctgcaccagtgtggccctccagctgcaggggcatttaaagaaagaccaaccaagcccacagcatttcgaaaattctatgagcgaggtgacttcccaattgcccttgagcatgattcgaaaggaaacaaaatcgcctggaagaaggctgggaaatacagtccagctgtgtacctcaaaggaaaagggaaatggtctgaacagtgagtctttcccacactagttattagaacccccttattaacatcatttttttttattattatactttaagttttagggtacatgtgcacattgtgcagg

SEQ ID NO: 475971 - DNA, 1975 bp, Homo sapiens
tgctcgtgtgcgcgcgcgtcccgggtgccgcgcgcccttcttatgcacagctgcggctcggctcgcgcggcgcggccgctgcgacttcctggagttctgcctgccgggggcgcgggcgggtgtgtgagagagaaggcgaagggagccgcggggtgggagaggagggagtcccggcgggagggcgggggagaggctggcgggaggggggctccacggagctccagccagggccgcggttcgcctgcacgtcacggctactcaaacccaagcacgtcccgaaagcggtattttctgcgtctgggaggtttttgcatcctcagttcccaccgctggggctggcggcgaccaactcgcagacctgtcgcagccagagagctgtcatttcagtaccgggattcagaattgatccagtccgcagcggagggggcacatcccagctaccgagctgctgagtgtctctggctggaacaatagtatttttttctctgcgaggctgcaattaacatcttatttgttctggctccatacaggctttgtcaggatcgcggtgcggcgaccgacgttgggctcttgcattgctttgtgcttggcaatggaatcatggtttcggggtctaaacttttgtttcgttttgtagtcttaatgtatctgattctttttcaagtttccctagtaacaggtttggggacggggtgggaagaagcgagaaaaggggtgaagagaaaaaaccagattatatagaaaggaaaaagggaaaagggatgtttccccaccttttaatctaactatctatctgtctgtctatctatcatcatagatagtcattttgcctcctggacagttggctgacgaagtgtctgataaaccagcttcagatacatgctacaaaaggtcattcgcctcctgattatgtttctacttgtaaacgcagttggtggtttgcaaaacaagtgctaaaatagtgcagtgatgtggtgggaggaaaccataatgggtaattcatataaagtgctggaatcttcgtaagggtgagtttctcgagcggcaggtgaagttgaataaagcaattttccatcatttgttcccctcactcttgcatttttttcctccgcttgtttctctcccctggggcgattatggatagccaagaacaccattttaaaagagattgatagtgaaaacaggaagtttatggtctgttatccactggagttgtttgaaatattaaaattggtcctttacttcttaatgcatattaatagagtgaccctcttcaaggctttcccgtcttaaacgaatgcctgggataaacactgtaaggggaaacagttaataattccccagcaggctttaactattttcccagtaacaaatcaccggcaagagagcagcctgggtggcattttggttttgtgtcattttggttctttacaatattttttattcatttaaggaaatgttaaaaggaaataattagggtttatgtccagaacaaattttgaaacaccgtttaagcaacacattttcttttaaaaacaaagaacattgagcaacacaaaggagaaaaacattttatttatttcaacttccctagagatcgtaattatgattttcgcaaggcaatttggtcagttctgttactttatccagaggaaaaaaaagcatgacagatgtggaataaaaacggaggaaaaaatgctttggatggtttatacataaaaaggaaagaatgtaatgtgaggttcagttatacctctattttgcatctagtgatttctcatattatcttgtaacactgattttgatgtttcttagaaattcttaaagtcatgacacagtggcataagaataacagctgaaagggacaatttaaaagcctaaatcctaaatggaaaggttcacttactcccaggatcatttatattcaagtagaagtcagggcagggtcagaaaagaaagccacccttaataaagc

SEQ ID NO: 475972 - DNA, 539 bp, Homo sapiens
tccaacaacaggattgagggtgtccagggcaagcgccagcttgtgtcatcaccctcactgagccccggaatcgaggccatcaagctacagatggtcttacaaatggaaccccaaatgagttcaactaacaagttataccgaggacccctggaccgacccactggcacttttactggcctagagagctatcctctggaggacactacaactgcaggaccccttcatcgccccatccagcaggaagtagctagagcggtcatcagccaaattcccaacagcagttgggggctgcacgtggtgcttatgggtcagctagagttctggataggcgtgggcttggtgggcccctctcttggggtgaacccatttcagagcaccctgcccttcacaaagaaaagagaactctccccggggctccagctggcttctccgggatcagtcacgttaccacactgtggaagctttgttctttcactctttgcaataaatcttgctgctgctcactctttgggtccacactgcctttatgagctgtaaca

SEQ ID NO: 475973 - DNA, 827 bp, Homo sapiens
caccaccccctctgcaggtcgccattcactagcaagtttgggaagggggtttgctgcaggacggtgtgtgggttagtcgccgatgcacatgtgtcccccttgccctctgcagcttacagccccgtctgtgtcccttcagtgggatactgatgtcgccacgctggccatggtctacaggacggtgataggaggccacacctccctgtactgctgtgttcctgatgcccccagtttctcctgccagcctctcactgaagaacataaaagtcaaagtgaagtggaaagtgctgatggaaaagctgcagcaagttatccaaaagacctagtaaagatcactgatgaaggtgtctacactaaacaacagattttcaatctaggactttcaaagaagttgattccaactttcatggataactttgagggggtcaagatttcagtggaggaagtaactgcagaaattgccatagccacatcagctttcagcaaccaacagcttgatcaatcaacagccatcaatatcaaacaaggactctccaccagcaaaaagagtaccacttgctgaaagctcagatgatcattagcattttttagcaataaagtatttttaagataatgtgagatggaacaagtttaaacatctgaaacatacatagagttcatctctgcctctgaatcattttgtttttaagttggctattcggaacttggaatttgttttgcctctgaaacagaagtaaggataggtagccaggcaaaaatagactatttaacctgtaaatgagcttcattaacatatagaacttaaaagttcacttattatagttcct

SEQ ID NO: 475974 - DNA, 983 bp, Homo sapiens
gaaagccttcttcaagagtgcatggtctaatgttctcagagatatgggaggagcttttaggcctgtcctgtatgtggaattgaagaagaatgggagaaattacaacatatatcgtataacgaaagaaaaatcaagaaaagagtttgaagaaacaggggtagatgggagaattgctggagtgttgtccatgggtggtgaaaatggaaggtttcggagcaagtggaggagcaaggagcacagtgagggcatcaccgggtcagcacacaagtgcacagacgctgaggctaggagtgaaaaccaaggagaaggtaaagattttaggggagatgagaaggtacagtcaccagggaaggcatcagtgagaggtgacaacatgctagcagccctcggttgctctcggcgcctccttggcctcggcctccgctctggcctcgctcgaggagcccttcagcccacctctgcgctgtgggggctcctctctggggctgaccaaggccggagccggctccctctgctagcagggaggtatggagggagaggccccggcaggagccggggctgcgcacggcgctcgggggccaccgcgggttttcagtgggtgtgggctcggtgggccctgcacagggcgccgggcacctgctgggcttggtcgggggtaggagctccctctgggctgccggagtgcccaggataggtgcctcaaaatcccgctgagagcgccagcgagaggtgaagctgactgggcttttcggaggggtggggcttggagaacttttctgtctaggctaaaggattgtaaagacaccaatcagcacttggtgtttaactaaaggtttttaaatgcaccaatcagcactctgtcaaaacggaccaatgagcactctgtaagatggaccaatcagctctctgtaaaatggaccaatcagcaggatgtgggtggggccaaataagtgaataaaagcaggccacccgacccagcagcg

SEQ ID NO: 475975 - DNA, 1068 bp, Homo sapiens
acagcagccaccttgcaaccaggaagagaaccagcctgaagacaaagctgacattgtgaggacggcagggtggagagcattggaaagacttcaggacggtgatgacaccactgaatatgccctgcccccgaggtagaatctacagaggcagtaggccttgctgagctgcagtgggctccgtccagttcaagcttccctgctgctttgtttacgctgtgagcatagaaccgcttactcaagcctcagcaatggtggacgccgctccccacccaccaagctccagcatcccaggtcgatctcagactgctgtgctagcagtgagcaaggcaccatgagcgtgggacccaccgagcaggcatgggagggaatcttccggtctgcctgttgcgaataccgtgggaaaagtgcagtatttgagcaggagtgtacttttcctctaggtacagtcactcatggcttcccttggataggaaagggaaatcccctgaccccttgcacttcctcggtgagggatgccccgccctgcttcggcttgccctccatgggctgcacccactgtccaaccaatcccaatgagatgaaccagtatgctggtaacagtactctgatgggggtgctggccacacacttcatcaaggtggtggcagcaggatccatgcctgtgcatttgtgccagcagaagcaggggtacagcaagatgcatacatctgtgggagcggggtgcctgaaggatatttcataatgataaaggatcaattcctcaagaaaaaaatctaagtgtataggcaccaaataacatagtttcaaaatacataaaataaaaaatatatttaaaaggtaaaagaaaagtcttctagtcctaatcagaaacattaacaatttgtattttatagaataagcacatgaaatatctgtaggaatatagaacatctgagcagcactcaatctaattgacaaatatagaacactgtatccaacaatcgcagaataaatgttatttaagtgtacatgcaacatgcaccagtatcaaccatatgcaggaatataaagtaaatcaataaatttcaa

SEQ ID NO: 475976 - DNA, 666 bp, Homo sapiens
aaaaggcattggctcatctgtgaatttccctaacttcctcttcagattctgaaacgaggggcatgcaacaacattggccatgggttgttatgttctaccacttgtttgccaagataatactgcttccaactgctcttgttttaagaactacatcaagtgcctgatttgtgcaaaatattatgggttgaatgtatcccctcaaaattcatacatcaaagtcctaacccccagtacctcagaatgtgaccgtatttggaaacagggtcattgcagatgtaagcagttaaggggatgtttgggcacaggggctcgaacacagggagaacaccacgtggagattggagctatactgccaccagtcaaggaatgccaaagctttccaaaaaaaccaccaaaagctaggggaggcacatggaacagatacttccctggtgcatttgaagtgaagaacactgagtacagaactcatcagcttcctcaaagcttcaaagtgaaacattgatgggtgggatttcaaatccagactctatggtatgattgacggtactcgagaggcctaagcagtactcgagaggcctaagcaggcaacaggcttgacggaggagactaaagagaaggcttactaagtgaatactgtcttccgtaactgacataactttctgccac

SEQ ID NO: 475977 - DNA, 1824 bp, Homo sapiens
tctggagaagcatgagggactgaaaatattggaaacttataaccatggcggaaggcaaagaggaagcaagcatttcttcacatggaggagcacgagagagagccaagggggaagtgccccacacttttaaacaactggaactagaagccccttctggtatccataccagggccttgccctggcctccagagcccctgatcctttttatcagggaagcagagtgtaaaactttgaaaaatttgcatcctgaccatgtggtagaaaaaaaaaacccattttctggggagaaattcaagccagctgaagaaatctgcataagtagcgaggagccaaatgttaagcatcaagacaatggggaaaatgtctccagggcatttcagagagcttcatggcagtgtctcccatcaccggccctgaggcctaggagggaaaaatggtttcatgggctgggtctaggccactccctccacaccctggacatggtgccctgcttcacagctgcttcagctccagaggtggctgaaaggggccaaggtacagcctgggccattgtttcagagagtgcaagccccaagacttggcagtgtccatttggtgttgggcctgtgggtgtgcaaacaagagttgaggtttgggaacctccacctagatttcagaggatatggaaacacttggagtacaggcagcagtctgctgcaggggtggagccctcatggagaatctctactagggtaatgcagaggggaaatacggggttggagcccccaaacagagtacccactggggcactgcctagccaagctgtgagaagagggccaccatcctccagactccagaatagtagatccaccaacagcttgcactgtgtgcctagaaaagctgcaagtactcaaagccatccagtgaaagcagctgtgtggggtattccctgcatagccacaggggtggaactgctgaaggacttgggagcccacttcttgtattggcttgccctggaaagaagtatggcctggtggaatgcaggcattgttactatctcttgacatataacattttctaatacagatttcatagatttggaatagttgaacttttctgctaagttacatctttacattgactctactccttagttttggtgctcattcctgtgagtacttcggttatgtaacatttttctctgacatggaaatcagcaaacaggcatgctatggccaaaggtaaagcatcacaataatgaagaagcttacataaagggaacattgatgaatgcagcagcatgtgtttgtgattaaatcaaaggcacattcaaggctgcctagcaatccaacctgattaactgttttccaaatcctgatatagtacaaagtaattgacaatgacagggatgggggggaaatcagatgcaaaattgagtatatcactgtcagatggttaacaaaacaaagtgcccaatgtcttctaaagtttcaatatttctagaacttatttctgaaaccaaactcattttcacagacaatagaacagtttagtgtctagacaatgggaaaacattaagttgttaacaagagcagataaaacatcatcttttttttgccatctgtaaagacacaaggcctgttttctgttattttgtacactacaccttctaagtcagatcccaaactcacagattattctgggattgtatgaaatccctaccttttatttatttaaataaaatgatattgaagttagtgaatataatagctaataaaagctagtatttgttaggtgccatgaatataagacattctttttattttgttataatttctaattctc

SEQ ID NO: 475978 - DNA, 1154 bp, Homo sapiens
atcatcttttcctggaagaaagagatcttctcgccggtggggccggctgggactcgccgctcgcacgcccttgggcagcggcggggcgcctgctcttccttccgcttgcgctgtgagctgaggcggtgtatgtgcggcaataacatgtcaaccccgctgcccaccatcgtgcccgccccccggaaggccaccactgaggtgattttcctgcatggattgggagatactgggcacggatgggcagaagcctttgccggtatcataagttcacatatcaaatatatctgcccgcatgcgcctgttaggcctgttaacattaaatatgaacatagctatgccttcatggtttgatattattgggctttcaccagattcacaggaggatgaatctgggattaaacaggcagcacaaaatataaaagctttgattgatcaagaagtgaagaatggcattccttctaacagaattattttgggagggttttctcagggaggagctttatctttatatactgcccttaccacgcaccagaaactggcaggtgtcactgcactcaattgctggcttccactttgggcttcctttccacagggtcctatcggtggtgctaatagagatatttctattctccagtgccacggggattgtgaccctttggttcccctgatgtttggttctcttacggttgaaaaactaaaaaacattggtgaatccagccaatgtgacctttaaaacctatgaagaacagtaactttaagttgtgtaagtatagaatgaaatacatataggaaagtcagagtaaagaaatgtgtcttcaatatcttttcagaagatatggtaacccatgtatttatttcatattctccaaaatacataggaaagggctccaggacaatttgggcaaaattcatcttatctgtcattggtggtgctttctattcattttaaatatactgttagggccttaggaagaatttcactttcattaataaagtcaggctatctttcctagagggacaagctatttttatgctgagggggaaaggaaaccatcataagtgctctcacactgatgcattcctgttgcaatgtactgcagcaccaatgtcatccttagaaacaaaatctataactagagctgtcatttagctct

SEQ ID NO: 475979 - DNA, 796 bp, Homo sapiens
tgctcacagataagatagcagacagcaaggctctttttccttctcctcaatgtgaagacgacgaggatgaagacctttaggatgaagacatttttgacaacccaggaacaatactttgcatccttcaatcctgtcaagttgacactcgatattaaccatcacaagtccacccttgtcaacttgaacccatacacatctgaaatcatatgtaatcttcaaataaagacaataataaggaatggtgccatattaagggctcagtgttggtctctgctgctggcaaattgggcactcagcagtggccatagccaggtcagccttggtgagtggaagtccatgttgctgagcccatgcgtaacctccattcctgccaccatggccactgtgttcatgggcccattgggcgatgacagaggtggctggggaaagaggctgagtgttgtccacacaacgagtgatcctatccacttgattattaaaatccttttctgtggaggtcacctgttggtgaacactcatatgggatacaaatatcttcagtttttgaccactcagagagttccatccacgtacctcttccccagatttctttgtcaccaattttccagtcatgcttcttccaagtccctgaccatccagccaaaccattggccatagcctgtgaatcagtatgtaatcacacatctggccatttctccttcatgcaaagtgtacaaccaggtacactggtcgaagttctgcccactgggaagatttcccttcactgctgtccttcagggatgtcctagaaaggggg

SEQ ID NO: 475980 - DNA, 601 bp, Homo sapiens
tctggcttagttaagaagagttatttggatccttgtggcaaccctatgttggtccatgcaattaacttgctcttgtccagacatgctgagccacatcttctggtagtctatattggatactggaagataatgaatgtcataggagttgtgagagagcattatttttggcttacaactctgtatgcaaaagttctaccagatgagtcaataggattaaaagaaaatcagacaaataaagaatcaggaaaacaatcttcccaaactgtgtttctgaatataaaaccactactcaccccagtgcttgtgaagacgcatgcctttagaccacccataaaactcaacccagaatcacctgtctttatcagtggaggtaacagcaacagagtttctggaaaaagttatctcaaaccttcctgggttgagactatttctgtggatgtttgggaagaaatctgagaaaattttgatttgagggtactgattaaagcttatccatctcaccggtggtcagagaaacttgatttattttcttgtattgaatgcacttcatgtataagacaactttctggaaagtgaaatttgttatattttggcttttgac

SEQ ID NO: 475981 - DNA, 626 bp, Homo sapiens
acaaatttccgcatatccatctttttttttaaagcaaaaagttcttagacgtcatggtttttcacattcactgctgctcccatctccagactggtgtctccacttgcttttccctcggtccccagtctaccccatatagcagctctcatgtctccaatgtggatgttgagaaagatgaccagaatttggagtcccaaattcctaaatcctctccagttgctgatgaagctactgtcaccccatgtgagtttgccaaggaaggacctaggcattcattccccccagctaccaggagtgttggccaccgatggctcgtaattgcatccttctccaggaatggccttggtcaaaggaagctgccttgcccaagcacacagacctccatggtcaacgttggagagagtgatggcaagggcctatctgtcatgccaaatttccactccctcacaccagagtcacaggacatcctggaccatgaccattcataccagtaccctccaactctccctggaaaccaacaaggactggaaattgggtgatgtgtggtctattctaaacgcttccacaaaaagctgcccatcttgggtttttctgtgtcagacatttctggctcttggttagacaat

SEQ ID NO: 475982 - DNA, 596 bp, Homo sapiens
aaaacggaccaatcagctctctgtaaaacagaccaattggcgctctgtaaaatggaccaatcagcaggatgtgggtggggccagagacactactttctacaactgtaatgctcactgtgagggtctgcagtttcatttttgtaagtcagaccaaaaacctgattgtggccgttggggaactctgcgtcctttgtagctactggtgtgagtgtaaattttctgttgagggccagcagtgtttgttaactctccgggagtgcggggtggcagagcccaggcctgcacacccggaactcgagctggtttgcaagggctgctgcaggcctgattcttgcctgcgcctctccatacgtgcctgcaagctgagggaagaccatctttggaagacagctgtggcagtttgcccttgtctgcaagagcttgccaaaggggacactgatgcaacattaatcatattccaagctccatacagtgcaggtgaagtcattagaacagcaaacaccctgtctgttccttaagagacagatgattttcattcggtgataactggtattttttgtgataatgatggggaaggtgagggcttcacgaaagcc

SEQ ID NO: 475983 - DNA, 595 bp, Homo sapiens
ggaccaatcagctctctgtaaaatgggccaattggctctctgtaaatggaccaatcaggtgttatggtatatgttattcacaagtctagaagcagacaagagtccctgaagaaggaagagacagggcagcagggtgtccaaagtggcctgggaacagcatcaaagacaggcttttccagcccaagactttccctggggtcatttgtcctttccttccatttcattcaggtgctgcaaccttctacgttttggctagttccaaatgattccaaggttatacaacagccagggacaatccctctctcatcacaatgtgggctggagcctagtcaagctattcctaaatgccagtccaggcatgggctacttcagaatcaggccagcccagacctcctaaacctctgcctgagggaagattctggaatctgtgctttagctggttccaaaggatggtcagccagaagaggtgaggactaatctggtctttaaagttggaaagggtcaggaaagcagaaagaagagtcactctgcaaagaaccaatgggaactgtttttctaacctgtaacaccaaatgaatcatgcccctctcacctt

SEQ ID NO: 475984 - DNA, 726 bp, Homo sapiens
gcttcctggagatgtttttcttgccagttctgttatgcaaggtagacgtcttaactgcatcctggaacagctggcctccagtcaaagagttacaggcagatttggggaatataattgtgtccggaattggttcctgccggtgggttcttggtcttgctgacttcaagaatgaagctgcggaccctcgcggagtgaagctgcagaccttcacagtgagcgttacaattcttaaaaagggcgcatcagaagttgttcgttcctcctggttggtttgtggtctcaccagcttcaggagtgaagctgcaaagctttgtgttcaggaatttccccggtgtgatcaagttctcatgtcggcagctgagaaagccactgacagctggggagctattttctcctttagtcacatgatgatagagataatcctggatgggaagtgtgggggagagaaggaggagaatgttcgttgttctgtccagaattggtaagggggctcctagagcttcctttcctgtagactcagcatctaaataactcgtgatgttatcttattatggcttctcttttaacttacaactacaaaatataccacatagaagagatatgaagagaaatgaaagaatacacaaatacatgctgttaggatgatgtgatatttttatctgttctatattttcattacttttaagattctatattaaaatggaaaataaataaacttgctttctt

SEQ ID NO: 475985 - DNA, 925 bp, Homo sapiens
tttttctgaattcaaggtttcaaggttaagtaccgaatatttctgtacaattactcattacaaattcagagttctcatgagatctggttatctgaaagtgtgtagcacctcctcctcctctctctctttctctcctgccagccatgtaaaaatgttcttgcttctccttcactttctgccatgattgttaagtttcctgaggcctccccagtcatgcctcctgtacagtctgtggaactgcacttcatcttccccaaacttcccgactcctcatctcagcaagaccgccaagctctgctgagactccaattcgctgtgccacggtataaatctaacaaaacatatgaggaatatgaggaaaactacaagattctgattaaagatatcaaagaagaattaaataaatggagagatattccatgttcatgtataggaagactcaatattgtcaagatgtctattctttccaacttgatctatagactcaaagcaattgcaatcttagcaaaaaatccagcaaactatttagtgtatatcagtccacaaactgactctaaaattacaatggacaggccagagacccagaataaacaacacaatattgaagaagaacaaaattggaaggctgacattacctgactttgacttactatgaaactacagagccttacagacaagggtcccatcagttctctatatatttacgcttcttcagagcccttgcttgtgttctgtctcacatgtggaataaagtccctttgcctaaaaagcagaaagaaagcatttccatgaaggtggtgataggtgaccgtgggaattttggagatccaggttaggggaagttacattgggaaaacatttagtttaaattcggtagaatatatttatgtggtaggcagtcacttctgtatattgctaggttatc

SEQ ID NO: 475986 - DNA, 610 bp, Homo sapiens
tataggaaaaggccaatgtacaaaagtagatcctcaccagcatctgttatttttttggatttttaataatggccattctgactggtataagatggtatctcactgtggttttgattcccatttctctgatgattactgatgtggaacattttttcaggtatttgctggccacttcggtccacggcccaaagccaaagccacagccacattaccacacagagcccccaaagagggaaactgatttcaacactgtatattttgctaatatgtgcctgctacttacagtatcagccacaactgaatgtccacaaattgcaggcttgcaaaattcaagtgagtttggcaaaaggaggaaagcacttacaagtgttccaaaatgggtccaaaaactaaaacaaagagaggcgggaaggaggtggagaaagggagaggagactttagatctaatttcctaacttcctagttcctaggactgttattggaaaggagtcccagtccacaccctaagagagggttcttggacttcacacaagaaagaattcaggcaaggtcgttgtcacctgtaccttgtgtcgacttcctatctcatcttgtgactaagaacgtctaa

SEQ ID NO: 475987 - DNA, 629 bp, Homo sapiens
tgattcctttagcgtcaagaatgcattccacatactcactggcagactgtgctgtacagaacctaaggcgaatcctgtggacattgatgcctgtcttccaggtgcttacagactgtgtggccacagggaagtttcttaatttctttgtatctcagtttcttaatctgcgtaatggggatagtaatgtgtctatttcatgggtaacaaaggctccgaatggaccgcttctggatgcctcctttatgagaagaaaacgtctccttcccaccaagggggtgtatcctctcccccagcacacagcatcctgtcctgccagggtaaggttcttcaccttccccagagactctcaaggaactggaccaagtttgttgcagctcagcccagttggggttgtgggtatctgtagcagaggctgagagttgaaccttcatatgtattctctccttctgccatagtaatagcatttttagttgggtaagtggcttcctagaatgaaggctccattacccagccttccctgtagggacaatctggaaagcccgagtcctcccattgtctggaattgccttttcctttcatagccactccaagtcccacctcatttctggtaggatttttgaagtgcctca

SEQ ID NO: 475988 - DNA, 497 bp, Homo sapiens
caggacagctgaagagaaaaggagggtatgcgtatccaggcagcaggctttgagagtgagaacggctctacttatcctggagctttcatgtggtgggagaggcgcagtgctggaactcttttcatcttgcaaactgaaagtccgtacctgctgaacaataactccccacttccctcctccccagcccctggcaaccaccgtttactttctgtctgtgtgaatttgactactttaggtcccttacataagtggatcgtgcagtatttgtcccttgtggcttatttcactcagcacaatgtgtcaaggttcactcatgttgtagtgtcagaacttccttcccttttaaggctgaataatattccattgtatgaatggaacacattttgtgtatccattcatctgttgataaacacttggattgtttctacctcttggttgttgcaaataatgctgttatgaacacaggtgtacagagagctgtttgagcctctgctttc

SEQ ID NO: 475989 - DNA, 741 bp, Homo sapiens
gccattctcctttgctcatggccctccagccacactggtcttttctagtttctagaagaatccacaccgaccagcaccatgcccgtgacactggggtactgggacatctgagggctggcccacgccgtctgcctgctcctgcaatacacagacttaagctatgaggaaaagaagtacatgatgggggacgctcctgactatgacagaagccagtggctgaatgaaaaattcaagctgggcctggactttcccaatctgccctacttgattgatggggctcacaagatcacccagagcaaggccatcctgggctgcattgcctacaagcacaacctgtgtggggagacagaaggggagaagatttgggaagacattttggagaaccagcttgtggacaaccacgtgcagctggccagactctgctacaacccagattttaagaaactgaagccagaatacctggaggcactccctgcaatgctgaagctctactcacagtttctggggaagcagctattgtttcttggggacaagatcacacttgtggatttcatcgcgtatggcatccttgagagaaaccaagtatttgagcccaagtggttggacgccttcccaaacctgaaggacttcatctcccgatttgagggcttggagatctctgcctacatgaaatccagctgcttcctcctgagacctgtgttcacaaagatggctgtctggggcaacaagtagtgccttgaa

SEQ ID NO: 475990 - DNA, 1960 bp, Homo sapiens
ccaggacaccttgctaagattttttttcggatgcaaactggaaccacagagaagccacatttgaaaactgctcagcaaagatgaaggtgagaatgccttggcttctctcttctcactgccttccaaaaggcaccctcaccagagtctccattgttgaaggtagccagagccaggtggctgtggatcatgaaaaatgcaatccgaagagaaagattaataaaataagtaagatgattatttacccgcgtattccacttcaaggctgtgggtggccggagcccatccagtggccaaagcgggagccagcagtggacgggacgccatcccatctcagcactggctcacatacccccaccctcactgagactgggaccactcagaaacgccagctagcatgcacagctttgggatgtgggaggaaaccagagaacctgcagaaaacccacgcagacatgggaagaatgtgtgaactctacacagacagtggcctggaccgggaatcaattttccttctcatcaatgttataaagaaacggcgtggttttactaccgctaactaccccatctacaaccacactggcctgcagaaaactgtctctgggagaaaggagagagaagtgggttagacaagcatttatggtgatcaacacgtggtgtgagaagccttttgtattattaaaaaatgggttactaacactgctcagtgaaaggcgctgtttcttttacaatgcataccaaatccaattatggaaaaagaacagtggaaattctttttttattgagagctaaaccagcttactagaccatgtaatttttttccagtaagcctagaacatagacatgtatatgtattaaaagaacttttctccatgcattgactattacacattatcaaatatttttttattcctgccaaatatttatttctccttgttgttttattgttttaattatttttcatttaaaatatatttacgtgggataaataaattgaaaatgaataatagaagaacttcagaatcaaatgatctagggaaaaatgcatttgaaaatattgtttttatttaaatatgtttacacttctgggtctttatattggaatacatattatatatagtataaattaagaaattaatttagaaattatatgtatacataaaattataaatatgtatacaatttttattaggaagatattgatttgtaaatttgatatataaatatgaagttttatataaatctaaaattttcaaattttatatgtgttaacataaaaatatgtttgttagtagtcagatttttccaagcaataatttggattaatttctcttattattttccatataacaagccaaatatgttttgattttttaaacatactgtatttatgaatatatggttggcattgtacaaaatccaaaatttttttaacagtccattgatagcaataggtaagtatcatacagatttatatttaattttataagagaaattttaaaaaatttataatttttcatattagccacatatttttaacttcttaattgtaaacctaccttgatccctagaactgttaaatccttttaatctaaggtatgttaaagtacattgtatttggctataaacttctcttcaaatgaaattcaatcaataaaataaaaaataaacaagaaaggagtcatatttccaagcatacaagaggcaaattcaaatgcattcttctatttgttgtgctattggttgagtatgttttctccctggtacaataattgtagcattgcagttttctggcaacaaatggcttctgggggtcaccaaatgtctctgatttgctaaagcatttaatcttccacaaaagctgtttactgcttcatatatgctgaacgccaggaacattatcttttaaatcatgcctagctgctaattaacggatgtataaacgtctaacagccaagtcttt

SEQ ID NO: 475991 - DNA, 870 bp, Homo sapiens
gagaggaacagcaaaaggaaagtttctgctgccttttgttcagctatgccctgcccccagaggtggggtctacagaggcagcaggccttgcagagctgcggtggcgtccgcccagttcgagcttcccttgccactttgtttacctactcaagcctcagcaatggtggacgcccctgcccctgccaagctgctgcctggcaggttgatctcagactgctgtgctagcagtgagcaagggtccgtgggtgtgggacccaccaagccaggtgcaggatataatctcctgaggaagaagaagaagcaggaggaggagaaagaggagaaagagggggaaggaggggaggaggggaggaggggaagggggaaggaggggacgaggggaaggagaagaaggaggaagagaaggaggaggagaggaaggaggaggaggaaagaagcagaaggaggtggaggaggagaaggagaagaagaaggagaagaagaggaagaagaagaagaaaaagaagaagaaggaggaggaggaataaagaaagaagaaagaagaagaaagaagatgaagatgaagaaggagcagaaagaagaagtcatccctggccttgaacagaggccctgactttttataaactgcaaatttcaagtgggccttatccccttttggtttgttggtctttcaacaagatacctctaactctaatttacataagagtggataggagaagcggggttgggtggggaggatagctctctgagaacttttatggagaggttaaaataattacagagtttatgagcccatgaagtttactgttagtcctacagaactttcaatttcttgcagagatttctttctaaactgtaaaatttcattct

SEQ ID NO: 475992 - DNA, 563 bp, Homo sapiens
acatcaaagatcaaaggtagataaatccatgaagatgaggaaaaaccagtgcaaaaaggctgaaaattccaaaaaccagaacacttcttctcctccaaaggatcaaaactccttgccagcaagggaacaaaactggacagagaattggtttgatgaattttcagaagtaggcttcagaaggtgggtaataacaaactcctctgagctaaaggagcatgttctaagccaatgcaaggaagctaagaaccttgaaaaaagattagaggaattgctaactggaataatcagtgtagagaagaacataaatgtcctgatggagctgaaaagcacagcacaagaacttcgatattatccaggagaaattccacaacctagcaagacaggccaaaattcaaattcagggaatacaatgaacaccatgaagatactcctggagaagagcaaccccaagacacataattgtcagattcactaaggttgaaaagaaggaaaatattgataagggcagctagagagaaaggttggtttacccataaagagaagcccattaaagtaacaacaga

SEQ ID NO: 475993 - DNA, 820 bp, Homo sapiens
gaaagttaccctggtgatggtgatgggggagaaatcactctaaagtggcatggaacctgaaaactacagaatgagaagcagcagctgtccaggggaagagtcaggggaaaaaccatcaggcttagggaatggcacccacaggatggagccagtgtcactggagccctgtgagcaagagccggagcagagtgaatggcagtgggagagggctgcaaatgttcatattccaagacagaaccccatcctcagacccaagtcctcggtggttgattgcatttgtgtcttacaggatatcagtccagagctggtacagtgtttctgtgataccataaagaagtggctgtttgtttacttctgcttcactgttggatttttgccctcgtgcttggtgcttcatggtagcaagatggcagcagctacaatgccatgtagcatgtcttacttcaaaggcttcatacctaaaagccttgtgaaattctgttcttttttctagggagacaaagctttcaagagggggttcccaacagatttcccctgttaaatcaagtttagcctaaagctgcctccttagcatatttaagttcagcctgaaggtttttctgtacattgtgaataataacaagtagaggtgtaaacagatcgtagactacatttgtgccaatcactgagttttggccaagcaaatgtagccaactgttcaaacaatgttcgtgtaacacaaatgctgagctgtaaccaatccagctatttctgtacatcacctccattttctatacattgctttcctttttctgtccataaatcttcttctgccacgtgg

SEQ ID NO: 475994 - DNA, 645 bp, Homo sapiens
tatatccaaaggaaatgatattatttttaaagcctttgctaactggtttggatctgtttcatccaggcatggttgagggattgggggacctcccttgggagatcgatcccctgtcctcctgctctttgttccatgagaaagatccacctacgacctctggccctcagaccaaccagcccaaggaacatctcaccaattttaaatccgaacaccaggatcttgctacaagtgccagaaatctggccaccaggccaaggaatgcctgcagcctgggattcctcctaagccatgtcccatctgtgcgggaccccactggaaatcggactcagctgaagactgacactgccgtatcgcctcagaagcctacaggaccatcacaggtgctctgggtaactctcgcagtggagggtaagtccatccccttcttagtcaatacagaggctacccactccacattacctgcttttcaaggacctgtttcccttgcctccataactgttgtgggtactgacagccaggcttctaaacctcttaaaactgcccaactctggtaccaacttagacaatactcttttaagcactcctttttagttatccccacctacccatttgccttattaggctgagacactttaactaaattat

SEQ ID NO: 475995 - DNA, 964 bp, Homo sapiens
ttcaggacctgtgttgtctgaggaagctgcattgtctggggccatgggtcctgcagggttatttccttcatttctggtaccaggttggagggtgacaggcaaacaagaaatgattagcatgaagctcattattttctgttgtctgaaccatagtcaaaaatttaagtttctagacagtggaaatatagacacaacatttagtttgcatcacttaatgagggggatacattctgagaaatatgtcattaggcaatttcatcattatgcaaatatcacagagtgtacttacacaaatctaaatggtatagcctactacacaactaggctatatgaaagaaaaggagtgatgcagaaaattctgggtcaagaaggttcttgggcagaactctcccagaagtgtcgttcccttaaaacaatttggttatttgaaaaattaaatggtagtgtctttgagctctaaaattctttcctcagcttggtctattctgctgttaatacttttgattatatttgagattcttgtaaatttttcagctcaaaatttcagtttgggtctttcttaaaatggctgtttgatctttcagctcttgaatgattttacttcatttcttggcttcattgaattgagtttcaactttcttatggatcttaatgagcttccttgttatccagatcctgaattccatgtctgtcatttcagacattttagactggttaagaaccattgctggggagctggtaggctcattggaggaaaggggacactctggcttttgaattgccagttcttgtgctgattctttatcatctaggagggttggtgtccctttaactgtggtataaattaaggacagtcagttggctttatttctggaagtttcagaggtccaaggctctgtacagggtctttgtgattgaattcttgtccttggttgtgcagtggggagaatcagtgttgtagttc

SEQ ID NO: 475996 - DNA, 509 bp, Homo sapiens
atagaaggagaaggagaaggaggatgaggaggaggaggaggagaagaagaagacaaaaagaaggagaagaagaaaaggaagaagaagaagtagaagaagaagaagaggaggaggaggagaaggaggaggaggagaaggaggaggaggaggaggaggaggagaaggaagaagaagaagaagaagaagaagaagaagaacaagaagaagaagaagaagaagaagaagaagaagaagaaaagaaggaggaggaggagaaggaggaagaggaggaggaggaaaaggatggggggagaatgaggaagaagaagagaaaaagaaggagaagaagaagaggaaggagaagaagaaaagataatatggtttggctgtccccacccaaatcttaccgtcagttgtaataatcccatgtgttgagagcatggccaggtgaagatagttgaatcatgggtgcagatttccccatactgttcttgtgttatatggataatttatatccatgagaacagact

SEQ ID NO: 475997 - DNA, 818 bp, Homo sapiens
ttcaaagaactaggaacgtggattcattgagggttgggtttttttcctagatgagtcaatggaaagaaaacaggcaaaggagttggcacaaaatcttccagatcttaaacttacagcctccggactggaaaaatcaatttctattgtgtgtaagataccaagtttgtggtattttgttacagcagcctaaacggactaagatagatccatgcacttgttcttttaaaaatgggctactaaaagaatatggtgtccaaggtgatgcaatttcaactcccttcctgaatgacagcagtcctcaagaagacatgcacatgattttgtgggagcctctagcagttcagaatggccctcagttgacttcctgcaaggaaacgggggcctcagcctacaatctacagcagcaagagactgaattctgccaacagcccgaaggagcaggaaacagattctctctgggagtcccaaaaagagaattcagccctcctaacacgttgattttagcccagtgagatctgtggcagatttctgaccaacagaactataagataataaatatgtgatgttttaagctactagatttgaggcaatctgttagaaatagaaaactaatacattctggtttctgaatcatagtcaatatacttgataggttttctgattttatgcttcttgtcttttatttttatttgatactcctctctccccttaacagtttcttaggaagcagcatcagcatttccttacaagagcgggttatacattcagattttctgggcttcaatcgtatgtgatcttggacaagttatttacatacc

SEQ ID NO: 475998 - DNA, 1201 bp, Homo sapiens
tctgatggttttgtgaagaggagtttcttcgcacaagttctctctctttgcctgctgccatctgcataagctgtgacttgctcctccttgccttctgccatgatcgtgaggcctccccagccatgtggaactgaggacaatgatttcatgagccattcccagggctctgctgccctgcacaaccttgggacatggctccctgcgttccagacattccagctccagctacggttccaaggggcccaggtacagctcaggtcactgcttcaaaagatgcaagccataagccttggtggttcccgtgtggtgtccactgacagcttgtacctcatgcctggaaaagcctcaaccactcaacaccagctcttgaaagcacccttaggtggggaaccctgcaaaaccacagggcagtttcccaaggctctgggagcccacctcttgcatcagtgtgccctggataagagacatggagttaaaagagattattttggaactttaaaatttaatgactgccctgctgggtttcacacttgtaagcgctttgttttgataaatttctcttttttggaatgggagtatttacccaatgcctatatccccatttcatcttggaagtaactagttttttattttacaaactcataggtagaaaggacttgccttgtctcagataagactttgggctttggacttttgagttaatgctggaatgaggtacaccaatcagaggtagattttatcttttcccatggtcccatatttcttggagtctttgttcatttctttttactcttttttctctaaacttctcttctcacttcatttcattcatttggtcttcaatcactgataccctttcttccagttgattgaatcagctactgaagcttgtgcatgtgtcacgtagttcttgtgccatggttttcagctccatcaggtcatttaaggtcttctctatgctgtttattctagttagccatttgtctaatctttttccaaggtttttagcttctttgtgatgggtttgaacatcctcctttagcacagaaaagtttgttattaccgaccgtctgaagacttcttctctcaactcatcaaagtcattctctgtccagctttgttctgttgctgttgaggagctgcattcctttggaggagaagaggtgctctgattttcagaattttcaccttttctgctctc

SEQ ID NO: 475999 - DNA, 1223 bp, Homo sapiens
gcagcatgacctggatgaagaatattttgttgtccagatgagaagcaaatgtgtggaataatcgggttatttctccagagagtagaatgggtccttatgtagttagtgaagtgtctgagctggcgtctgcatatctgggccacaagaggcttaggcaagatttggaaggtggaagtgatgtagcaacatcttccctttttatacctgcaagctcagggaagaacatgaggcactgctgcctcacacacagtgttgctcatttgccagctggcctggatggcatggaggagcagctaggccagcctccacagcacctacagtccctgctgggtcatccttcagcttcctggactcctgggggagacattgacaagagtttcagcccatccttttgggttacaggtcatcagcgccttgcttcctccatttcacatccatttgcccttcccaaatgcctgccctgcagactccagggtacagcttcagtataatactattaatagctgtgggtctgtcatatatgatttctattgtgctgagatatgctcattctatacctatttttatgagggtttttatcacgaaggaatgttgaattttattaaatgttttgtcagcatcaattgaaatgatcatatggtttttgtcttttattctgttgatatgatgtatcacattggttggattgtgtgggaattgaacaatgagaacacatggacacaggaaggggaacatcatggacacaggaaggactgttgtggagtggggggaggggggagagatagcattgggagacatacctaatgctagatgacgagttagtgggtgcagcgcaccagcatggcacatgtatacatatgtaactaacctgcacattgtgcacatgtatgctaaaacttaaagtataataataataataataaaaacctgcacatgtaccccttgaacctaaaagttggaaagaaaaagtgtttaaaaataaaaattaaaaaaaaaaagaataataatagctttggtgggtagggtattcttgatggcaactttttttttccttcagcactttgaatctatcacctcactccctcctgccctgtaatatctctgatatagtttgaatgtgtgttgccaccctaatcccgtattaaaatatactccccaatattgaggatgggacctggtggaaggtaattggatcacgggtttggatttctcttgaatggttt

SEQ ID NO: 476000 - DNA, 1270 bp, Homo sapiens
agattatatcctgcacctggctcggagagccctatgccaacagaggctcgctcattgctagcacagcagtctgaaatcaaactgcaaggcagcagtgaggctgggggaggggcacccaccattgctgaggcttgagtaggtaaacaaagcagcctggaagctcgaactcagtggagcccaccacagctcaaggaggcctgcctgcctctgtaggctccacctctgggggcagggcacagacaaacaaaaggcagcagtaacctctgcagacttaaatgtctgtctctgacagctttgaagagagtagcggttctcccagcacacagcttgagatctgagaatgggcagactgcctcctcaagtgggtccctgacccccgagtagcctaactgggagacactgcccagtaggggcagactgacacttcacacgactgggtactcctctgacacaaaacttccagaggaatgatcaggcagcagcatttgcggttcaccaatatctgctgtactgcagccaccgctgctgatactgaggcaaatagggtctggagtggacttccagcaaactccaacagacctgcagctgaaggtcctgaccgttagaaggaaatctaagaaacagaaaggacatccacaccaacaacccatctgtacgtcaccatcttcaaagaccaaaggtagagaaaaccacaaagatggggaaaaaacagagcagaaaaaccagaaactctaaaaatcagagtgcctctcctcctgcaaaggaacgcagctcctcagcagcaatggaacaaagctggatggagaatgactttgaggagttgagagaagaaggtttcagaagaccaaactactctgagctaaaggaggaagttcaaaccaatgacaaagaagttaaaaaccttgaaaaaaaattagacgaatggctaactagaataaccgatgcagagaagaaatacagagaacgccacaaagataatcctcgagaagagcaactccaaaaacacataattgtcagattcaccaaagttgaaatgaaggaaaaaatgttaagggcatccagagagaaggaagagagtgaaggccaatattcaacattcttaaagaaaagaattttcaacccagaatttcatatacagccaaactaagcttcataagtgaaggagaaataaaataatttgcagacaagcaaatgctgacagattttggcacaaccaagcctgccctaaaagagctcctgaaggaagcactaaacatggaaagaaacaacc

SEQ ID NO: 476001 - DNA, 1081 bp, Homo sapiens
tcttcacagcagccactccagatgggtcactgctgccatcaccaggagttcaagaccagcctgggcaacacaaactttactggggcctgctgggctcacccttcccgctcagcctggcaggctgcactcaggctgcactaccagcctggatcttgcacctgccgcagctttgaactggtctggtgtgccacgactggcttccgccttgcttgccagtgtccggacaagggggatgtggcattgcccaaaaactcagagatgtcagcaactgtggagccccaagtggtgttacaggttttgctcagggagtcccaaggtctgagcccccagggagctttagagttcagacccccaggaagtggcaacaacagcagttggaacctgaggaaaaaagttacaacagctgatgaagaagttgaagaaagaggtattacttcaggccttctcaaaggggacataaagctgaaaacagttgaggaagagaaaggtgagaaagaaaaagaaaaagatgatgaagaaaagcccaagattgaagatatggcttcagatgaagaggatgacagtggtgggaattgaacaatgagatcacatggacacaggaaggggaatatcacacgctggggactgtggtggggtggggggaggggggagggatagcattgggagatatacctaatgctagatgacgagttagtgggtgcagcgcaccagcatggcacatgtatacgtatgtaactaacctgcacaatgtgcacatgtaccctaaaacttaaagtataataaaaaaaaaagaaaaagaattagaaaataaaataaaataaaataaaataactccttaggtgatgaaagtaagatgtgtttttggttaagggaaaaaaagtttcttatgtatcctcaaaagtttctttatttagatctatatttaataaagtttctttatttagatctatattttaccacgtgtgaaaatatttttaagtttgtttatgcctgtacaagcatatacaaatacacatgcttgttttcactccattttacacaaaagtaatatttatatgtatattataagctaaatgtttga

SEQ ID NO: 476002 - DNA, 1471 bp, Homo sapiens
tggctttgtttacactgtgagaggaaaaccacctactcaagcctcggtaatgatggatgcacctgcccccaccaagctcaaatgtctcaggtcaacttcagactgctgtgctggctgcgagaatttcaagccggtggatcttagcttgctgggctctgtggggatgggatttgctgagccagaccacttggctccctggcttcaaccccctttccagggaatctcctggtctgtgggttgtgaagactgtgtgaaaagcatagcatctaggccagaatgcactgtccctcacagcacaatccctcatggcaccgtccctcatggcttcccttggctaggggagggagtttcccaaccccctgtgcttcccagcttgccgtccgtgggctgtacccactgtctaaccagtcctaatgaaatgagccaggtacctcagttggatgcagaaatcacctgccttctgcgttgatctcactgggagctgcagaccagagctcatcctattcagccatcttgccagccacctgaatcccaatcttttaaacaacaaaataacctgttatgtaataaatatatttgagaaacttgtacaatattctaatttgttagtgtgtatattactgcctggtgtcacttgctttcagcctgaataacatctgtaagtatttcttgtaagggaagtctgctagcaatgaattatcttagtattgtttaactttgaatatttttatttcactgttctattttaaaggccttttgctttatataagatgtttagttggcattctttttctttcaatgcttagaatatgtcatttcacttcctctggcctgcgttgctttcattgagaagtcagctcttattctcactgacattctctgatatgtgaagcattgtttttctcttgctacttttaagatgttatttttatctttgattttaaacatttttgttatgatttttctgtgtgtggatctctttgcttttaacttgttaagagttcatttatcttcttggttgtatagaccagtgtttttcatcaaattttggaagttttcagccattattcctttaaataatgtttctatccctttctctctctctgtttctggtactcctattaaatgtatgtttgtgtgcttaatgttgctccacaattttctgagttctgttcattgttttcattcatttttttctctcagtttcagcttccataatctctgttgacttacctttaagtttgctgattctttcttctgccagctcaaatctgttgttaggccccactagtaaattactcactttattttacttttcaactcaagaattttcattttgttctttttataatttctatctttttattgctattctctatttatgagacatcatcataccttccttttgctctttaatcaagatcttgtttgtttcttcaaacatatttataacagctgctttgaagtcttc

SEQ ID NO: 476003 - DNA, 1369 bp, Homo sapiens
ttggacatgctgtgttgttcgggccctacacatgctgacacatgctgaattctataaagatacccaaaaatgtggaagcaactttgaaactgggtaacaggcagagattggaacagtgtggaggctcaggagaagaccagaagttgtggcaaagtttggaactacctagagacttgttgaatgattttgaccaaaatgctgatagtgatatggacaatgaagtccagtctgaggtggtcttagatggagatgaggaacttcttgggaactggagcaaagctgactcttgctatgctttagcaaagagactggcagcattttgcccctgccatagagatctgtggaactttggacttgggagagatgactttgggtatgtggtggaagaaatttctaagtggcaaagcattcaagaggaagcagagcataaaagtttggaaaacttgcaggctgacaatgcaatagaaaagaaaaacccattttctgaggagaaattcctgctggctgcagaaatttgcataagtcagcgctgtcttaactaatctaggttttctagtcatctggtgcttccccaggcctcaataggatgagaaacaaatgtgtgattatgtaagaagtcagatgctaggtgtaatatacaggaggaagaggcacaggatttaaagccaggatgacctggatttgaatcctggatctgtgccttgctctctgtgtgactttgggtatgtaacttaatttctcgaaatttcagaatcccagattctgtgttgtgtctacctcacaagttagttgtgagcatcaagttacacaatctgtatggagctgcctagcacataatgaaaaactaataaaattcaaatatttgaggagcaaactttcaaagtcaagaaagtggtttattaaatttatggtaaaaagcatatagaaaagctttgagagcaatccggaggaaatcagattagcataactttcctttttaataatatttattatgcatattccatatagaacatgtttattcagtatgcaagtaaatctttcatttgagcatttggagaatagctgaagaggaaaagaaatactgaataacctaggagaaaaatgggtgtgaatttacatatatatttataattatatatttatatataaacatttagtgaacttatatataattaacatacatatgaaacatgtacatatatgttaattttattgtgatttattatttacaccccatttgcttcccaaatgaattcaaagtggcaagttatattttttctttcccattttgggaatgtttataacatttcaaatttcataactggtagagagctttggattctgattttgccaactgctgatgtatttt

SEQ ID NO: 476004 - DNA, 714 bp, Homo sapiens
tgatgttttgcattagcaaaagttgatgttttgcattaacatagtctatgttttgaaaaatactgtagcacatgaaatgagattacctggtgcatggaaacagcaagttccaattaatcagctcaattcatttaaatcacgtgccagacactgtgcttggtcctgggggctaagacacaggtcctgccttcaagtatatcactctaaaagaggggagaagagggagaagaggatgagaatgaagcctggaaaagcagagagcatgggccttggtgttttctcagtgctcttagtgaacaagtgtgtgggctgtgaagacagcttcctgcctgggcagaggctgtgggagggcagagccccagagagaaggaatgagctaactggacacaagatgatgcagatggtgtgcaggcccgagatgctgtgcctacttctggagttgaaattaaagggaggaaatagctactcagcaaaaatgctgcaaaggtcttagatttaagtctttgatccatatttagttgatttttgtttaaggtttggtcatttaacataatcccaaacttcttggcagctttgttcatttttaaaaattcttttctttttgtcttttttggattgggttaatgcaaaagccttgtcttcacattctgaagtcctattttctgcttattcatttctattgctgagactttccagtgcattgtgcatttctct

SEQ ID NO: 476005 - DNA, 806 bp, Homo sapiens
ccaacagcaaagaccaaaggtagataaatccacgaagatgaggaaaaaccagcacaacaaggctgaaaattctaaaacccagaacacctcttctcctccaaaggatcacaactcctcgccagcaatggaacaaaactggatggagaatgagtttgacaaattgacagaagtaggcttcagaaggtgggtaataacaaactcctgcaagctaaaggagcctgttctaaaccaatgcaaggaagctaagaaacttgataaaaggttagagaagttgctaactagaataaccagtttagagaagaacataaatgacctgatggaactgaaaaacacagcacgagaacatcgtgaagcatacacaaacatcaatagccgaatcaatcaagcggaagaaaggatatcagagattgaagatcaacttaatgaaataaagcatgaagaaaagattagagaaaaaagaatgaaaaggaatgaaaaaagcctccaagaaatatgggactatgtggaaagaccaaacctatgtttgattggtgtacctgaaagtgacagggagaatggaaccaagttggaaatcacacttcaggatattatccaggagaaccccccgcaacctagcaagacaggccaacattcaaattcgggaaatacagagaccactacaaagatactcctcgagaagagcaaccccaagacacataatcatcagattcatcaaggttgaaatgaaggaaagaaaaaatgttaagggcagcaagagagaaaggtcaggttatccacaaagggaaacccatcaaactaacagtgga

SEQ ID NO: 476006 - DNA, 889 bp, Homo sapiens
gcgtatgtggggctctggagtttaagcttcattggattcaggataaatccacttctgcccagaacagaaagggtatctccccatagccactacaagtaggaatgtggtgggtcataactgaaggcaacacagctctgagtctcacgcaagttctgtgggtggactctcccagaagaacactccaaggccaggatttgagtgccagtagggaggaaaaagagaactatgactgtgagattgagaggcactcaggggaaattaagtgcttcaacattccaccccctctgcgttgccacccacatcacagtgctgctgtggggattaggcagaagcgagaagactacaaacctctggctacaagttttcattattcattcatctataatgtgggaggctctgcgaaagtcattggagcttacatgaagataaagaagatctgttctccactctcaacaggagggtcccaatctggtgagaacagaagatctgtcaacaacagcacctattgaaaatgtgagaaggagtatgatatatgtgtcttagtctattttctgctgctataacagaatactacagattggattgaagatgtagccttttttcattcttctgcaagtagccttcaattccttctatccttttgacgaacttttacttaattttggttagatcaatattatattttaatgattggatcatgtaaactttattcaaagctctcttacacctctttttgctctccctggaattatttgttttagtttcaaaatatatacttatcattaatttatacccagactctgtcagttgtttaaatatccttttgatatatttgagcacatctggtatgctatcaattttgtctttctggaaaactctgtactggaag

SEQ ID NO: 476007 - DNA, 522 bp, Homo sapiens
tctcccagcagggagatagactaagtttaattgggaaattgctaatgtcagtattcttaggtctttttcttctagactgttcttatttcccagaagagaatctcctagtattctatctagaggacagaagcatcactgaaaatattctgagatccgactgggaacagggtgatgggtctcaagattcttcaggaccctcagctgcaggtctgttggagtttgctggaggtccactccagaccctgtttgcctgggtatcagcagcgaaggctgcagaacagcggatattggtgaacagcaaatgttgctacctggtcgttcctctggaagttttgtctcagaggagtacccggccatggcatgaactgagcagaggagaggatgcgagggtggaggaagcagctgggcatgctcagcacaggctgctgcgaggaggagccctgggaatgctgcttttaatgccacagcggtgactttgcttagcagaagccttcacagtctatggactgcaggaggaggctc

SEQ ID NO: 476008 - DNA, 494 bp, Homo sapiens
tctccccacaacacaaccaccaacccctgacaggccccggtgtgtgatgctccccttcctgtgtccacgtgttctcattgttcaactccctcttataagtctgctggagtttgctgaaggtccactccagaccctgtttgcctggctgtttgcctcaccagtggaggctgcagaacagcaaagattgctgcctgttccttcctctggaagcttcgtcccagaggggcacttgccagatgccagcgggagctcttctctcaggaaattatggagcctgagaagctgcagacctaggaaatctggtaatgtaattcgttctgagtctgaaggcctgagaaccaggggagccaatggtgtaacttccagtcccagggaagaagatgagatgagatgtcccaactcaagcaatgagtcagaaaacaggggcaaatttctcctttctctgcctctgttctattcaggtcctgaatgaattggatgatgtttactcacat

SEQ ID NO: 476009 - DNA, 540 bp, Homo sapiens
acatagaggaggaatgccatgtaacaacagaggtggagattggagtcatgcaactgcaggccaaggaaccccaaggcttgctggcaaattaccagaagctaggaagaggcaaggaaggattctcacctacaggtttcagagggagcatggcactaccaacaccgtgatttgggacttctgttacatacaagatctatttaattgtcacagcaagtccatgatgagggctgcacaaaagaaggagattcttttcctgctgacaacggatggccaggaagaaagtgtgaattcaacagagaagtttcacagaaatgagctgtgctcagcctttgccataagagggcaaataagcttttctcacttggaggaaacttctttaaaaagtatttactgatctaaatgtctttcaataaggctgttaaataaattgtggtacaacaatctacagtttgaaatatttcagtctttaaaaaaggagaagcatacctatatgtatgcacacagaaaaatagatggttgtttttaaaaaagaaaaaatgc

SEQ ID NO: 476010 - DNA, 581 bp, Homo sapiens
gaactgggtatctcagttggaaatgcagaaatcacctgctttctgcgtcgatttcactgggagctgcataccggagctatctagttgtttgataagtttctggtgcttcccccttctctttctctctctcctgatgccttgtgaagaagctatttgcttctcctttgccttctgccatgattgtgagtttcctgaggtctccccagccatgcagaactcaagagaatgcatggtggtttatgttgaggaaaccagccccacaccacccagcgggtaccccgagtcccggggcgacaaaggagttagaaagagacagaataagcatttaaaaggcgggtccagaggaccggagcatcggaggcttgctcgcggcccagagctctcgggctccccacaatttattggtttacaagctgtttgttcttcgggcagatgggagttgggaggaagggatgaggaaaaggatgaatcagtggaggagaactcgtgagtcattctataagatgtacagcagtggcggcttctgtgaatttccttgagcaaaggcgtgtgtctaaactacttaagatctttaacttatc

SEQ ID NO: 476011 - DNA, 552 bp, Homo sapiens
tatgaagatctgtacttgcctaaggccacatggctgtggagtctcagtggctcctagtggtgctcagcaagaaagctcacacggtgcctcctcatcattcatctcctatcactcagcagcaagcagaagctgcaaacgtagagagcaagctgccaccgatcaccagggaaatcacaaaagtaacttggaaagcaaacgtggcttcttctagcagtatcagattacctgtcatgacaggctttacactttcctacacgccaccaaaaaagatagcttcttacctaattctggaggacacaacttgcatattggataatggctcccctgattcccatgagtttaggccaggtggaaccaagcatcttgaggaatcaattcagcttctccaggacttagtaccgcccacttgggatagtccactgtttctctggatcactgctgttgggttgtcccatttgctgtgatagtggcccagagatttgggaggttcagtttatgtttgccatggaggggttcatctgaatttgtttttgtaagagacttcttattttc

SEQ ID NO: 476012 - DNA, 711 bp, Homo sapiens
cgattggctctctgattctctctcgcctgccgccatgtaagatatgccttttgccttccaccatgattgtgaggcctccccagccacgtggcacttcctgcatactgagtgggggtctggtcgtgctggaagcactgcccttggtggaggattcaccagcagccagagactcaagactgggcagtccgaagaggccaaggaggaacagggaggactgacattctctgcccctctagggacagtgagggctgtagggcttgtagaattattgcatacactatccagattttatattgggctgtgcagtttgaccaacgagccagcagatggcacttataggaaaactcccccttatacatcattgaatcctgtgagactcattcaccaccacaagaacagcacaggaaagacctgccccatgattcaactaccctccatcgggtccctcccacaacacatgggaattcaagatgagatttgggtggaggcacagccaaatcacatcactctccatattgctgtattctgagaaacaatatttagtcgctgaaagatttgattaaaacacaatttgggtcaaataatatccatttattttcgtgggggatttggattataaagttccacagttgttgggttattgattgtgtcactattcctgacacttgctaagctcagttgggatgggttgagataaagcataatagtacc

SEQ ID NO: 476013 - DNA, 927 bp, Homo sapiens
aggattaataggttttgacagctgagattttaagaaggggcacctgccagatgccagcccgagctctcctgtatgacgtgtctgttgacccctgctgggaggtgtctccgggtcgggaggcacgggggtcggggacccatttgaggaggcagtctgtcccttagcagagctccagttctgtgctgggagatccactgctctctttagagccagcaggcaggaatgtttaagtctgctgaagctgcacccacagtcaccccttcccccacagataccctgcccagggaggaggaatctagaaaggcattctggctacagcagctttgtggtgctgcagtggaccccagccagtatgaacttcctcgtggttttgtttacactatgagaggaaaactgcctactcaagcctcagtaatggcagtcgttcctccctccaccaggctcgagcatcccaggtcaacttcagactgctgtgctggcagcgagaatttcaagccagtggatcttagattgcagggctccctaggggtgggatccactgagctagaccacttagttccctggcttcagccacctttccaggggagtgaacggttctgtctcgctggcattccaggcgccagtgaggaaatgcattttcaactgactattggtggtgactttgagtactgggttgaagaaaatgatgaggcaaaggtgcaagccaatgagaaagaatacagtgtctgttgtgggtgtagaaaaaggagagacagcatgaccaccgggcctgcataacaaagtaccacaaagtgggtggcttaaaacaatggaaatttattatctcacaattctggagtctaaaaattcaaaatcaaggtgtcagcaggtccatactctcctctctaatctgtaggatagaatcctcctttgtgtctttcttgcttt

SEQ ID NO: 476014 - DNA, 1206 bp, Homo sapiens
attacccagttccaaagttgtttccacattttcaggcccctcctcaaattcgacatgagaattgggcagagacacagatccaaaccatatcactctgcccctggaccctctatcaaagctcatacttcgttgtccatatcactatcagcattttggtcaaaaccattcaacaagtctctaggaagttccaaactctcccatatctttctgtcttcttctgagccctccaaactcttccaagctctgcccaatactcagttccaaagtcccttccacatcttcagcacttgcattaatctagctgatctggctgctgctgattctcctgtcatctcattggagaaggacaacatcttcaaaggctcaaacatcattcctcagcccataattcctacagttttaccaatggaacagtctattttgaatgcttcttatgaatgttcaggcaactggaccccaactgaataccagagcttccccttcctgcattaaccagtgccccgacattgtaaactatcgcaagaacaaaaaaccaaaggccgcatattctcactcgtaggtgggaattgaacaatgagaacacatggtcacaggaaggggaacatcacactctggggactgttgtggggtcgggggaggggggagggatagcattgggagatatacctaatgctagatgacgagtcaatgggtgcagcgcaccagcatggcacatgtatacatatgtaactaacctgcacattgtgcacatgtaccctaaaacttaaagtataattaataataaataaaataaaattttaaaaaaagaaagtggtggtcgcttaacacatgtttgaattctattatttttattcagtcagattattctttggcttcatttattctctttcattctctaatgctccttcctttgaagatataaaataattattttttcactcctatgatacagttgctcatattttatgagaatgcacattgttagtttattttaaaaagtgcctctattttgtcctaataatgtgataaagtaaggcaaaagaaaaaaaaaaaaaaaacttatagctatagcttggtatagcttcactggatgcaccaactgtggtcccttggtgacacacttttataactttctaattttgtttatggcagttttaatggtgaaacatataatcacaactttctagctctttgggacatcaagtg

SEQ ID NO: 476015 - DNA, 614 bp, Homo sapiens
atcacctcggaagccccatagaccatcacagacgccgagctttggataactctcacagtggaagaattcaggcctgtcctcagaatgctacaagggctctgcgaggatgatggcatgggctggtggttgccccaggcaccctcagtcctgctgctggatcatccgagcttccaagatgatggcgagccccttccaagatggtggtgggctgcttccaagatggtggcaagcctcgtgttctcggacctgggattcttggcttcacagattccaaggaatggaatcttggtccatgtgccatgtgggaacaatggcaagcctttagcccagttgggagtggcaatgggtgccttgctggatcaggagcacagcggacaccctgccagatctggaagaatggaagtcagcggtgggtctgcgatggtggcaaaacagcagtggtgcccagcaagcaaaagctctgctcgagccgtaacgaacacggaccagaagcttgcagttgcaagatttaatagagtgaaatagagtgaaaacagagctcccatacaaggggaggggacccaaagggggttgccattgctggctcaaatgcctgggtttatatcctgatcatt

SEQ ID NO: 476016 - DNA, 1302 bp, Homo sapiens
cacctctctgctgcagctggcatgatgtcacgctgatgcaagaagtgggttcccatggtcttgggcagctccacacctgtggctttgcagggtacagcccttctcctggctgccttcacaggctagatttgagtgtctgcagcttttccaggcattcagtgcaagctgagagtggatctaccattctcacatctggaggatggtggccctcttttcacagctccactagacagtgcctgagtggtgactcttctctgaccagttaccaccaaacatacaacaggatgaccaataagaaaattacatacaaagtgaatcttctcaataattcaaacataccctgctttctttcacacttcattcattcactcaacagactactccagtctgccaataagctctgtaaggttgggcccgagaggtctcctaagcctctgaaagcaaattagacagcattagcagaaaagaatttgacaactagtcttttttggggataattgtctctgttttttaaatcacaaaacttactgcttgaaaactaaagtgtttctccatctgtttatgttattttgtaaattatgtttagctctttatatttgtgataccattaggccactgtcagagtactttcaacactggctaagcagtagatttggcataatagaaaggcatagactatcaagccagactgatatggcctgaatcaaactctaacacttattagctttctgtggtatctccctgagcagcttaataataaacctcaattctttatctgccaattcagagatttctttgtgatttggatccattgctggggagctagtatgatcttttggggtgttatagaaccctgttttttcatattactagaattacttttccgttttctcctcatttgggtggatcacttcctaaaattgttcttaaattcatttttgattgttctgtgttatttttaatttaaatttctttttttctctcttaaagatcagactttaatgtttatttttgcctaattttttatttggtgcttgtgggggtgaagactctttatgagattcttagttattgaaagtcttgtgcactcactttcccaaagctggttgtagcagttatattcttggtgtgtgggtgagttcacagtctcctatggatttggaatgtcagagatctgttgaagtttatgtcattttctcatggtgtacaacttatttatttattaatttttttccaaatgttttatttactcagtttataattcagacttcaggtcaatagggaaagtatctctgattaggc

SEQ ID NO: 476017 - DNA, 529 bp, Homo sapiens
tcacttctgccagtgactaacttaggaatggatggattccatttgtcttacaactcagtggaggcttatcttagtgtggacaacatacttcaatcagccagctttgattctagactgctcctaggtcttggaggaggaccctcaattactgtatctatgcccacaattccatttttgggtgttctggtccatagtgctccgctaggcaggggccacagttggcagatatgccttatgcttacttggtctgccctaatctgctgtccacgtccttcccagggaagcataggtttctgcctgcctgcagagtttaggcagaagtgggaccactgggctggaagcactagcaatgtgacccatctggccacaggaggtggaatgagtgaagtttcctgccctgccatctggtgcttccagtacaaaaggtggctgtgtaccttgacaaattcaggtagaagaaagactgctcagctggaagctctagcaagcataaacttcctggctaccagaggcagaggtaggtgaggtc

SEQ ID NO: 476018 - DNA, 553 bp, Homo sapiens
ctcatttactcatgaccacaaatttaaataaagtctccactgatttcagcctgaatgtaaggcaccttatagtgagcaaaaaccatgaaacatggctaagtctttcacatcaccacccagaaaacctttactacatagcttattggttaagagctcttctccaaagccagactacttcagtccaaatcctggttctggaagaaccagctgtattaattcggaaggttctagacaagaaacactgttctgtggtcagtaaaaaaatgatgttccagttctcaacgagttgttgcacagacagttcaaaattcacctattccgaccttgcttgtgaccctggaacgttttcccctcacaagtcaactcagtgtaaagctctatcagtgaatggtacaatagggatcctggaggaggaaggcatttgcttcccagttctggtgtactcttttggcagtcttccgtaacgcaaggtggccagcagcacagggcaccttcctatggacagcttccccagcacacttttgggcagttttgcagattgacttggcaatgc

SEQ ID NO: 476019 - DNA, 2463 bp, Homo sapiens
ttgctagcagctctggtatgggatggttaggacattctcattgccagtggctcttttgcttatagtaagcacactgattctgactcaggggctggcaatttggggactcttgtctgggcatcccagctgccaatcgtataacaatgttttggctcatgatgctggtgatggtggctgctggtcagaagtggccacacactctacctcatctcagaggacagcccagtgtaaaggcccttataagagagaaagaggagaatttgatatcagccaatacaaacctttctctcagctggctggcctctccactgtcccctataaaggattaagcagaactcagtcccattccagcacatcaggcacaaaatgtctctttgatctttctgccacttttaagaaacatctgcatctttgtaaaaaggcctagcaggatgagccaaacatttgagaatggacatagccacgtgcagggagatagaaaaaattattaggggaactgactctttgttagattcccagagaccagaaagaaggatgacagtgtctggggcttataaacatgaagtaatttctctgagttggacttcagaggtgacccattctatcaagctattaaacaagataaacagaatggtaggactggttttaaggttatccaaacattcacttcacaaataaggaaacttacaaccccaaaagttcatacttgtacattgcccttttctattttttaagatatacatattgcaaatattcatttgcagtctttagtatgtttttgctttcttaactatgtttttcaaagagaaaaataattatgataaagtcaaacttaactttctgtggtctatgtgctttttatattctatttaggaagtctttgcctaccccaactttgcaaatattttctcctttgttttttctagtttgcaattttacatttcattttgcaataatattgaacatatagaaaagttgccaaaatagtacggagagttcctgaagacccttcacagaacttcctttaattttaacattttttgtgatcaagttataattatcaaaagtaagatgacaagattgctaaaatactattaactaaactagagacttgtatttcattagtttttacactaatagaatcccaaaatcccacattgcattcagttgttaagtctcctttgtggaaataaaggaaaatcactcaaatgagaacaagtaaaggttacagcttttttccaggtgctctaagttggaagtaagggaaaaattagagaagctgtcagttatatgattctggctttttagggctcatttctataggggttattgtttggctgcccggattgttagctataaataatagtttgagttcctgaactggttactgaaggtaatgagttggcttcctggactggtggctgcagattgtgggtcagagttctatttttaaacatggtatggccattgtctgtattttcagcctcttatctttgtctcctccaatgagtaacagtgccagtcttctttatgctttatgacattggcaattttgatgacaactcctcagttactctgtagaatgtccttcatttgtgtttatctaacattatttcatgattaaattgaagctatgaatttttggcaagaataataaatgagatttccttctcagtgcaatataccaaggagtacatgatatcaatatgtcttattacttgtgatgttaactatgatcatttggttaaggaggtgtttgttggatctgtcagtgaaaagttgttatttttctctacatagaatgataggaaaaactgatgtcagtagcaaaatttccatctgtttggctatgtgaggtctgttagctcacaacctctcccgatggactcatcttcatatcctaaaatgtaaatttgaaattcattattaacatttaaatacttctttaaagtttgggataccaaaaattatttccaacacatggcaaatgtttcttatggtagctaatctcagggcctcagtggatctacatgttctttcctcttaataatttgcatgttgacaagaatatattggaccacctcatggtatttaaaacattctgtcccaaaccacaatagaaaacaaatatcaaatcttcttaaaagttttagggctgttaaaagattgtaaagagtaaaaatagaaaactatagtcaatacctactttacattctctgatatcactctctgaattttaaccacaggactttccacagtcgtaagttgtttatgtgtgtgtgtgtctgtgtatgtgtgtgtgtgtctgcatgtacgtgtgtgtcagagagagagttccattgttgttgctgctgttgttgtttttggttcattactatttcttcgtcaagtctgtaaactattaaaggtcaaggggcaaatcggttaggctgacaatgggagcctaaaatctatttgttgaac

SEQ ID NO: 476020 - DNA, 684 bp, Homo sapiens
agctagttgaaactatacattatggttaactatagtgaccctactgttagtttcatagttcaggtcttacagttaagtctccaatccattttgatttttgtatatgatgagagatacgagtctagttttattcttcttgcatgtggatatccaatcttcccagaactatttactgaaaagactatcctttccccaaaactgacttacctgatgcttacttcagtgatgtccttttttggttgtcggaagctctaccctcttcttccacgtgtgtatgaaaatgctccatcagaagtacacacagacacactgacatacacacttccggatataaaaagaataacagcatttattgaaaagactttcctttcgacattgtctgttcttggcacctttgtcaaaaatcacttgatcataaatgtgcagatgtatttctaggctctctattctgttccattggtttgtgtgtctgttttatacaaacatgctgttttgattactacagttttgtagtatattttaaagtcaggttctgtttactcgtctttttctagttccttgaaatgtgaagctaagttgtttatctgagatctttttactttgatgggggcagtgattgctgtaaccttccctcttaaaactgcttttttttgcatcttgtaaggttttgtatattttttgtgc

SEQ ID NO: 476021 - DNA, 1763 bp, Homo sapiens
ttgtgaaggtatttttctacagtctacagctcccagtgtgagtgacacagaagacaggtgatttccacatttccaactgaggtaccaggttcatctcactggggagtgtcagaaactgggtgaaggacagtgggtgcagcacaaagagcatgagccgaagcagggtgaggcatcgcctcacccaggaagtgcaaggggtcaggtaattccctttcctagtcaaagaaaggggtgacagacggcacctggaaaattgggtcactcccacgctaatactgcgcttttccaacggtcttagcaaatggcacaccaggagattatatcccgcacatggcttggagggtcctatgcccacggagcctcactcattgctagcacagcagtctgagatcaaactgcaaggcagctgcgaggccgggggaggggcgcccgccattgccaaggcttgagtaggtaaacgaagtggccaggaagctcgaactggatggagcccactgcagctcaaggaggcctgtctgcttctgtagactccacctctgggggcagggcatagccaaacaaaaggtagcagaaacctctgcagacttaaatgtccctgtctgacagcttggaagacagtagtggttctcccagcatgtagctggagatctgagaacggacagactgcctcctcaagtgggtccctcacccccgagtagcctaactgggaggcacccccagtggggggagactgacacctcacaaggctgggtactcctctgagacaaaacttccagaggaacgatcaggcagcaacagttgctgttcaccaatatccactgttctgcagcctctgctgctgatacccaggcaaacagggtctggagtggacctccaacaaactccaacagacctgcagctgaaggtcctgactgttagaaggaaaattaacaaggagaaaggacatccacaccaaaaccccatctgtacatcaccatcatcaaagaccaaaggtagataaaaccacaaagatggggaaaaaacagagcagaaaaactggaaactaaaaatcagagcacctctcatcttccaaaggaacacagctcctcaccagcaatggaacaaagctggacacagaatgactttgacgagcacttgttcatgaagaaaatcacactaataattggagccttgcaattttcagtagtgaattgtaaatacttgacactcagggattcatattgtgaaagcatattaacctataaaaaggaaactgcgatgtcagttaataagacctcccaccctcatcctccatttgaagaagaagaaacaaaggttaattgcccaataaattctaaaaaactaaggccttcagtaatactacaaattctcaaatttggtgtgaaacgggattttcatgtttttacccaacttaacctaacctttaacacttttcctatttgtgcatctgttgcttcactgaaacttttcaaaattggcatcaataaaagaatctttttctccaataatctctcagtaaagatagattgacaaaaatctggatatactgaacatgaatatgtgagggagcttcatgttttattgaacttgaatgtgtgaggaagattcatatccatgaagtcgtcattaaacacaatattgttagtatttattacggtgacagattgctatggtttgaatgtgtccccttcaaaatacacatgttcaaacttaatggacaatgtaatagtattaacaagtaaggtctttaagaaatgatgatt

SEQ ID NO: 476022 - DNA, 455 bp, Homo sapiens
gtgcaaactctagcaccattatcttggcttatgtttctggcaatggcatactccctgctgttgaggtccactaggttctacagcattggcaaatctttagaaggcttagaattttctctttttagttatggaataattgccataaacaacaatgtaggcttaggtttggctgatgccagggttcagacaaaggaatgtgctagtggcaatggcctgtataccgttttcttaatttcattccctgccatcaacccaactcctcagcaaattgagaagactggatctgatcccatgttcactgaatcagatcatgttcttaaatattactcatattacaaagattgtgtttccaggggaaccatacaacactttaacatggggggaaaagagaaaaagggcagaaaaaagaaaaatggagactaataacttagtggataggaaaatattttcatggt

SEQ ID NO: 476023 - DNA, 1012 bp, Homo sapiens
cttttatcactttcccttctcagaagtcgggcctgtcctcggaatgctacaggagcccatgttctttccactcttccatactacttttatagacataccaacattctgcgttaaatctgtaaaagaactcagaaagcatacaatcaaaatcctcatgttaatcatgagaaacctggaatccagaccaggtactcaaagggacatggaccccaagtccaataacaatgtggttttgcagactcataaaggtacttctttggtggtcctggataagttgcagaattctctaaattacaaagcagagactcttgtctttttcttactttctcccaaagggagtctctacctctatgctgagttgcctggaactgggagtgtggtgatgcaagcacccctgtggccaccaccactggaactgtgctggatcagacctgaacccagcatagaactctgtcttgcccagggctcactgtaatcactacttggttactatctatgttcactcaaggacctatggctctatgatcagcaggaggtggtaaagccaaacaggtttgtgtccttccctttagggctgtacaccagtgaaatgtagatttggtcttttcacatagtgccatatttcttggaggctttgttcatttcttttcacccttttttctctaatcttgtcttctcactttatttcattaatttgatcttcaatcgctggtatcctttcttccacttcatcaaattggctattgaagcttgtgtatgcttcacgaagttcccatactgtggttttcagctccatcaggtcatttaagctcttctctacactgactattctagttagccattcatctaaccttttttcaaggcttttagcttccttgtgatgggttagaacatgctcctttagctcacagaagttttttattaccaccttctgaagcctacttctgtcaactcgtcaaactcattctctgtccagttttgtttcattgctggtgaggagttgtgatccttt

SEQ ID NO: 476024 - DNA, 520 bp, Homo sapiens
gaatcagcctcctggaacacagagcaggatggatcagggtggaagtggatctgaaatgttactgctctacacagtgtacgtacctttatgtgtaaatacagatttcaaaatctctacagatgtaccctgggtcagagaggtttttagcagatccagaaaatgcgtggtcttggtttctcacaaaaagaatatctatgagataatgataaagagaaaaaagttaatcaagtggaagaatttgcagagggatattaggttcagaaataaattatttcaacatgtgaggtttttactgggctgccaaagaaaatctatggaaaagggtgctccttgcagattgaacaatggcaagagcacacttcaacaaagggacccaaatgtgtatcccttacacatttgggtcatcctcattgctgtgtcctgcatccattggctggagctggacctcacagtcttaagctgatacccaattttctaataacctaaaactttcctaaatagaaaaacaatagtatcacaa

SEQ ID NO: 476025 - DNA, 636 bp, Homo sapiens
atcacctcggaagccccgtagaccaccacggacgccgagctttgggtaactctcacagtggaagcctagccctcatgtctgcctgcagcggctgccgctgctttaatacttttagaggcctttcctacaagaagtcagacctgtcctcagaatgctacaagatgttagcctccaaacggtttgaagaaattgcaaggttgaaggaaactacagtgaaagttccaattcagttagaaggaaaaacaatgaagtgtagaggaaagaatatagcaaatatttcaaaagaagaacattttcttccaagcttggtagccaaagctaactttgctccagagatctcagagacatgtgacctgtggcctgtgaaagatttatattacttacacttttgcaggttgtttgaaaaagtttcagtgcaatgtcaatcctgctatgtaaccataggaaaagttgttagagatgatacaagttttctctaaaccttctttgaagaggataacaatagtacctccctaaaaagtttgttgtgaggattaagtgaaataatctctgaaaatgcttaatatagtgccaggcagttaataaacagcaaatactacttctgattattgtaatcatcattattgttatgtcatc

SEQ ID NO: 476026 - DNA, 593 bp, Homo sapiens
tctgtaggtgtccaaggtgttgatgggtgttcctgggatcatcttcatctctaactgatgaagatgagtcaagtcctggtgaaatactatgaagtatttgtctgtaacttttgtttctgcgggctgtacaggaagcatggccggggaggcctcaagaaacttgcaatcatggcagaaggtgaagggaagccagcacatcttatgtggctagagcaggaggaagagagatggggggaggagtggctttacatggtgaggaaatcaaattgtcaagggtctttggtggtgaccactgcctgtctgcccctttgctcttctctctttttccacactggtcaccacctggtgttcccaataaagtttgtgatggagactttcaatcagtatattctagacacaagtccttatcattctgattgctgggtctcctcaagttccctggatcttgttgccatagctgcatctctcttggccacatgggagaagcatcctgctgtttcaaatgccatgacatgctgggtagcctgaggatttagtgatacttttctaggttcatctacaaaggaggatacctacaggtctttctaatctat

SEQ ID NO: 476027 - DNA, 753 bp, Homo sapiens
agactccaggggatgtatcagaaagcctgggtgcccagacagaagcctgccacaggggcagagtccccacagagaaactctgctagggtaatgttaaggggaaatgtgggggtggaacccccacacagagtccccaccagggaactgcctagtggaactgtgggaagggggctgccgtacaccagacctcagaatggtagagccactggcagcttgtatccaaagcctggaaaagctgcaggtactcagctccatcagagtagttgtaggtggctgcactctgcaaagtcacaaggtcagagctgcccaaagccttgggagcccattccttgcaccaatgtgcctggatgtgagacatggagtcaaaggagattattatggagctttaagatgcagtgtattccctgtggcattttagacttgtgtggggccagttgcttctttcttttggctgatttctctcatttggaatgagaatgtttatacaatgtctgtacctctattttgtcttgaaagtaaataacttgttttgattttacaggctcgtaggtggaaggagattgtccttgaatctcagtcttcaaaatccagagtgtattttatacttaacagtacatcacatttcatactcagacactttcactggaaatacttcatctgcatttggttctcacaaaatttacagttgaaaaagtaggttcatatacttacattgttccaagtatacttaaaagtcttccaataaattcatga

SEQ ID NO: 476028 - DNA, 897 bp, Homo sapiens
aggcagggctctctgctcctcctgtttgacagacagctgcatcttctcttgcattgccaaccacatccctgagacaccatggggaaagtgaaggttggagtcaatggatttggttgtattgggcgcctggtcatcagggctgcttgtaattctggtaaagtagatattatcgccatcaatgacccattcattgacctcagctacatggtctacatgttccagtatgatcccacccatggtaaattccatggcaccgtcaaggctgagaacgggaagcttgtcatcaatggaaatcccatcactatcttccaggagccagatccctccaaaatcaagtggggtgatgctggcactgagtatgtcatggagtccactggcatcttcaccaccatggagaatgctggggctcacttgcagtggggagccaaaagggtcatcatctctgccccctctgctgatccccccatgttcacgatggaacatcatccctgccactactgggctgccaaggctgtgaggaaggtcatccctgagctgaatggtaagctcactggcatggccctccgtgtccccactgccaacgtgtcagtggtggacctcacctaccatctggaaaaacctgccaaatatgatgacatcaagaaggtggtgaagcaggcatcagagggccccctcaaaggcatcctgggctacactgggcaccaggtggtctcctccgacttcaacagtgacacccactcttccaccttcaatgctggggctggcactgccctcaacgaccactttgtcaagctcatttcctggtatgacaatgaatttggctacaacaacagggtggtggacctcatggcccacatggcctccaaggagtaagacccctggaccaccagcctcagc

SEQ ID NO: 476029 - DNA, 1457 bp, Homo sapiens
acatcaaaaagactgaaagacggggaggagccaagatggccaaataggaacagctcctgtctacagctcccagcatgagcgacgcagaagacaggtgatttctgcatttccatctgaggtaccgggttcatctcattagggagtgccagacagtgggcgcaggtcagtgggtgcacgcaccgtgcatgagcagaagcagggtgaggcattgcctcactagggaagcacagagggtcaggaagatccctttcctagtcaaagaagggggtgacagacagcgcctggaaaattgggtcactcccaccagaatactgcgcttttccaacgggcttaaaaaaacggtgcaccaggagattatatcccacacctggctcggagggtcctatgcccatggagtcttgctgattgctagctcagcagtctgagatcaaactgcaaggcggcagccaggctgggggaggggcacctgccattgcccaggcttgcttaggtaaacaaagcagctgggaagcttgaactgggtggagcccaccacagctcaaggaggcctgcctgcctctgcaggctccacctctgggggcagggcacagacaaacaaaaagacagcagtaacctctgcagacttaaatgtccctgtctgacagctttgaagagagcagtggtcctcccagcatgcagctggagatctgagaacaggcagactgcctcctcaagtgggttgctgacccctgatccccaagtagcctaactgggaggcaccccgcagcaggggcagactgacacctcacagggccgggcactccaacagacctgcagctgagggtcctgtctgttagaaggaaaactaacaaacagaaacgacatccacaccaaaaacccatctgtacatcaccatcatcaaaaaccaaaagtagataaaaccacaaagatggggaaaaaacagagcagaaaaactggaaactctaaaaggctcgagaactacgtgaagaatgcagaagcctcaggagccgatgagatcaaatggaagaaaggaccaaatctacgtctgattggtgtacctgaaagtgacggaatgaatggaaccaagttggaaaacactctgcaggatattatgcaggagaacttccccaatctagcaaggcaggccaacattcagattcaggaaatacagagaacgccacaaagatactcctcgagaagagcaactccaagacacataattgtcagattcaccaaagttgaaatgaaggaaaaaatgttaagggaagccagagagaaagttcagaaactctacaagccagaagagagttggggtcaatattcagcatgcttcaagaaaagaattttcaacccagaacttcatatccagccaaactaagcttcataagtgaaggagaaataaaatactttatagacaagcaaatgctgagagattttgtcaccaccaggcctgccct

SEQ ID NO: 476030 - DNA, 993 bp, Homo sapiens
accacatgaagatatctgtgaagagtctgatattgatgacagcatgagcttcaacacttgctccaccttctccacctgctccaccttctccaccaactaccagtccctggggcgcctggacagtcagcgcgtggccagcatctatgcaggtgctgggggctctggttcccagatctccctgtcccactccaccagcttacagggtggcatggggtccagaggcctgtccacagggatggccgggggtctggcaggaatgggaggcatccagaatgagaaggagaccatgcaaagcctgaacgacctcctggcctcctacctggacagaatcgacaatgcccgtcttgctgctgatgacttgagagtcaagtatgagacagagctggccatgtgccagtctgtggagagcgacatccgcctcaaggaggagctgctcttcatgaagaagaaccatgaagaggaagtaaaaggcgtacaagcccagattgccagctctgggttgactgtggaggtagatgcccccaaatctcaggacctcaccaagatcatggcagaaaactgggcccaatatggcaagctggctcggaagaaccgagaggagctggacaagtactggtctcagcagattcagaagagcaccacagtggtcaccacgcagcttgccgaggccatcttggagaacagcctgagggagatggaggcccactacaccctgcagatggagcagctcaacaggatccggccgcacctggagtcagagctggcacagacccaggcagaaggacagggccaggcccaggagtatgaggccctgcagaacatcaaggtcaagctggaggctgagatcaccacctaccaccgcctgctggaagatggtgaggacttcaatcttggtgatgccctggacagcagtaactccatgcaaaccatccaaaagaccaccacctgccagatagtggatggcaaagtggtgtctgaaaacgagcaatgaca

SEQ ID NO: 476031 - DNA, 758 bp, Homo sapiens
cctggatgagccaatgctgacggtgcaccagacggtgagcgatgtgcgaggcaacttctaccaggagaagacggtgttcctgcgctgtactgtcaactccaacccgcctgcccgcttcatctggaagcggggttccgataccctatcccacagccaggacaatggggttgacatctatgagcccctctacactcagactggagaaaccaaggcctggtacttgccagtgtgcacaagggcaacctcagacccagagaatcccatgatgaggcactgccaaggctatggagagtgtagcatccaccccaggctcaggacccctggggctaaatggctctggtgctgggtgaatgagtatgcgggatccctggagactcaagcaggcacctcaccccagtggtccactgctgcccagggggagaccaaggtcctgaagctgaagaacctgcggccccaggactatgccagctacacctgccaggtgtctgtgcgtaacgtgtgcggcatcccagacaaggggaggaccttccggctcaccaacaccacgggtacaggcattttcctccccatactccttccctacctgagctaactcccaaccaggagatagtgccccaccccacagggactccaggcacactgccactaatgtctggcccctcccctcctcttcctgctccgtcttctaccctctcatctcccctgagggcttctccagcctctatggttttcctagccccttactctgcccaacatac

SEQ ID NO: 476032 - DNA, 462 bp, Homo sapiens
aaaccagttagagcaatactggggcaatgcctgctcctccaagcaggggaccagtggaaattgagcagaatcctcgtgtcacaacgtgggcaatgacttcagaacatcacttgctggagccatattttttcaagacacatgccagtcactctgctcgtctgaacatactgcaagggtggtctctgcaggagggagaacgtgaggcgaccaccctcctatgccagtactctgctctccctggggctcttctttgcttttgccacaatgtctattttatccttccacctccgttgggactgggatctggtccttcaactcttggttcattgctgtcatcttgttacctgctgaaaactgtatatgatgctgccagcctgcctggattgccaaatatcagctccctgcttattgaacacgccctgacgcctactgcttgcattgacagttcacattagtcaagtg

SEQ ID NO: 476033 - DNA, 680 bp, Homo sapiens
cttaagtttcaatgaagtgtaaatgagaactgacttcacccttgacttttatttttctctccaaggcaaaggtactgggaacccagcctcttgccctggcgttcctctgggattgttaaggttggctaagcaatctgctcttgagaaaccaggtgtagagagacctgggtggagagatccgggggttgtttgtggaactttctcctcctctgtggcatatgccagcgtctctcaggagcaatcctgcaaggttgcctccagagctaggtggtgtcgacctgtctttgttatgcaagttgctgaactcacagtgttccagcggagtgttcctggccagcgcatgaatgaggaaatggatggtcaagagaacacattgtgtccgattggagagtatgttagcatccttgcacagctgtgctgccaaaaagataccttttcagctgccaaaaagctcctttcaggagcaaagcataatcaatagcgtctgcaagcctagttctgcatgttaaaaacaaagcacaatgttagccgcacagagcagctcatgcttctccccacacagagacaataaaggaaagaagaaaggaggaaggaagaaaggaaggagggaagggaagggaagggaagggggaaggaagggagggaaggaagaaggaaaaaaggaaggaagggagggagga

SEQ ID NO: 476034 - DNA, 811 bp, Homo sapiens
tgacagcagctctgctgccgaagcgtcctttgtctagaatggccatgcttctgttgatggatataattaggaggtcaaagccaataccagtaactgaagacaaaccgtttttaaatcatccttcagttttcctactggaccttgaaagatgggtgacatttgactcggtgaagggactagcagaggatatttcagacaaaggagagataggtaccaaagcacagagggaaggacagagcggaatgtggggagctggttctgatgccagcccagtggaggaggagaggccgagggtccaggcagagagaacagcaagtatagaggcgctgtggggattcctgagaccagggcggctggaatggggtgaggcaggaggaggggcaggagaagaaacaggacagacagtaagtgactctgctgtgtcaggtcttgcaggaaatgacaatcattgcaggtttcattctgaggccaacgggcagctcttggaacattttgaagcaggagagggttacctggaaacagactctgagctggcaatgcacaggcagaagccctgttctcccaccagcagaagaacaagagagaagcagggctgggaagagggagaacgtggggtatctcaacacagacccccaactgatcccgccaaagctgtggggttgggaggacccttcagagtttcctccagttgaggcaagagggctggaccttataaaccagcatcaaccagttgctgtctcccaagaggggttatagacttgggctaggcagctccctgtgggagcggatgcctggagagcgacacagctgt

SEQ ID NO: 476035 - DNA, 744 bp, Homo sapiens
agggctgcagtagcgagacgcaaggggacaaataaggttcagtgccatttggcccttgatcaagtgtaaacaatgattttcatgtggaagggctggagcttgggctgcatctgccgtgcacttcattcgctagggctacagtggtcaccagagatttttcttctatcacaggtgattctacccaagaatgattcgaggaaaggggaggtgtgggcaggaaaccaattggggactttcaaagtttatattctgaatgcaacaattacaacaatgttccagaacagaaattgcattctggaatgcaccagttgggaagtgggctggggatacattgatgaacaaggcaccattgtagccttccaacagcttccaggcttgtgggaaagacccacaggtactcaggggaacactggtagggaaactggagtgattttgaacactaaggaagccatcagagaagggaaaaaatattatgtagttggaatcacccaactcgtggccttttcagattgacttctttcacttgtgcatgtacattaaggattgttatgtcttctctgagtattgacttctcaattatcattatcattacataatgtccctctttattcctgataactttctttgcgctgaaatctgttctgttgaaattaatataactactctcactttccctggattagtgttggaatggtaaatctttcttcatccctttacttctaatctacttatgtatttatgttt

SEQ ID NO: 476036 - DNA, 881 bp, Homo sapiens
gtgccacattttcttaatccagtctatcattgatggacatttggatgacgtctgatttcccggagtgccacagtaccggacctgggacgatgaggttccttcacccctccggtagagggcgcactctgcgagcggcttttgcagccagtggcttcctgggcgctttacatcggtggccttgtgggcagtccgctttgtgggagagcaggtctgttaggctctgaaaagcacccgacagctgcccccacatccgccttgcgctgtgggtcagtgtctgtttgaaggagtcactgagtgggcaagccattgttagaaatgcctctccgtgctcaaacagcaacagctgctcctgggcacatcctgggcaccttgcagagcagatgttctctgcttttgcagctcctgggccccgcggctgttctgcaagaaggaactgtggtagtccctgctgaaggcagctgccctaaaagagaaaactgtgaaagaagaagaggaagccacaaaggagagtcagaggagcagcagaacaggcagaagaaccagggattccagggttggaagtttaaagtgagggtcatcagtggtgccaagcattttcacccacaggcaaatattttggcaaccaggagtcacggccgactttcaggagatacaaaccactgccagccccaacacgtgcatcagagaagcagaaccaccgtgagtgatgtgcatttgggatcatctcttatggcaattgggctgtatgcaatcatggaagctgatgaagacatcttggaaggctgtagcctctgtgttcgatagcagggggtctattctaagtcagcaggaccagaaattaagaaaagcaagacatgaatgaagcacaggaaattgaggac

SEQ ID NO: 476037 - DNA, 917 bp, Homo sapiens
tgacatccaggagcccaggcattgattgttgacttcccctgacaccccatcacaacccattagtactgaaaactgacaagcccagctgcagcagcaaaatggcaagtttgaaagaaaatatcgaaagcacaggcaaagcccagctcttagggacccgcacgagacccaaatgcagtgactcctccccgcccccacgacaccttcgcggagatggctgctctggcagaggaggggcccacagagaaatcccagtgctcctaggcttcagggccttcccctggaccttgctccatctgccagggtacaggctgggccccagtcggagagagctcctcagtgacaaccatgcaacctgcagacatgcagatacacattatagaatggcttgcctggtgcatgttccagcacccatcccgagtcagcacttaaacctggaagttgtggcttcagctctgcctttggctctgaaccaacccttttcttcatctgcaggagcctctgagaggacctggccctgcactgtcctcggtgcttctaaaatgacagccttgtgcttctccgtcctgtccccagcatctgcaggactcagccccgctgacaccacccgagtgcctactcgactccctcggatcacttgttctcccctgaccaagagcagccctttgagtttgggctgggtctggatctttggcagaagatttgacagctccaacagcttcctggttttggttcatctttggactcttggccctgtgtgccaagtcctcattcggccatcccgggacttggtttcatgctccgagcccagccctgtgtccacctgcagatgaccagttcagatcgtccgcgttctagcccatttgggccactcttgcatccaatctttctggaaagcattctttggcattatttggttg

SEQ ID NO: 476038 - DNA, 569 bp, Homo sapiens
tgcctcagatggagcagtcaagggcgggacctggtgggaggtgattggatcatgggggcagtttcccccatgctgagtgataagacactctttccttctggccttgaagaagaaagtggctatgagttctacagctgcgaggaaattaatcctggggagcttgaaagcgaattttccccgcgatcatctgagcgttctgcttggcacatagtcaacaacaataaatgtttatcgaatattagcaaattcagggcctctctgagttggtaccaccttacattaattggcactaatgcaagtattcacagctgtgcgtgggatgcttctgagtgcaaaatggatctgtctgtgcctgggaacggttctttcacttcagaaaaagtctgtttatatgctcttgtccctcttctctccctgtcccaggagttctacactctcacctgttattcaatgctagttagccttgtagtagtgggataatgggggggaatattctctgttgttatttaatagaagggaaatcactcttcctttatatttctcatttattgatacaagtgttcctgctt

SEQ ID NO: 476039 - DNA, 467 bp, Homo sapiens
ccttctcaggtccttccttccagttttatgatcaaggggacggtggtggcagctgatgaagccagaagggacagcagacatcaggcaatgcaaggtagttctgtggtggtgtgggtttcacctgacgtgcagtggagtccacagagtgttaataagcagtgcggtgatgtgaacccatgtggagaagggccaatcgggatgcttgtggagggtggaccagggcagcaagatagacatgaaagccagtcaggaggctacaccatcactgggtggaggtggctgatctcagttgaggttgagtgggtgccagtgtggaaagagtgtgggagtcagcgccaggatgatcagctcatccggtctgcccaggaatgttctggttttaaacctaaaagtctgtgccctgggaaaccctttagtctcagccaaattgggacagttggtgactctaggcttgggacaaattagac

SEQ ID NO: 476040 - DNA, 702 bp, Homo sapiens
ttttggaccaattttgaaaatgctgtagggataaacattctcagatgtgctgaacttgggatgatgtgtggatactttaagaggagcaaaaccaaacaaaacaaaatagcggccttttactcagacagtgttccagtcagagatgggcgtgctgtgtatgagggtgaagttcgtggcgaggtttgcacttgtgatgttgtgcaagacagcctgggtccatccagctgctcccatgaggctgatgggcgctggaggacagggaccatgcgtccctctgcttctgctaaagctcattactgggcagtgctctgcatggtgacagtggacctgcttcaccgtggctacttctatggcaaatcaccactggctcacatttctttattcaaattcacaacgctaccggtgtctgccatttcatttttcttaaattcttcagaattagcagcatcttctttcccttctgcctctggtcctggtcgttcgattcattgattcattaataagcatttgttctacacaaagcgtggccaaggtattatggacaagaagctgtttggttttaaccaagaggtataattaaaaaagagactgtttcaggtatttaccagcggacctgcctgggctgtgaacaggagactcatgaaacatttgtgctgtgctcagaagggctattcaactggaaattcccttcactgttcaact

SEQ ID NO: 476041 - DNA, 851 bp, Homo sapiens
ttgatacaccggggcctcgtgtctgtggcacctcgtcaatggattttccgtcaagtatcaaggactgcaacaaggggatgcctgtgcacgtctgtgtctgatgtatatggacagcagtctactgcccagacacctctgctctacacagggcaattgctctcctccattttattcctgctcttaggagcatgaagggagaatcaactcttggcctcatctagcgtctgtggcggctgacatgccttggcttggggctgcagccctcccatcggtgctccatggtcacacggcctccacgtcttctgtctctggaggagcatgcttttgaccaactccatgaacggttgctcacggtgacccagattttagggtacaggggcatttctcagataaatgcctatgagaattcagagcacctggtcaagggaggagacacagccctaccagcggtcagccatggagagatggttgagggcggcgtggaggggggtgggtgttgtcagttgttgagcacctgtggatggtggcgacctgggacagcttcagcaggaaagagggggtattctgagcaggtgacatttcctgtggtcagggaactgcacagtctgaggcacaaggatggatacaaaggcacagaaatgagcagcctggctgactgtagcccagcaaaggtggctgtgtggcagtgatacagtttttgggcatttcagtgaccatcagtttcccaacttggctattgttcctcccaatcagaaagtgttctgtggctggtttgtcattgcaggccgtggctgctcagaaaatagaaatataaatcggcatctttatttagcctttttccagtggggtag

SEQ ID NO: 476042 - DNA, 1073 bp, Homo sapiens
tcactcaggatgctagttatagcgagtgaaggtgagcacagtcagatgccttcctggggtggaggtggttctaagagcctggggtcggggataggcagcccggtcacaatcctggctctggaagtatggtgctggcatctgcttctggtgaggccacaggaaacttacaatcatggcggaagcaaatgcaacatctattcaaagggtcagaccaacatctctagaggagtcacagcacaggtctatcagagaagggtgccagattccagggacttctctccccaaaattcaagttcagtaggtctggggtgggagcctggaatctgcattttcagcaggtactcagatgcttctgatagagttagcatgtgctcagagccaccttcagaaccactggcctggaagactccatttctgggcagtgaatgggcccatctgtctccctgctggataaagcttgcccgggaaggtaccttaagtcccatatttcaccctccagagagatggcagaagaagctggaggcttctttaacctgtaactcttttctggagaatctgcagaatgggataggtaaataccaggtgacggcaacctttgtgaggggccttgatgcggagttcgggctgaaggagaaatgaaagaggggttaaaagaacatccagcaaagttatgaagaaaagtattataggagtatgctagttatttagttaataaaaacattaatggtgctgttggatttttatgatctgtgttgaatttatcagcttaaattgtgtatataatttgttgagatttcttttctcaataatgtataaaatatacttctacaacaattctatatttataattttgtactctttttcttcaagaggggccctaagattgtaatatcttccagtccactaaggctagatcctttgatagctcttggcttctttatcttaagatctggctgctctttgtggcatccaactaattcttttttatcatattcaagccattttaatatccagtgataaaatgaatattatttgaatatgctgctgactcacagataaatgatggtgttatc

SEQ ID NO: 476043 - DNA, 690 bp, Homo sapiens
gtaccaaagccaccaggctttacctcttaaagatgatctacactgtacttctagcaatttgccaattacagttcaagttctcctacctggttcccgcagggtttctgctaggaggattctgctctgaatggctattgctgactcctggaatgctgtttggaaaagactacggagagagtgattcttcatcagtgattaagcatcttttcatgagagaatttggaagtccacctcatcttttgctagggaggcgagggtcagcacagacaagcatctctcgtttccactcagctcgtgctctgacacaggctctccctcagtgccacaccctatgtctccccgtctctgagcaggcctatgtaggaaggtgcaaagataagttaacaaaggatggtagccctggtcagaggccttcagttaaaccttcttcctgcaggtctctgcacagagtgagaagcaacttgactgggccacacatacagaagagaggaagggagggtggaaaggggtcccatgtagggagaagactataaccatgtgatatgtcttcagaacactggctacccatgtgcttcattgttgagagagctcttggagagctgactgcatggtactgaaatgacctgcttagggaatacatctgttaagtccagtccagggaatacacctgttccctggactggactgtca

SEQ ID NO: 476044 - DNA, 1317 bp, Homo sapiens
cccagagcagtgggaggtgactttgaaagacggcacagacagcctagggaccctggcagaaatgtggcatatgggtggagccgctgcagagagtccacactagggcaatgcctagtaaagccatgggagtggagccatccccaagaccccagaactgtaaagccaccagtgtgcaatgccagcctgagagagatgcaggcatgagactccggtctgtgacagctgctgagtgggctgagcaaaatcataaagaacatatatgtggaatcagcacacaaaactggcaagagcactggttccgctgcagaaattacacacaagaggagctctttctgtgtgctttcatgcatcagtctagagccagttcttcctcattcacattgaaacgtcagagatcaataagcactggaggagagttttcccctatcaacagaaagacaggactgactcacccaggagaacaattgttcttgttcccctccctggtatctcattattcactacaggaaagaagaccaaaaatgtaagcatacttgaacatacatttttcaagataatgagtgtctcaaatgattatttaaattccaaagagaactatttacaagttaatttctgttccagttattttccttagtaatcatttattgcacatcaatagaattcctcttcccaccctcccatagcctgttctgccaggatccaagccttcattctttctgtaacctcaagatgaagaaaatctgtagtcggtgttgagcacaccttttgcattttcatattttcaaagatcacaaccagactgcctgaaaatgattgtttcatacatcttgttcagttttgtagaattttttaaatgtagatccagtatttcctgtaagctttgcactctaattgcatttagaaaattaagctaaaaacattgtaactgagtaatttctgatgtcagattgacaaaactgtaaaggcttatggcttatggtacacagttctacacatccaacagcctgattgggttcattgcctaagtcaccctagtttcttccaaaatcattaaaaaataccaagcaaccctgcaatataactgaagctttaaagagaggaagccgtcctcaattcagaagcaataaaaggtcagtcagcttcatggctgtctgctttacaatttttttagtgactgaaaaatatcggctttctctctttttgtcttcctttttcttgcatacatgccatacatagccttagatgctacaatctcagcaaataggtttttatctaaatccatattttttcagtgtttataggaaggtagaaatgaaa

SEQ ID NO: 476045 - DNA, 654 bp, Homo sapiens
tgagaaatgtttctttttttccttacccagacttaggtattctattatagtagcacaaatagactgagacaaatgcttcaatagtaattttgatgaattgctggcatgaaagtgagacactcctggggctgcagttttgggtgggaggctttcacaaattcttcacaagcttcaccagatggacaggagggagacaggacaagctcagcttgctcatggccagagaaagagctaagctgctggccctggaggcaggggagagttggccatgcagcttcaggtatgggaatggcaggagccaagataatagccgagataaagaagcacaaggaaagagcaccactcactgtgttggtcaaggaaggcctctagagcccaatgtgtcctgggaactagaatcagttcaccagatttcaggtgcctcaaactcaacaggaagaataattattccctgggctatgcccctaaaaacaaatcctagtgaaaaaacaaataaggacatgtactagataaggtcaccaagggattaaaggaaggtggaggagggaaggtgtcagaaggagagctctgggtctccgacacttaggaatgggaaaggaagaaccgagctgtccacgaatgacttctgcatgggcagcactgtatgtgtagagc

SEQ ID NO: 476046 - DNA, 1298 bp, Homo sapiens
agattatgtcccatctaagttgaagtcatatgggcatgtgcctcctatgtcacagacaaaagtcataaagtctgagaggaaagtgatccaaaccgaatacgtaaaattgattgacgaagacgactttccagtgaagtggaaaagtctcataaaaatccagaagtggaatacaaggaacaaggtgactctgagagctgctaggactgagcagagagccctggaaggcttctgtactagcgggacagcagcagcatctgcagaaggagaaggagtcccgagagcttgtgcactggccacgtgtagagaaagaatctgccaagtgccggaaggggagagaagaagggaggagtctgaggaggagcaaggtggcccggccttttgtcttctgtggcccgtaagagccagaacaggagcaactgcagcatctggaacagagatggtcaaacaatgacttgtgtacttttaattattccattttaacgccattattagctactgtatttgcctgttctgacaatgctataaagatactacacaagacaaggctgtctcttcactcttactgtttcctttgctttgcagaagctttttagtttaatgtaatgtttgtctatttttgcttttgttacctgtgcttttgaggttttatcccaaaactctcatccagttcaattttataaagtatttccccaatgttttcttctagtattttcacagtttcaggtcttatatttaagtgtttaattcgtttaaagttgatttttatatagagagataagtaactagtttaattgttctgcatttggctatttgattttcccagtatcatttattcaagagaatatcctttccctgaaatctgttcttggcacctttgtttaaaatcaaacaaaaatgtaaatgcatggattaatttctgggttttttattcttttctattgctctatgtgtctttttaaggtcaataccatgctgatttggttactatagctgtttagtatattttgaagtcaggtagtgtgatattttcagctttgctctttttgctcaaaattactttggttatctaaggtcttttgtatctccatatgaattttaagattattgtctctctttttgtaaagaaagtcattgatattttgataggaattgcattgaatctctagatctctttgggtgacatggacatttttacaatatacctccttcaatccacaaacatgaggtatctttgtttatttgtgtcttcttcaattttgtttatcaatgttttatagtttttattgcagagatctttc

SEQ ID NO: 476047 - DNA, 999 bp, Homo sapiens
agtgttgctgagcacacagccgctacaataattgctgctgctgatgcctgctgacgttaccatgaaggctgctgccacccaaagcttttcatcactctaaatgtagtctgttccacagaaactggacagaatgatagcactgggctccactcaggaacacatctcctaagatattgacgagcaagctgtgccgcagtggggtgagggttggaagagggaaggctccagagcccgggcttcattctctcacgcgaagaaacaacagggagaggacactcttggaaactctccagctccctcactcttctctaagaaagagagttgctttatctcgttgacaaatttggaagcaaatactgggcatgagcagctcagctcctgcccatacaggactcaagctctggtgtattctccacatgccaaagctcaatggcacactctgtccctgcagcgggagcctatggcattgcctgtgattgggggtgaggttatctattctgagattcaagatggaagcctccattgcccctcctaagccatgctttccagcactgtaataaaactggatttttttccctctatctcctttattccaccttatcacttggaactaatggatgaaagaggtagtgaaagaccaattcagtatgcaaaactgcttcaaataaacattaaagacttaccagaccaaatggccatatgggaacacttggcaacaaatgaagactatgatataattagcagaattgaacccaactttgttaaccctcagatgcagattgaaccaaggaagccctcaggcacaaatgaagtacagaacagccacagcaaaatagttcttccctccgcacacaaggaggccaaaatcagatgtatgagtctagggacagaaggggatggttggaatgccactggcaaggtaaaagtaaaagatagaaagtatgtgtttgagaggagaaaagaacagttgtagaggtgtcccacaggggaaacactaat

SEQ ID NO: 476048 - DNA, 850 bp, Homo sapiens
cagcacgcaatgaagggtgatgtcaatgctgacagtccacagacactttgtgtagaaaggccatggagacaggagaaataaaagaatccagaagtataaaacataaaatgggagagaaagacaatccaggaaaaccaacatgtgcaactaactggattctcaagaagagaaaacaaaaaacttggagacaatattgccaaagaaacaataggaaaaaatgtcctagaattggaaagggattcaagtcttcagattcaaagggttcattgagtgctgagcaagatgaatgtaaaaaagacccattcctagacacattcacgtgcagcttcagagccacagaaagtcttgcattccaggaaactcagcccaaggcagaccaagatggtcgctcatcttccttccaggtcatacccctgtacaccacatgtgagggcaagctcaccatggggaggaaagaggggatgttcaagggccacagataattcttaaattacttttaatattatctaatctcattttgagaataatctttagtattttctttgttttataataaacttgaagtttatatttttatgtatttcagcttgttgcagttcttacaacttattattgagcccttaagtctatcttgtctggacatgtagcagaaaacaactttacgacttagtaaagtatgaggaagggcctacttttgataggaaagtgtagcaaaaagacttaatgacctctcctttgtcatggatcattgatagccttatattattacttgcctgtttcctctgtattcctcctcattaagataatatattcctcaggtatggggactatatttatatttattctgttt

SEQ ID NO: 476049 - DNA, 589 bp, Homo sapiens
ccattactacttttgtttaataaaatgactttctaccagaccttactcttgttaattggattttgcgagtgggaagcaaccagacttgcatttggttacattgcaagtggccttataagaaaggcagaggaagatttggcacagacacaaagaagagaaggtgatgtgaaaatgggacagaaagagatttctagaaatactgatcttgaatattggagtgaagcagccacaagccaaggaatgccagaccctgtcagaacatggaagatgcaaggaatggatgctcttgtgcagaaccttaagcctctttctactccaactggtgtctctttatcaggcagctacaaaatcaaacagttgctgctgactgtttttaacaagtgccttggaggaaaaagggagctttccacctacaaaaaggaggagattcaacattaagattaagtaatactggctgcaaaaataaacatcaaaaaaaacctttccacttttccaccttgaatgtttattcttatcagcgctcatttgggagcaacttataatgtaccaggtattggggatataatgatacataagacagtttcagtaa

SEQ ID NO: 476050 - DNA, 1441 bp, Homo sapiens
atattgccctgggtattgggatttcaagtttaggactttcttccagcatgcggatagcaacctgcagctggagtgcatcagtgtgtactgcaatgagaccacaggtggcaagtatgtgccccacgctgagctcatggatctggagcccagcaccggggactctggtgtgctcaggctccttcgtgcagatcttacggctggacaacttcatcttccatcagagtggtgccggaaacaactgggccaatgggcactacgcagaaggtgcggagctggtggattcggtactggacattgtgaggagggaggctgagagctgtgactgcctgcaggatttccagctgacccactccctaggagcagggactgggcctaagaggggtacccctctcatcagcaagatcccagagaagtatccagacaggatcttgaacaagttcagtgtgcccttacgcaaggtgtcagacatgggggtggagccctaaaacatcaccttctcagtccaccaactggtagaaaacacagatatgacctattgcattgataatgaaactctccataacatttttctcagaatatagtgagctctcaccaacatgaaagacttgcacatttgtagagtgctattatgtttattaatgtattttcacatatactgttaaaatacaatttcatatgttaatataattatgattataattattatacattctatttttaaaaacttagaaacaaaaagtattccagagaaaattgaccataatcacatcaagcactgaccgtcacactttctgcatttcttgctattcttctatgcataatttatatcattttgtaaatgtctttactgtgtttgcacaagtaacctggttctagggggataaaaatggctctgctatggtgtaaataggcatagatggcaagtaaattcttgctattaatagttagattatgaatgtttgtacatgactaacattattataagttagaatggatgaactgtactttcatcagcttgaattctaatgtgctttctgagcagtagtgacaggaaggatggagttgaaatgggcatggtggatttggacacagccccaggcacagctgtggaatgtgctgtgtgtgaatgttccgtggggagtatcacctcagagaggagctgaaatacctgctgtactacatcttctcctttttgtctttctaagggtaaatacaaattaaaaataagaggcttaactttacctttttaaaataatggaagggactccttgctacccccccatccttttatttcagcttttgttttagaaaactttgtgaaaattgtaatttctgtttctgaccctttgagatttatgaaattctttctaaaacgatttctttaaaatatgccttttgccagttttaccacaaaggagtatttctctcagggaacatttct

SEQ ID NO: 476051 - DNA, 1709 bp, Homo sapiens
ggtcctacagactgacacttcatcaacaccacctagaaatctgctgccccaggtgattgttgtcattcaaacaagttcagccaaggttatcactacatgtgtagatgtggagaaacacttgacggcttgactcgcaagcctggagagacacttgcacgtagtcattgcattttctcagatgacagctggagagcctctcctgcgcagctgctccctctgtcgcagccaatccagctggcaggggacagcacggccctttcctccatcaagtgcagcacaggggctgtctttcctgtggcctctcataagaggcagtctcctacgacaagaggacccccagtgctaagatcatgtgggatggactctagagccttgagcctgagggcaagtcccaagaggacagctggagcatgtcctgttcacattaagggcaaatgtgaagacttcttaaggatagaagaatgcaaaacaaataatgataatgaagtcataattgagaggatcaaaaaggtacaagaatcttttaaagaaaaatcagttcaacaaacttttgacaaaattgatcagaataacaagaaaacagtcagaaatactttgttaagaaatgattaagggggcacaatttagctacagtgcatattaaaaagataacatagaatatcataataacttggtttactgaaatctgaaaacttaggatgagtgaacatatttgtagaaaaattactatccaaactgaattcagaataaatagaaaggtgaatcatcttatatcattaaagaagctaaattattagtaacaatctttacatttacacaaacccatactcatatgaataagatgaaaacaacacatggcaaggacaattttatagataagttactccaaactttcaaagaatagtattgtcataattttgactggctttggttgaaggaggtgataaagctctatgcaaactaaaatgctctagtttggagattttcatgtctttctaataaagccactgattgagtgctgaaccctgtgaattcaactgtccaagctaggaaaaaaattcttttctaatgacatgaattcccaaagcaatctcatccaatttcatggctttaaatatctgaaatcttaaaacctttaactatttgtgcaaaggctttccaagtttatatcaccaactgagctgctcttcagagttttggacttgtgcatctgaaagacttcatgacatctttgatgttaatattttatatattaatatttttacactctgcttcctcctactagaatgtaaatctaatgagagtaaaaaatttgtccatttgttatattatcttgaaaggatgcatctgcggattttattcatcattccatttatcataaggttcagagacaagtattgcattaagtatatttggtacagagggagttgcagattcttagaactggtttgcaatgcctctcagaggcagtaactgggtaaaaactgagtacaagaactgtgacctgaaatgattaatcatgtcatgtcaggatttaacatcaacatgattttggtagctaaagaaattttattctgaaataacacaggtcttcataaagtgagacatgtaaatagtacaaaacaagttatattttgtatagatcatgaaatagaaagtatagcttgtatggtttgatttctagtaatgagtcacattgctcatgaaac

SEQ ID NO: 476052 - DNA, 1919 bp, Homo sapiens
tctggtcgggaattgatccagggtacatgtgcacaatgtgcagaatccatgttagatactggggatacgaagagaaatcaaacaggatcccatccccagaaaggagacagacaaagaaactgatggttgaaacggcaaatgtggagagttgttcagggtgccataggagcacatataggacagaagccagagctgtgaagactatacttggaggatccaactactcccacaatagccaggaggcaaaacagggaaagcagaggaagaaggggccatatcgggcttgtagctggtggtctagacactacgaacgtgtctctagatatcatcatggccacctatccagatgcctcaatccagagactctaagccgaagacataagctcacagtcaaatcaaacattggagaccccaaaacacaaatccgtggagcttcagaatctaaaagagaacttgccgtgatccccagtcgctatgagagggaaatggccacaatggtttccttgggaatagctcttgagtacggccataccaccatgaatgtggctgatcttgtctgatctcggaagctaagcagggtcgggcctggttagtacttggatgggaggaatacgtcttaaattttataaacaggactcagacatctatttttatgcttatttttaaatgtcttgataaaatgttatactactattacattcttgggaaaaatctcacttggtttttttttgtgttatacttttaatcaccagattttgtttgctaaaatgttatttagaattttgcatgtatttttcattggcctgtgattttttctttttatataacatctttttaaaggtctttattaatattacactcaagtgttcttctgttttctatgcgctgaatccaagcagttaaaatccatgggaaatatttttccttgatattttctaagaactattcatgtaatattatattgactgctcactcagcccctttccctaaagcctggtaacacaattaactcatgattccccgataaatgctattttctcattcctccatttttatctatatgtaaggctcttggctttgaatttggtttctatctctttgtttggttaagttcatcttggtaaaacagtaacactctcagcatttgttctcagttctgtgagttagagttgataaactttctcagtaggacagacacatattttgctcaatgtgtgttctccataaatgcagatgaggaaggagggataattagaggaaacagaatgagaatctcaaccatttgagcccttacacaattctatgataaactacaatttgtatattttctgagtcatgtgaatttgtcataaaatctattacttcttaattcacaaaagttccttgttttatttaataataaaggaggaagtttaaaatacccatttttatagagtcatgtgtatgtggtgtataagtctttataggaagcatgaacaaaatataatacaacagttttgatatctggggatttgtaatataagtgactttttaatttatagaaatgtaacaaatttgtaaacaaacaaaagtcatttcagaacaagcttaaaaatctagtgatcctattaatttactgaaagaaactagtaccattcatctgcaagacttatatagataacatgtgttcattttcttggttaaatacttaaatatggacttgtgaggtttcattagaaactatcaaattatattccaaagtagttgtagcatttttcactcccttcagcaacatttctccccacttagtattgttatgatactggcaggctgggggaggttcctgaatgccaatgggaccttgagcccagggtcgtacgggctcttgacaccgtcatgagaatgaattcaagggcgagtcaggaaatagtgaaagtact

SEQ ID NO: 476053 - DNA, 772 bp, Homo sapiens
attccaagtgaagatgctgctgacctttcacaaatctcctataggtgtttggtacccgcatcagctaactttatggctcaaaccaataggacaatttgtggaggtatttgaacaccttctccagcgaatccctgatctctcaaaatttggatgtgagacttcacaacctactaaaaatgagcttttgggacctacctatctaggaataaaccatcctcgccgtaagagatcaggtggaaacctgagaccagagtgtcaggcttctgagcccaagctaagccatcatatcccctgtgacctgcacatacacatccagatggcacatggaaaacagagagaaaacaattccatgtggaagctttccaaacgttcggggcctaatgactaagacattatgagagagaatcactctgtcggtttacactttctcagcagtgcaggacaattgtccattccccagctttctgagaattttcagatttgtcagattttttgtcatgtgcttttagtatgccctgcatttcccctgtctggaaattacctattcataacaatgaagttttctaattgaagagtaggatgattctctacttttaatattcagaagctgtgctagtaccctaattggacaataaattatatagtcagcttatatactaccaaattctttgtagtttggttttgtaacttttctttttactcattttcctttttttcttcctacaacttttgtttactttcttgttttactataaatacatattctttttta

SEQ ID NO: 476054 - DNA, 611 bp, Homo sapiens
gacataagcatgttttgaattaggcttaagttagtagctggctatggaatcatcgggccttaagattgaggaaaataacattggactttgtctcatttccacaactttccaaaagaccaacgcagcttttgtggcacactggattttgagcccacaaaacgctggagtaaatcatgagaaagaagcacaagtagccccaggtaaagacgttatcactccctatttacagtcacttgttcattcagctaaagatggggttctttgtcccacagccatgaaaattaaggctcacagacaatttgaatggattgataaccctgaaggaggagctccatgggagctggaggagctggggacctggctgcagctctcatcaaaagatgtatggatgaattatggcaatatgcatgagccccaccagggcctggcaacccacaccaattttccccgtgtaaagccactgctgctttacctttaccctccaaatctcatgcagaatttctctttagtcggtctctgaccctggttcctgacccacagctcctaagatctttgtgatttcctgagtgttagcagcatctaacacagagctccgaaatacttcaaaattt

SEQ ID NO: 476055 - DNA, 641 bp, Homo sapiens
ttctcagtccatgtcctgtttccagggaagaaacctttattccagtgcttcagccaatgccaatgagaatcgtcttatgttcatctccctgaaccaactaaaattaggggtttatatagtaaggaaggcaggaaaacaggaattaaggaggggtaaggaagaaatcatgatggatgaggagtctggtgtctcattgcctgtatacagctatctgataactttcagctccttgcctgagagaggaattcaggttaatccagatatcctacagacattaaagttatcatatatccaaaattccagattacttttatcgccttttatcacaaagtgccctaaactgaaagctttcagttgttttctaattgccacgacaactaccatcaccatcagcatcactgtcagaaatgtaatatctacctattattgaatgttcactgtaatccagggatcattaaatgatttgggaacattatcttatttaatcatcccaaacactccatgtaacaataaaagaaaatgagggaaggcaacacttttttatcttcatttttattctcttaagatactgcttagtttaaagggtacatatgcatgtttgttatttagatctacttacatgtttaccaatatttacctat

SEQ ID NO: 476056 - DNA, 886 bp, Homo sapiens
ctgtcaaaatatgagtaataaacgactggcaatcagaaagcaagcatattatgaaagcatatatcttatttactggtttgatggtttaggcttcaggccagtaggggaggtgtccctgggtaggaatcagttttggctaaagcaggcacaccaaggctgtctgactgttggattagagctgaagactttccctactgtgcccagcattgcaactgtgcctgtgttgaaagaaacgtcccacaagcagacagggcaagctgcagaccctttgggtgtcgaggaatgggagcagttctcaggccactgggttgatgttccagaggggactgttgctgcctctgttccactctgcttcatgcaggaagtgaaccccacacaggcagcagtaagccctacacagatcccacatacctgcctgcgctgcactaagtgctgggacactggggttgttcacctaactcccactctcagactgtgaataacttcattggaagagcttaatttactcatattaatatctgtcataatgaagcaatgtatttcatagtttacgtacttattattttttgtacaaatgaatcacatggaccaaaggactagccattatattgctgaatagaccatcatgaggatttttatctgtacttatctattctgtgattgttttttcaaatgtaaattgaagtgttctgcatttctaatgatttatgcttgttctttactcctttcacatttggacaacttccacatagaagtctcccttttttcctttcttttttcattcatttaaaggcctgtattgctttctcttgccaaattctgcaaagaacttgcaaagatgagtaaaacatcatcgatgtcttcagtgagctctcgtaaaagttac

SEQ ID NO: 476057 - DNA, 595 bp, Homo sapiens
acagcagcatcttgatgaccatatgatacagctggcatttgtaatttctgttaccacagttatagtctccgtgagtctaaagatcttggttctcagaatggtagtgctttccactagaggatacagtagagtcctattacagtttaagctagttctttcatatggttattttggtcttctcatgtcaaggggccggcaatcaagtgaaggagtcaccatttcagtgggtggtcagctcagatcagcaggaggaggcagggctgctgctgtacaatggggatggggtggaaagtgcttgagctcaggtgacctactaaaacatctcttggtgctctgttgtccagttttaatgttaaacggaaagaaaatgagtaaatacatggcgcccgtcctgaaaactcatcacctcactcatgaaagaaaaactcctagcctcaagcatacatacctaggtgtagtcaccacaattggcaaccaagcatgagtgtctcataattataatgacagaagcatttactgactcattaatatttatgatggtatatagtcagtgttaatttaagaaatgattacttgaagttacttcaagcaacaa

SEQ ID NO: 476058 - DNA, 900 bp, Homo sapiens
aggctctgcaacaggtccaggctgctatgcaagttgctctgccacttgggccatatgactcagcagattcaatggtgcttgaggtgtcagtggcagatagggatactgtttggagcctttggcaggcccctataggtgaatcacagcagagacctctaggagttttaagcaaggctctgccatcttctgcaggcaactactctccttttgagagacagctcttggcctgttaccaggctttggtggaaactgaacatttgactatgggtcatcaagtcaccatggaacctgagctgcctatcataaccaatctagccataaagtgggtcatgcacagcagcattctatcatcaaatggaagtggtgtatacatgatcaggctcgagcaggtcctgaaggcacaaggagtgaagcaagctgtccctgatgtgccctatccaatttcctgacggaatcctgtgtatgtgtctttatgagttgagttccttgtaagcagcatgtaactaatggggttatgtttgtatatccattcagctcttctacatcttttaagtggaaagtttaatttgtttatattcaaggttgttattgataggcactgaaaatttgaatatttggtcactttgtgatgcctcatatgtaccattggttttgttcattctgctttattatttaaaaattattgttctgattgggttattgcataagatctgtctcaagctttaaagttctttattccacttgatctagtgcattattgaaaacttatgaacatattttatatttcattcaatgaatactttagctcccgaatttatgtttggttcttttttatgatatctattcggtacattgctcatttgtatactgattttttaaaaatgtctttttatcattttt

SEQ ID NO: 476059 - DNA, 991 bp, Homo sapiens
taatctttgccagaaatctgaagaatgaggattctcatctttttcctctccttccctaaaatgcctttgttttatgcagttttaaccacagtggaaaagccagtaagtgttctagggaacattgttatacagcctttgtcctacattgtctcccactacacccgcgtttctgtgccacttctggagacctgcatctcccctgctgccaatcagggcccagcaccaccccacagcctcaccgctgatgatcagcacgcccctccagggcccatccagcctttttcctgtgggatctattatttaaaaggaccctttcatcttctcatctactctattaaaacttccattttctggaagaagaagaaggagaaggagaaggaagaagaagaagaagaagaagaagaagaggaagaagaagaagaagaagaagaagaagaagaagaagaagaagaagaagaagaagaagaggaagaggaagaggaagaggaagaggagaaggaagaagaagaagaagaagaagaagaggaagaggaagaggaagaggaagaccatttgcacctagctgttttctcctattaattactgtttctgaaaagtgccttggcagaaaatgtttttgatctttatcaacttggcacagtgttaatctccaaatcacaggaatttctacacaatataaacatcttgagaaaagaatgcagagattaaagaaaaaaattctataatggacaacactacatacacggatgttaaatacagatattatcacttggaataattctgttgcagttagagatttggatactgatttacatatggatggacaagggattgagggatagagaaaagagggggaattctagatgtatctgaagagttcatctattgctatggaaacagatacatcctagcaacagctgcttgattcagtgaattgaggcaaataggctttttgaacttgaagaccttccttggtgaccaaatgtgggct

SEQ ID NO: 476060 - DNA, 1508 bp, Homo sapiens
aaccaccactcaaggaaggatagaggtaccgggttcatctcactagggagtgccagacagcaggtgcaggacagtgggtgcagcgcatcatgcgcgagccgaagcagggcgaggcattgcctcactcgggaagcgcaaggggtcagagagttccctttcctagtcaaagaaaggggtgacagacggcacctggaaagtctgattactcccaccctaatactgcgcttttccgacgggcttaaaaaacggggcaccaggagattatatctcgcacctggctccaagggtcctacgcccacggagtctcgctgattgctagcacagcggtctgagatcaaactgcaaggcggcagccaggctgggggaggggcgcccgccattgcccaggcttgcttaggtaaacaaagcagccggggaagctcgaactgggtggagcccaccacagctcaaggaggcctgcctgcctccgtaggctccacctctggcggcagggcacagacaaacaaaaagacagcagtaacttcggcagacttaaatgttcctgtctgacagctttgaagagagcagtggttctcccagcacgcagctggagatctgagaacgggcagactgcctcctcaagtgggtccctgacccctgacccccgagcagcctaactgggaggcactgcccagtaggggcagactgacacctcacacggccagattaagcgagacaggaagcaaggcgagtctacggttgccctggcttagtgccttgagtttccaggccatagcacaggaagaggaaaccgaggcagagcatctgagctgtgaagagaggaagcaaagagcctaagaaaagcaaggcagccagagctcaccaagcagaatactggagagagtgttgcttcaccgaccagaaacttctgtgacaggtggtgcctctgcttgggttttgcttgcatccactgggctcgggccaggcacagtggctcatgcctgtaatcatgcttgctcattcggcccagcaggttgctctcagctcgcagtactggcccggatcccatgcctgccaagaaatggaggaagtacatgctgactggtccatggatggccgtgggcaggccttaaaaaagcaccatccagctggccaaaagacatcaaggaagttctcactcctggtcgcagactccacttggaacagccatcccggcccccaggctttagaccatccctggcttgaaggtgaggtttcactggggactcatcccttcccaactagtaacctgtctgcctcctactgccatcaacatgccatctgcaccacccagactgttcattctgagggacacctgcaggcccatgccgagccccaccgtcagccccctgccaaatttgttcctgagctagttggcccccaaagtttcagagtgggctgagatgcattcagtttaaggcagcaattgaaacagaaattttaaggtcagcagcaagaaaaaataagctcattttgataaataacataca

SEQ ID NO: 476061 - DNA, 853 bp, Homo sapiens
ttccttatatccagcattagactattttccaggaacctcacttgcacctgccctgggcatgtgcagagatgttgtccaagagccacgttctagagtcaaaaaccttagaactctatctggtattctattgtactgtggctgaagtagtactcaaaccacaaaatgcagtccttcccacttttcctttttctttccaaaggcagaggagcttcaccctgtggccagagccactactggcccatggggagtactgccagactaccactgctgttcccttaagccccaaaggctcttcatacctgagtattgctgctggttattcagggcccaagggctcttcattagcaagtggtaaatttttccaggactgggttcttcccttgaagacagcaggttcccttctggcccaggtccactgtctactggccacgttcagcactaggacttgcctaaaagttgcagtccttgtggcctagatagtcttttgagtttatttaaggccccagcgccctttagcccacagtggtgaggcttgcaggaactcaagttcagaccactgggattagtgattcccctctggctagggctgggttaaatgctccctccatgggcaggcatcaactgagttggggtctctatgtctcttccatggggctttgctaagttcaaatacagattcacatattaaacagtgccgcctttaaactctgatctgcctttaaaatctttggatatacgtaagactgacattttgtaaagtagtatatgagcaatgtgacaacaaattaaatgtttcctttaaaaaaaaactaaacactctagaatatgaataaatgaaagcaatctttttaaa

SEQ ID NO: 476062 - DNA, 562 bp, Homo sapiens
caggcctgtgtgtgctgctctggctgatcttggggcttttatggcctcagaggtgaggaaatgcacacagattggtccatgggtggccatgggagggcccagaaaggcaccacaagttcccactccagttggtgggactggcagcctggtccccagtcttcaggccctccctggcctgaaggtggggtctcaccagggacctgcccccttccgccctggcatctgtctgcctcctgctgcctcctctctgtccacacccattgccatcatcctagtccaagccatcagcacctccctcttggaccactgcaagaacatcctaactgatgtcccagtttctctctggcccagtgatttttttcaatgcacatctgactattcacctctgtccttatatccctacaatggtcattggtctttaaataaagatcaaaattgtgaaaacttcctacaagtgaggctttgcaccatctgaccacgacctcatctccggcccttccttgggttgtttccgtatctgtttctatctcccttactcattgtctttttttttttttaagtc

SEQ ID NO: 476063 - DNA, 754 bp, Homo sapiens
gctatgcattgtgagataccttatgaacaagatactgactctcacttctagcagtttacagtctgatcgtcaaccagctgatctgagcctctattcagggacaattggagatcccgggggtctccagggagggggaactaagaggaaagccaccttctcctgctgcagctgtctccactccaagctgatcacacagatcttgtgtgttataattaactccctgggatcagcaacctactttccacgggccgcttttggcttgctgcctatttttgcacagctgggttggcgatacatggtggtggaggtggaggtggagataaagggggtggtgttggaagtggtggtcgtaggggaggtgatggtggaagtgacggtggagatggtagaggtggttgtggaggcgatggtggaggtggtaatggagatggtagaaatggtgattggagtggtagaggtgatggtggaagtgacggtagagatggtggaggtggttgtggaggagatggtggaggtggtggtggaggagatggtggaggtggtggtggaggtggtggtggagatggtggttggaggtgacggtggaggtgacagatggtagaagtgatggtagacatggtggagatggttgaggaagtgatggtagaggtgatggtacagatggcggagatggtggttggaggtgatggtagtagagatttttcattagtggaacatacctgaactattttaataatctgaaaataaaacaaac

SEQ ID NO: 476064 - DNA, 873 bp, Homo sapiens
gtgaacgcagcaatagaagggaggggatccgcattaggagtcatgatctttggagaagagctctacagcggaagcttgcctttggacttgtgggctgtccactgtcattttgatcccagggatggacagatgaagggtagtggagaaaatgtgtgctctgtgctagggaagagggacacaggagggagaaatagaaatacggagacccaggaaattgtggatctttgtatttatgttgctgttataccacaaaactggaacactggcaaaatgaagggtctaagacctgagagtgaagcctcagcagactcacagtgcatgctgattggattcggagaaaacttagaactattctctgaacagacaagattggaaaggacaaacattcctgctcccaggaagggttggcgatacatggtggtggaggtggaggtggagataaagggggtggtgttggaagtggtggtcgtaggggaggtgatggtggaagtgacggtggagatggtagaggtggttgtggaggcgatggtggaggtggtaatggagatggtagaaatggtgattggagtggtagaggtgatggtggaagtgacggtagagatggtggaggtggttgtggaggagatggtggaggtggtggtggaggagatggtggaggtggtggtggaggtggtggtggagatggtggttggaggtgacggtggaggtgacagatggtagaagtgatggtagacatggtggagatggttgaggaagtgatggtagaggtgatggtacagatggcggagatggtggttggaggtgatggtagtagagatttttcattagtggaacatacctgaactattttaataatctgaaaataaaacaaac

SEQ ID NO: 476065 - DNA, 545 bp, Homo sapiens
atttcccaggtctgttataagaatgagtgagatacccactaagaagcatcccgcacaaagcagtcatcggataaaattctattatgtgccaagtattgaggattcacgagtgactcagacaagaatccctgttctcatggagcctacgtttactatggtttgtggagaaaaactggcaatcaaaggaaatgcccacacgtccctcacattcgatggtgaggcggatatcctgtccttgggaaagagaaatccatggtttattgctcttgccaataacaaaaatgttgaaaagtcgagtggcaaagctgttgccattggcatctttaacataaactacgtcaaaagatccagggtgcttctctcagttgatgatcacaccaattcttcccaggttagtacctctagtcaccagtgtcgaactcgatgaaatcaatactcttgccagtctccaaatcaatctgaatggtatcattcacctcgatgaggggtcagggtagcggacggtgcaagcatcatgagtcaccagatcatatggtctctggaat

SEQ ID NO: 476066 - DNA, 1041 bp, Homo sapiens
aaagagattgctgtgactgtgaagaaggcagataaagtggagtagaggaagctgctggagtagtgtgccaggaccactctgagctccaactgatctcacagcagaaagctttctttgctaagatggtggtggatgcagtgatgacgtgtgatgatttgctgcagcttaaaatgattggaatcaagaagataaaagtccacacggttgaggattatcaggcgattgttgatgccgagtggaacattctctatgacaagttagagaggatctatcattttggagccaaagttgtcttgtctgaactccccactggagatgtggccgcccagtactttgctgacaggaacatgttctgtgctggccaagtacctgaggagaatctgaagaggacaatgatggcctgtggaggctcaatccagaccagtacgaatgctttcttagcagatgtgctgggtcgacgccaggtgtttgaagagaccctgattaaaggtgagaggtacaacttttttactggctgcctcaaagccaagacaggcaccttcatcctccatggtggtagtgagcagtttattgaggagacagagcggtccctgtgtgatgccatcatgatcatcaggagggccatcgggaatgagtcagtggtggctggtggcagggccattgagagggagttctccaagtacctccaggattcctcaaagactattccaggaaaacaacagctgttgattggggcatatgccaaggccttggagattgtctcattccagctgtacaataatgctggctttggggccacagagattctcaacaagctgcaggcatggcattcccaggggcacgtgatatgaggtggacatcaacaacgaggacattgctgacaactttgaggccttcgtgtgggagccagctttggtatggatcaatgccctggcagtggcctcttaggctgtgtgcctgattgtgtctgtggatgaaaccatcaagaatccgattgactgtggatgctcccccagcagctagctggggccgtggtcgtgg

SEQ ID NO: 476067 - DNA, 1356 bp, Homo sapiens
tctgtttcttgatgtggaggccaacaccaggccatcacgatggtccaggatagtgctgtggccagggctgactgccaggagcttggtggtaaatttgaagccaagatccaggaaaatgctcagagagtgggccagctggatatgagggctaccctgacccggcacgtggatgagatgaaggagctgtgctccgaattggacgagaccttccatcagatcagcaaaatggagccagagatggagatctgcctggccctgaaggagcaggtgctcggttgggactcgctggctacccgggtggcagccctggagcaggccacgagtgggccgtggcttggagcccccatggccggcagagcacttggagctggcgaccacttgggcccagaagaagctgtcctaaatctggggaagctggaaaccgtgcccagcaggaaaaggaagcagaagcagaaaggcccagaagttccccggaagagggacaggaaagaagctgagcctttgccagacacacacatcaaagggccagtgccagatgccttgaacactgagctctggcaggcaggctcccctgtggccttctatgccagtttctcagaaaggacagctgccctgcagacatggaagttcaacactagctacatcgacactgacagcagcaacttccctgaacatggctactaccaagccggagtttgggctctggccaaggatggtctgcagatcatcctgttggtctatctcttccctggacagcttctgcgagagagtgtggtgtacgtggtctctgtctagcgcactgggtttggctatttctcaatgacaagggggactggactacttctctgggtgggacctggttctgagcttggtatgccttctcagacagcacaggctggactccagccctttgccatactgtgtattctacagctgctttggtggcgtgctcctcttgtggatggaagcttctgtgcagcactttaactctttctcctgcttcctattctcttctccctaattgttggctacaaagtcatctttcccagaaggagtctctaagatggaggtgacatttggacagtattggaaagcagtctccaacgactagaggacagtggaataaagccaacctgtttggtctctgtcagccagaaatggagaagaaaacctggttgagtcaacaagagaaagaaaattagtatctttcgtttcagttattccttgtatttatctgtaattttaatttcatatctttctctccttgccatacacagagcaaaggcccaaacatgccaaatgtgaaccaaaatgtatatggccttcaccatttttacttcctccagtatctttggg

SEQ ID NO: 476068 - DNA, 451 bp, Homo sapiens
gctgggctggggacccggagcatgcatgtcgtggggcggagaaaaccttgggatggttggaaatgaaggacgggagggagaaccagagaaagggagaggaaggaagcagggagggccagagaacaaagagaaacctccgccaggaaaatgggaagaggatgacacaggcacagccctacactccaccaactctcagtctcctgctctctgccttgtaaggaacgcaggccccaccccctccagcctcacagtgtttggggtcacccattccagcgggggatggaatattcatgaaaattcctggaagaaggacagggattctcagaactctggtgcctcgaatttttacaccaaatatgggcattctcagaactgctagggagctggctgtcaccttggtccacatgctgtttctcagcaacttaccagcccagagctgctgcagatattt

SEQ ID NO: 476069 - DNA, 948 bp, Homo sapiens
caacatcaatagccattacggaaatgcaaatcacagccacaagaagatgccacctcacacctagtaggatggctgtcatcataatcacagtggataaaaggccttttcttcactatgactgtgttagccataaggccaaagcctttgcttctctggggaagaaagtcaatgtcacaaaagcctgggaagaacagactgaaacactaagagacatggtggatttcctcaaagagcaactgcctgactctcccatgcggccccttatccactccgacaagatgaaagaaacaatcacgaaccaggaaaaacttgccaaactgcaggcacaagtgtgcattggtgggaaaggacctgcttgcagaaagaagaaggtggttcatagaacagccacagcagaagataaaaactttcagttctccttaaagaagttaggggtaaacaatatctctggtattgaagaggtgaatatgtttacaaaccaaggaacagtgatccactttaacaaccctgaagttcagacatctctggcagggaacactttcaccattacaggccatgctaagacaaagcagctgacagaaatgctacccagcatcttaatccagcttggtgtagacagtctggctagtttaaggagactggctgaagctctgcccaaacaatctgtggatggaacagcaccatttgcaactggagaggatgatgatgatgaagttccagatcttgtggagaatttttatgaggctttcaaggatgaggcaaactgaattgagtcaacttctgaagataaaacttgaataagttactaggaactgctattttatattatgactgctttttaagaaatgtttgtttatggatgtgataaaatctaggtgtctaatacttttgagcccaagcctcttggacactgagctcttttcagtttttgcatatacacaatttatt

SEQ ID NO: 476070 - DNA, 1335 bp, Homo sapiens
gtgaccctaggaatgctggccctcactctctttgctatgacgtcaccatcatccctaagttcagatctgaaccacgttaaatccttcagttccctgcggaagaaaataaatgtcacacgggcctggaaagcacagaatccagtactgaaaaaggtggtggacatgctcacagagcaactgctggacattcagctggagaatgacacacccagggataagtttaaaatggtccaggacaggagggagcagacagtagtaggttggaggcaattattgatttcctgtagcaatataaatccgagagggccagaggcaaggacaggatatggcagcgagagcaagagcaggaggttggaagtgggacagggtggtggcacaggatttgtcaagaccagagctgatctctttccaagggggcagaacccctcaccctgcaggccaggatgtctcgtgagcgggaaggtgatggacatagtagtggatcttggcatttagactttgatagacagatcttcctcctctctgactcagagaagagaaagtggacagtgattcatgctggaggcagacagaagaaagagaagtggaagaatgaagggaagtgaccatgttcttccagaaggtctccaagggacattgcaaaagctagcttatggacttccccattcacagggagaagaggctggagctcgcaggtaactgacagcagagcactgggagcgccctggagatgccgttgaagtacacccttgtgtgtgtgtgtgtggggggggtgtaggtttatgtgtgagagtgtgtgtgagtgtgagtgtgtgtgcgactgtgaacatgaccccctcatgggaggctcctcctagtcatgctggcatgcctgtgctctcccatcctcctctcccttctccctcctgactcttcttcctcactgcacttgcttctgctccactcactgtggatttctcaccagcctcgaaactgtgggtgtcactgtgttttcagacctttctccttagtgttccctctcttgagaattacttttcctttcctctctgtggtctgtttctagaaatccatcaaagccacctccaatggcaatgaacaagcttttcaaacactcagctattggttttgttgagttctccaatgtttttctcttctctacttcatttatttacacttttaatttctattctttgtttattttgagtagatggcttcttttttgagtttcttcaagtgaaatattaggttctcaatttgagattactcctttgtttcttttatctttctcaatatattcacactgacagcaatacatttccctctaaggactgcttt

SEQ ID NO: 476071 - DNA, 1210 bp, Homo sapiens
agccggtgtggggctcttgacaccgcatgaggaaatgaattcaaggacgatcatcactggtagcaaatatttacagaatgtcaacatcacactgtgcatcctcttccggcccgtctctagccagcttcctcgcatcttcgccatcaccggagaggactatgatgagcgtgtgctgacgtccatcatgactgagatcctcaagtcagtggtggctcgttttgatgctggagaactaatcacccagagagagctggtttccaggcaggtgagtgacgaccttacagagcaagcagccatctttgggctcatcctggacaacgtgtcctggacacatctggccttcaagaagttgttcacagaagcggtggaagccaaacaggtggctcagcaggaagcagagagggccagaattgtggaaaaggctgagcagcagaaaaaggtggccatcatctctactgagggcgactccaaggaagctgagctgattgccaacgaactggccacctcaggggacagcttgatggagctgagcaagctggaagctgcagaggacatcgcgcaccagctctcaggctctcggaacatcacctacctgccggcggggcggtccgtgctcctccagctgccccagtgagggcccaccctgccttcacctccatggaccgacggcccacagacccgatgattcttaacaccgccttccttctgccccctccccagaaatgactgtgaaatttcatgatttgcttaaagtgaaggaaagaaaagtaaaatcacttcagatctctaatcagctactgaggacctgggggctcccctcccactcttcctccccacaaccttgttccccgcccccgaatcatctgtcaccttcctatgcccgatgcaatgcacctgctcattacgttcacctgctgtccccactggagcagggattttgtctgttttcctcagggaagcatccgcagcacagcccattgttggtgctgaggctatactaatcctcctgctacacacacacacacacacacacacacacacacacacacacacacacacacacttgcttctgtttctctggagaatcctagtataagaagaataggaacattggtgtctgtcaagtattaggacaatgttcaagactgacagtcagaggtcctgtaatttagaagtgttgtttagttaccttcttcccaaagagtctagc

SEQ ID NO: 476072 - DNA, 932 bp, Homo sapiens
ccaggagccaccgggagcatctggggggactgctgtttttctccagcggccccaaaggccatccaggagttctccattgagacctggacgtcaaggggaagccttgggtggaactgcgagcgggtggccttgtctttactggtctttttccctgctttgtctgaaccctccctgaggccccttcgactgggatccatgacattctttcgctttgccctcttccggccacatctggttctcactggggctccacgcttggttcctgggaaacactgggaggtggccgtccccatgcagtgcctcttctgcctctattggcacagctgccagcctgccagatttgtcaagtttttcgggcctgggtcagacacgagctccctgtgtccccaggagctccagcttccagaaggcctcttagatctccagataaatgacactggcaatatcaggcccttcatggatacccagcccccgttccctggcacagaggccattgtagcacctttatacagtgctaccaccccaacagtcctaagaggcccacacagtgctttccagagagtgcgtcctgaactgctgccagttggtgagtggtttacaattggtccatggagccttcagaatcattccaacttttgcagatctgagaatgactgctcacagccagaaggtgcctgcttccccttctgccacgattgtaagtttcctgaggcctccccagttatgcggaactgtgagtcagttaaacccatttcctttacaaattacccagtctcaggtagtatctttacagcagtgtgagaacagactaatacaatggtgaggtgagaacttacgttagtttttgagacaaaattttagacttgcaacaatgattgctgttgctttttttttttttaatgcaagcaacggccaaattattttggaattac

SEQ ID NO: 476073 - DNA, 1938 bp, Homo sapiens
gagccattcagtgcccacagacacagcaaggagggctgcttgctgcctgacagctttgcgcaactggctacacccaccccttctatcctgtacccctgcatgtatgcacaaggtgaagcatgcacaggatgccatgtgcacaggatggggcatgaacagcatgccgcatgcacaggatgccacatacacaggatgccgcatgcacaggatgccgcacgcacaggataccgcacgcacaggataccgcacacacaggatgccgcacgcacaggatgccgcacgcacaggatgccgcacgcacaggatgccgcatgcacaggtggcctgctcagctgctggaaaggaacagccccggacacacattctgtgcagccacagttctggacacagttccaccacaggactgaggagtagccatgctgactcgggtcactcacctcctaaagacattgcaggacaaatggaaaatacctcctttccttctgtctccatgccagcagtgagctaacaggaacgggtccctgtatctgtcttcctttgtcctccatgtgccaggggcaaggacagcccaggcagtggcagtatagtgactacctcctgagctggcccacggtgtccacaagctgggcatggtctgcattcaatccacctgaagatgagcacctcattttattgttccactttgaggccaattttgtaaactctgaaagaaaaagaaatccttggctaacatctgtaaaaaacatacccttggcatttaataactgacattagtgtggcatttcattgttttaattttttaaaagtcatttgatattctcatcaactctgtgaagcagcacctagtcctcatttttgcatcagcttgtgaactgcagcacctgtggttattaatattaatttcaaaactcctgttttaacatgcaaagtgacccaattacgaaatcaaaattgattttaattgttagcatgccattactatacggtattctattctcagttgtttacatgccgctctcctcaagcacagtgtataataagtccctttccgtgaggctgggagcttacagattcctttactgcaaagacctgcatagttggaaggtgccagagaagtgaattatagcaactgaattgagctcttcgagttctggcaacagccaggaagctaaaaagaagctttgtcttaatggtggcaggagcccagaactgcctcagtttagagtgattaagagtatttctgaatttcaccctactgctgtctgaaacagcagccaagattgaagggcgggggtgaaatgctgcaaactgcaccaggaaaggggaggattagaggagaccgaacagcttccctaaacccttactgctctatgcagaggtgatgtcaccaggagctctacaagacatagagatgctttagggtcctgaagctaagaatcatttttccttttttaaatgattatggggggagagcaaaagaaggatgatattttgtgacatgtgaaaatgatatgaaattcaaatttcaatgtccataaatatttagtggaacacagatcacacccatttgttttaaatgttgttcacagctgctttccacggtaactgcagagtagttgggaaagagcccacgtgacactctcagcgctgttctctgctgcctgcacacaataaatcgcagcgatgctgcccaaccctgggttgggaagtcttccctgctgtccccatgcagctgaaccacactctgtacttgggtggggctggggtgtgttgacatgccccctccatgtgtttctttttaacagattttactttttttagaaaagttttaagtttatagaaaaactgagaggctagtacagagacggcccattacctcatacctagtttttcctgtccttaacatctcacattagtatgatacatttatttacaact

SEQ ID NO: 476074 - DNA, 567 bp, Homo sapiens
gctgtggttgtctttgtgtttgcctaccctatgaccacactctcccacctaggacactcttctcaaggggtaccaggaccactgcagccaccacgtggggcaggaagttgggcactgtgcaacttcaggaaggtgccttttacatcacaggtgtctagctggtatgagcatggtggtgatgcaggatttttcttggcccctttgccggactcacagaaggggtgcccatctactcagcccactgtgctcagccccttgtgggtaggtgcatgtgagctagtgagtgcaaaatccagcccatggctctgggcactgacacaggagcaaactccgtgcagggcttgtggccagaccagctgtgtcaccttgaggggaatgcagcagcacccaggtgagggtgcctgcaaccctgaggcccaagagggggcgttacagtgctcctttaattctgccatccacagacagcagcatgttagtagatcaattggccccttgtatcattgcatggggcagctgccctccaccagtgagggcaaagggccagtgtgacagcctttctggggactc

SEQ ID NO: 476075 - DNA, 531 bp, Homo sapiens
gagagtgcccttgcagccctgactgcaacgaggaatgatgtcttttcctcccggatttcaaagcacccattgggtaggagcatgggccctggagccagacaacttggccctactcctaaatggtgatcttgggcaagtgtttcaacacctccatcgaagatctacatctacaagtagacaggggaaagtgatcacaatagtccctacttcatggaatcagtgtaaggattatgaagttaatacatttagggatcttagaacagcacttggcaaacaatatgaggactgtgattttgaaaagattcctaaatggtcctgtgtactcagccgtcttccagcaaggctcctcagaatagaaaacctgctttggcatgcctccatggggcagtatttggacttagggatcaaatatcatcaatttttagcttttaatcaaacacacactatttctagcagtaagagtcaagtgctggcttggcatcctgccaagtgtcatctggcaaggactcaattaaactagaaggaggaagt

SEQ ID NO: 476076 - DNA, 576 bp, Homo sapiens
ctccttaaagatgactcatggctagacaatgtccccacagttcatgtcctgctccttggaaaaaggtacctttgtctcactctcggtgaccaactatgctggtttttccaggaccgtcctggttttagcacagaaagtctcacttcccaggaaacctttcagtcctggcaaaccagggtggtgggtcgccctagaacatatggacctgaaacagccacacctctgcacttcagctgcggtgtcacacaggaggcttttcaggtgtgaattaaatagcatttcttatgcccatcaaactccagcgacttatggaaagccttccaaatggccagtgaagcccctcctcaaggcttgcgtggaaaagcgactggagaggggaccaaatggaggtgatcgggaggaccatagtggcatcagcggatgcatgcagcagtgtagagtcaagtcagaggcctttctggaaagtggtcatgtggccaggttggtcatcccagtggtagacctctctcaaaatgctaagcggtagaggaataaaatccgcgacgccccccagagaaatttatgtaatataattgc

SEQ ID NO: 476077 - DNA, 581 bp, Homo sapiens
atgggttacatgggatatttcagcacaggcatcttgcatcttcatgtcctccgatgtgcactttgcactgaaacgttgcacccctgcgtgggatcctaccttggggtgactctagtccttacctttatagggacaaaaccagatcaacaaaggaatttcatccaagaagcattagatcctaagcagctgacaaagatgtttggaaggcatagaaataattcatttttactcccttttccttttctgctcctcagcccctctctgctgcatatgtgtgaacaagtttcggcatcgatgttttctggccacattagttttatggtaatagtaggaaataaggcttggattgtgactatagggacagtgaaggccccggcaccaggccccttattgaccttgacccctcatggtctatgtgaccttgggcaattcattcatgcaacagaaaatggggataataatggcacatattcatatgattgtttttaggataggttgaaattataaacttaattgacttgtcacagttccaagtactgtgcgtaataaatgcattgcaaatgtcagctaccattattacc

SEQ ID NO: 476078 - DNA, 627 bp, Homo sapiens
agtgcttcctgcaagccagacgggcagaagctagcgcagatactgcattttttacaaatagaaggcttgtggccacacttctttgagcaagtctattggtgccatttctccaacagcatgtgctcacttcttgtctctgtgtcacatttcggcgaaagcctaatccagagcaaggccggaactctcttcaattatatgaaagctgagagaggtgaggaagctgtagaggaaaattttgaagctagcagaggtgggttcatgaggtttaaggaaacaagccgtctccataacataaaactgcaaggtgaagtaacaagtgctgatacagaagctgcaagttatccagaagatctagctcagatcactgatgaagatgagaagttgcttcttatggataagcaaagaaagtggtttcttgagatggcacctactcctgctgaagatgctgtgaacactattgaaacgacaacaaaggatatagaatattacataaatttagttgatacagcagcagcagattttgacaagattaactccaattttaaaagaaattactctgtggggaaaaggctatcaaacagcatcacataaaataaacctttcatgaaagaaagggttaattgatgc

SEQ ID NO: 476079 - DNA, 541 bp, Homo sapiens
aaggcttaaatgtaaaggactttgaatagtacttgacacagataggacacaataaataggagatggcacctcctacttgtctatctaatacatacagaccaagttcagccatatgtggtgatagcattagagaacatcccgccttacacggcagtgctttctcctcctttgaggtgactccacctctcccacccatctcccccacgcagatgtccagcaccctctgttgtcttcttggctggccaggtaaggcactcttactgtacctgtccagggaagcccacaccagacagaagcccgactctggagtaagcatgaaagccaccacccaggactttgcaatgaaggttttgatttcgtctgagattgcccccagcccccctgcctggggccctgccctgctcctgctggctgacatcgctggccactgctccctgagctggggtcttgtatctcttggtgttttcgacttggggcagtaataaattatattaaaatatcttatgtgactaaatgttcccattaagcaacgtggatagaa

SEQ ID NO: 476080 - DNA, 618 bp, Homo sapiens
tccgttcagcttgcctcttaagcacagcttctgaactgaaaatgaatgcaagcaaggaaacagggacctcggtcctacaaccaaagaaactgcattctgccaaccacctgaacgagcttggaagtgattctttcccagagctacagatagtgaactccttgagcatgaggttgttggcagagaacccagctgggccacaccggacttctgacctatggcaatcaaagttttcaggaaaaggcattgtgatcacaggagacgacagctccatgcatgttattgcccctgaggaccctccagtgggacaagatgtggaggtggaagacagtgatattgatgatcctgaccctggtcatgtcacaggtctttccattcactcctcactcactcagtcactcactcacccagagcagcttccagtcctgcaagctccattcatggtgagtgccctataaaggtgcaccatgttttattttttatatcatatttttatggtaatttttctatgtttagaaacagaaatacttaccattatgttacaattgcctatggcattcagtgcggtagcatgctgtagcctaggagctagaacgctgtaccatataggctgtaccatat

SEQ ID NO: 476081 - DNA, 963 bp, Homo sapiens
ccagagcttctccccaagcccagcaaaccactcatggctcagctttgatgattgtatcaacggtgataagtcttcccatgtctgcaggagcagctgcagctaattatgcttactgggcctatgtgcctttcctgcccttaattcgggcagttacatgggtggataattctattgaagtatatgttaataatagtgcatgggtacctggccccacggatgatcgttgccctgcccaacccaaggaagaaggaatgatgatgattatttccactgggtattgttatcctcctatttgcctggggagggcaccaggatgcttaatgcctacaacccaaaattggttggtagaagtacctactgtcagtgccaccagtggatttacttatcacagggtaagtggaatgtcactcaggccacaggtaaattatttgcaggacccttcttatcaaagatgattaaaatctaggcctaaggggaagccttgccccaaagaaattcccaaaggatcaaaaggcccagaagttttagtttgagaagaatgtgtggctgataggacggtgatattacaaaacaatgaattcggaaccattatagattgggcacctcgaggtcaattctactgcaattgcacaggacaaactcaatcgtgtcccagtgcacatgtgagtccaactgtggacagtgacttaacagaaggtttagataaaaataagtataaaaggttagagtctctatacccttgggaatggggtgaaaagggaatctcatcacctcgaccaaagttagttagtcctgttactggtcctaagcgtccggaactttggaagcttactgtggcctcgcaccacattagaatttggtctggaaattaagctataaaaacaagagatggtaagccatcttatactatcgacctaaattccagtctgacaattcctttgcaaatttgtgtaaagccccctt

SEQ ID NO: 476082 - DNA, 831 bp, Homo sapiens
agtggttgtgaggttgatttggtgttcatggcaaagggcctccacgacttgacatacatgggctcatcacagttgggtacaagcacacaaagatgggcttggcacttgtctaaggcttcggcagcttcgtgaattccacgtgctaggccatcgtggatgagggcggtcttcagcacctcttgtaaagcagtattaacgtccattacacctccagcagcaatgccttccttggccatggcgcgcgttaaaaatttctgcctagatctgagagacctcctcttaccattgccaagccaacctattgtgtcttttacaaatattgacttttacaatattgactttagttactgcattgactttagttactgcactgactttagttactgcttcgacattccatctaaggactctcatgagattgcatttaagctgtcggccaggggctgtcatctcaaggatcatttgacactggactttacttccaaattcactgtcgtagttgttcatagggaaaacaaagaagttataatcaagagagaagcagtttcaaaggtgaaggtgaagagttgccagtctcagcgaaggctttgtaactagagaatgaatctttagggtagagttaacggtagattttaaactgttttaataattaaaattattattgcactttgaagggggtgtctgaactcagttgtaaaatgtttgacatttgtgaattcctttaatgttatatttgaaactgttttggtgcatgcacaaggtgcccaactatgactctacattttattgttaaacctcatgtgacccgtctttctggagaagtatgtgtgc

SEQ ID NO: 476083 - DNA, 712 bp, Homo sapiens
tttgaagaagcatggacagcagggatggctggaacgctggggcctcatgctctggcatgctccaggacctcactatccatggggcctctccagcaggctggcccagtattctttccatatggctcaaggctccaagaaagcagcaagacctcttatagcccaatctcagaagctgcactatgtccctgtcacttctaccacattctgttggttaaagcaagtcacagggcctgcccagattcaggaggagtggaaacagagggagaaatggcaaaggcccatttgcaaaagggcatcacctgtcaagtataagccatggttacatacttgccatggttacataccacagcagaaaccatgggtagcccagagaccaatcttcacattcttcagagcactctcctggggagacatccccagacataggctgagctccagtgcagagcggccaaggcagcagccaattcactgagcagatcccacgctgagtttcttaaaggctttcagggttcttgtagtgtttttcagtttttatttaaattcagaaagattctacacacatgattttttaaattcaagaacttctatttctaggatattttcaacatatctcttctttgaaagctgacagtattcaaatgatgtcagcaaaagaaaaaaagcaatcaaggcttttcctgttctgttcaactatacatttctgaaatggtag

SEQ ID NO: 476084 - DNA, 642 bp, Homo sapiens
agagtgcagtgggcatgatcagggcagccttactggagcctcaacctcccaagctcaagcaatcctctcacctcagcccccaaggagctgggactacaggtgcaggcccccacaccccactaacttttttatacttttttcgtctggaactcctgcaagcagccctcccacctcagcctcccaaagtgctggtaagacagccaggtgggaaggattccttggcagaatctccttttgacctgagcactgggaggaatgcaccctgtggtggagccttgggaaatttgcgccatttgcagtggggaggagcctggcccctccttttcctaggtggaacctgggattcagtctaccaggcaggaagcactctggctttggggagagtctctgtttccctttttttctttttgcccaataaattccattctcacccttcaaggcatctgacttcaaaaggggagggggtgtatgaacagggagtaggtcacaaagatcacatgcttcaaagggcaaaaaggagaacaaagatcatatgcttctaggccaataaatatcacgaggcaaagggcaaagcaaagaccacaaggcaaagggcaaaatcaaaaactcctgataaggttctatgttcagctgtgcacatat

SEQ ID NO: 476085 - DNA, 926 bp, Homo sapiens
gactttaatttcttttccttacttctggatgccttttctttgctggttatatttttttcttatacccacagatgtgggggtccctagtcctctttttacttcatacctcctactgactgcttttaccattgctgttgtgtggacagacttgaaatcttgccagcagtctgactgcctaagctccagttctaaattctcccctcgacagttccatctgatgctcctgaaggcatctccagttcatcacgctctgaagccctttattcctcccagccccacatcagctcttccttcttactcccctgtttatgttaagagcactaccagttccctccctgggctcaaactctggaaggattttattgtgaatgatgtggaagggactgaaaggttctgcatagcagggtgaaaagttctaaaacatatcacactgatggctgtgtgaatagatagggggatggagagacaagagtggaaactgggaggctactgcaacagtctaggcaaaggatgagacgagaggtgctggagagatggaggagctgtcaaattctggttatattttgaaggtagtgctgacaacacttgctgatggattggacgtcaagaaaagagtcaaggatgattcagaagcaactggaaaaatacaattgccattaactaagctttataaggagactgtgggaagagaaggaagtctgttggaggagggaagttccgtttttggtgtgttgagtttaagatgactatcagacatgcaagtgaagatgtcaagttgtcagttggaatttgactctagcattgaagagagaaatccaggctagaaatatatttggaagttgtttgtgtctggagggtatttgtgttcagagattagcagggttcacttagagagaggtcagcggatggagcctgggtcactgctc

SEQ ID NO: 476086 - DNA, 580 bp, Homo sapiens
tcctcctattaagtccagtttgggtgattttctccaagtgcagttccttgcattttccccttccatgaaatgaggatactaatccctgcttcagagagcacccaaacagaatacaaaggatggagtcatttgatggccagggatgacagtgtgatatggtttggctctgtgtccccacccaaatctcatggctcagaagaagacaagaaaatgaaggaaagtttggaacttcctagagacttgttaaattatgaccacaatgcttatagtgagatgaacagtgaagtccaggctgaggagatctcagatggagaggaagaacttattgagaactggagtaaaagtcactcttgctatgctttagcaaagagactggcagcattgtgcccctgctctatggatctgtggaactttgaacttgagagagatgatttagggtatctggtagaagaaatttctaagcagcaaagcattcaagatgtggccaggcaggctgcatgcagtggcacatgcttgtaatccgagcattttgggagacttaggtgggtggactgcttgagtccagctgtttgagacatgc

SEQ ID NO: 476087 - DNA, 689 bp, Homo sapiens
gtcagccagacggaagagaaagccatttcctgctgatgcatttctgccacgagctgagggtttggggttgtcagtgaagtgaagctgagtggactctggccacatcccttgtgagaaatatcagctgcttcaaaaaccagttcatgtaaaaacttcacatgtaaacctaaaacaaatgaatttacctttcatgatggtttccggctacaaacctagaaagtcccacctacaagagcacaggacccagggcaccataaggcccagtgcccagggactcagggctttgaaaaacctaccttctagcccagaacaggccctgcagtatgtgggaaagtgggtaaaaatactaatgctggagatcttgtggactacatcatgccatctatatattaaaaatgaggaaggtaaaaatagaattcagggtcagtggttggagcatctgtgttctcaagggttctccctcatctgtggtcccaaatcaatttctgtcatcaaggctgaacgccggttcaccagtggagttgttcagtgtggtttgccctgtgcaagtttgggcttccgggttccacgatatgaaccggttgaggagctggtgggggtgaggtgggtattcacacaatgaggctggtgttggcaatggggtagactgaggatggggagcgtacatccagggccatatgcatttctgc

SEQ ID NO: 476088 - DNA, 819 bp, Homo sapiens
tatcacccccacaaagttttccggtgtcaattaattgtgccacacatgggggtatgacaattggagaagctcttcgtgtgtggtcatgtgtgtgcgcatctgagtgtcccattcccacgggagctgagaggagcagagggagaggagtgaggtgtaaagaaagaaacggctgcgatgaagataaagagcagtgggtagcaaagagcagcgtgtgtgaggcctgcagctgctggagcttgaacaggaatcagacgagggctgactcccctggctccgggccccctgtctccacacatcctaccccaattcaagaaactctaaacctggttatgtggacagggaccatcgctcacagttccgcaggctgcacaggaagcatagtgccagcatctgcttctggcaaggccatagggagtaagccaattatggcagaaggcaaagggggagcaggcgcctcacatggcgaaagcagcagctggagagagaatggagggggaggtggagggtgccaagcctccttcactcttgaattctgtatgcctgcaggcttaacaccacgtgaagccaccaagtcttatggcttgcaccctctggaactggagcagcagcctgagctgtacctgaacccccttgagcctaggatggggctggagcatcctgaatgtgggaacagtgtccaaaggctgcacagggcagccaggccctgggcctcacccacacagccattcttccctcctacacctatgggtctgtgatggaaggggctgccttgaagatctcagaaatgccttcaacatcttttttccattgtcttggcaa

SEQ ID NO: 476089 - DNA, 1044 bp, Homo sapiens
tacaccgcggagaccgcgtcagcccagcgagcacagaaccttgtccttgccgctgcgccttgcgtccgcacccgccgccagctcaccatggatgatgctatcaccgcgctcgtcgtcgtcgacaactgctccagcatgcgcaaggctccccaggccgtcttcccctccattgtggggcaccctaggcaccagggagtgatggtgggcatgggtcagaaggactcctatgtgggcaaggaggcccagagcaagagaggcatcctgactctgaagtaccccatcaagcatggcaacgtcacgaactgggacaacatggagaagatctggcaccacacctacaacgaggtgcgtgtgactgctgaggagcaccccgtgctgctgactgaggcccccctgaaccccaagctcaaccatgagaagacgacccagttcatcatgtttgagaccttcaacaccccagccatggatgtggccatccaggccgtgctgtccctgtatgcctctggagaagaccctcacccagcacagctacagcttcaccaccacgctgagcaggaaatcatgtgtgacatcaaggagaagctgtgctacgtcgccctggaattcgagcaggagatggcctcggcggcctccagctcctccctggagaagagctatgagctgccagatgaccaggtcatcaccatcgacaatgagcggttccgctgccccgaggcactcttccagccttcctttctgggcatggaatcctgtggcatccatgacactaccttcaactccattatgaagtgtgacgtggacaaccacaaagacctgtacgccaacacagtgctgtctggcggcaccaacatgtaccctggcatcacagacaggatgcagaaggagatcaccaccctggcgcccagcacgatgaagatcaagatcattgctcctccccagtgcaagcactccgtgtggattggctactccatcctggcctccacgtccaccttccagcagatgtggatcagcaagcaggagtaggacgagtccggcccctccatc

SEQ ID NO: 476090 - DNA, 669 bp, Homo sapiens
ttaagagttgatgatgcctcatggccatgagaagggactacggggaaaagtgggctttcctaaagcctttgctttctctcatctgattacaaatccaaccaatttcatgcgttccaattcgaagtgctcaacctaccctcatttatctatagttcgtcacagccctcaagattgcttaggggatgggggacctgtcttagcactacttatcttaagaacttccctgaaaccccctactccctacccccagagattttccactcccttccaggagcccccattccactggaagtacacttctttgaaacctctgcaaagctttcctggtcctgccgctccttccctttcttcagccactactcggcactactcaggcacttcggaagcagtgactcaggagaccagcaggtggcacatgggaaccagactacacactcctgtggcccaggacaaagagatgggagaggaaggatttcgtgcaaggccagctggctgatttcctcagtgttggcggattgaatgctgcccatgaggactacagaaatcttcatggactgcaggacctcaatgattaaagacagggaggcagggaggagggcaagatcagggtgacactaaaggatggggacattacagtcagtctttcaacctctgctaatcctctccctt

SEQ ID NO: 476091 - DNA, 739 bp, Homo sapiens
gtaacaacagctgccgctactctaactcacgtatttggctatgccaaaagggcttgtgatggttaatattgaatgtcaacttgattggattgaaggatacaaagtattgatcctgggtgtgtctgtgagggtgttgccaaaggagattaacattggagtcagtgggctggggaaggcccacccacccttaatctggtgggcaccatctaatcagctgccagcaaatataaagcaggcagaaaaacgtgaaaagaatggtctctttgtgcacgttgatgagagtttctttaggatacaaatggctgttcattgcacagttccaaggtttgtgcaatgcagtgacccaactgacatcttcacagacatgcatgcagtggtggcaaagaagggagggggtgagaacataggctttgaggctgggcagactccactggactcccaaatcacctactggctgtgtgactgcttgttttgccatctataaaatgaacacttcacaggattgttgaaagaactaaatgaaataatgcatgaacatgtgtttggcatgtcataagagttcaataaattgttgatattttgttgttattgctataattattatgtttaaatatcccttctgaactcctagccaatattttcatctgcctttaaatatctctccccagacaactcttatgaatacatcaaactcaatatttccaacactgaacactttagcattcttgggaaatgtatt

SEQ ID NO: 476092 - DNA, 703 bp, Homo sapiens
ggttgcagcggaagtgtgagggaagggcagcactcctggaccacgagggtgaaggggacagagcccatcccagggggcagtggcagcctggcaatgaccctgtcaggatttgaatgatagcctggggctgaagcacacgccaaggcgttttcaacactaagcccaggaagaaagcagtgcaaagcagcgtctcttgtgtgcagtcactgctgtggacgctcaagatgcacgcagtgtttcagagcagtgtttatccggccatgtgcagctcagcaggggcccagaaactgcttccagatccctacagcaggttccagggaaatggaggaaaggcagcggctgccgccctggtggacacgttcccaggccctcgcggggatctgttgaacccagggagcttggagaacgggcagcatcacgtctctcccttggcagcttctgcctctgcgttggtgtctctgatagacagaaacgatagtcagggcagagtatcagccctgcaggagggcaggtccccatggccagcatgcccagggtcacaggagactccaaggcctccctctggagcaggtgtccctgccagcgaggagagacagacggcgctctgtgtggtgaccactggctgggactggcagctctcggctccgcacagactttgacttggcagctgttgtcctgttacctaaattctcagttcaacttc

SEQ ID NO: 476093 - DNA, 803 bp, Homo sapiens
tacttggtcccccagcagtgccggcccaccagcgctgttctcgatttctcgccgggccttagctgccttcccacgggggcagggctcgggacatgcagcccgccatgcctgagcctcccacccactccatgggctcctgtgcggcccgagcctccccgacgagcaccaccccctgctccacggcgcccagtcccatcgaccacccaagggctgaggaatgcgagctcacggcacaagactggcaggcagctccacctgcagccccggtgcgggatccactaggtgaagccagctgggctcctgagtctggtggggacctcaaggtttgtgaatgcaccaatcgacactctgtatctagctgctctggtggggccttggagaacctgtgtgtccatactctgtatctagctaatctgatggggacgtggagaacatttgtatctagctcagggattgtaaacgcaccaatcagcgccctgtcaaaacaggccacttggctctaccaatcagcaggatgtgggtggggccagataagagaataaaagcaggctgcccgagctagcattggcaacccgctcgggtccccttccacactgtggaagctttgttctttcgctctttgcaataaatcttgctactgctcactctttgggcccacgctgcttttattgagctgtaacactcaccgtgaagatctgcagcttcactcctgagcccagcaagaccacgagcccaccgggagcaacgaacaactccaggtgctaccttaagagctgtaacactcacggcgaaggtctgcagct

SEQ ID NO: 476094 - DNA, 1399 bp, Homo sapiens
tcctcgcccccttccagcttcacccgaggacaccaggtgcactggaataggctttttcaatctcgactttccaatcacgatccacaatcccttcaggatggctgcccaggtgggtgctggtttcctgcaggggctcgcacccacatggctgtctccctcatgggtgggttcagggggatgccacaggtccagagctaatcctgtaggtgccaaggcagcctctggagctctcacaatcacagaggcttcagagagctttgtcagctggcagggagcatccaatcacgagagcatctggacctgttggtccatctccacttggtcattccatgggaagcacccactcactagaggtcttgtgagacttattcactatcatgagaatagcactggaaagacaggtctccatgattcaattactgcccccccagatccctcccacaacacgtgggaattctggcagatacacttcaagttaagatttgggtggggacacagccaaaccatatcactagagaatttcgacctgtaggtccatctccacttggtcattctatggggagcaccattcactagagtatctgggccagaactcactttccttcttggctctcatctctgacctctttctggcacctgccctgacatgacccctgtggggtccagggggaaaagatgtttcacgtgccagccatggaggtcagctctggttgcagagctagctggagaacagagcagagaagacctggaatggagacggcgcaatgagatgctcctgcctgcactgcctgggctcctacttgcctgataagttgtgtggtctcagcatctggagttgttgtcacattttctctcactgttcctcacccttccactttaagaagcattaggtttcccatcatcctccttttatactccatgagcaattctgtcttcattgccttcctatcctttaggcctgcatctattcctcctgtctttgcccagttgaagtagaaaacatctagtccagtgtttttgtttttcaaatgtggactatattaatactcttcttaggaggctacagtcctagcacaatttttttaatactgtatttttatttttatgctaatctaaacctaattacttttactagttatgatgacaaaactttttctacagtgaaaacgtgcagttaaacggtatccctgcaggctaaacctctgcttcttatgtatcctcagagaaatgcagagaagatctatatattttccacatttaaaaatgctcgatgttacattctcacagaccccatcctcttggtcactatttagcacttggccttttgaagaactttagggttagtgaggaaaggacactgggaactgggtactccccaagcacacagtggtgttcccgt

SEQ ID NO: 476095 - DNA, 1477 bp, Homo sapiens
gccttcagacagcagcccagctcgacgggacctggaagagcatggtgtggaaactgaaagaatgcagctgcatcgttgtcgtcatccctatcacctcatcatcttcatcatcacctcctcctcatcatcatcctcatcgttatcttcatccccatctcctccttctcatcatcatcctcatcataagcatcttcatcaccatcctcttcctcctccccatcatcctcaacatcattttaatcaccatcctcctcctcatcctcataatcatcttcatcaccatcctcttcctcctccccatcatcctcaacataattttaatcaccatcctcctcctcctcatcctcatcaatccatcctcctttttcttctccccatcactgtcatcatcaatcatcttcatcaccatcctcttcctcctccccatcatcctcatcaccatcttcatccccatctcctcctcctcgccatcatcctcatcatcttcatcaccattgtcctcctcatcattatcttcatcaccattgtccttctcctcctcctcaccatcatccttaccattaatcatctttatcaccatcctcctactcctcaccatcattctcaccgttatcttcaccaccatcctcctccatccccccattatcctcgtcatcatcttcatcaccatgatcctccttctcctgatcatcttctccatcaccatcattctccttcctattatgctcatcatcatcttcatcaccatggtcctcctcctcctcaccataatctttacgatcatctctttctccatccccctcctcttcaccatcatcctcaccatcatttccatcaccatcatcctcctccttctccccatcatcttcatcatctctatcaccgtcttcctcctcctccccatcattcttaccatcatcttcatccctgtcttcatcttcctcctccccatcatcctcctcatctctatcacaatccccctcctcctcatcatcattctcacatcatcttcatctctgtcatcctcatcatcatcatcctcatcatctctatcaccatctccctcttcctccccatcattctcaccatcctcttcatccctgttatcctcctcctcaccatcatcatcatcaatgatcttcatcaccatcctcctcctccccaccatcctcatcatcatcttcatcaccatcatcctcctcctccccattattctcattatctccaataccatcatcctccttctccccatcatcttcatcatcttcattaccatcaccctcttcctcctcaccatcatcctcatcgtcttcatcactttcctcctcatgatcttcatcaccatcattatcctcatcctccctctcctcaccatcatcctcatcatcaatcatcttcatcaccatcattaccctcctcatcacaaacatttattgagcacttaatcagtgcaggtcacttggtaattgagccccac

SEQ ID NO: 476096 - DNA, 1456 bp, Homo sapiens
ggtgcagtaacccagcccctgctgagcgctaagcactccacacccagttccaggccataagggcactgggtccagggagctggcaggagggctgctgtgctcaagggaagggctctgggcggcaggccagggcaatggacgcaggcagtgtgcaaaggcacagatgcacctctgctcacctgctcagcctctaacacacctgtatgccagacattgccacaccgcccaggagctgccaggccaggagccaggaggccgcgagtctgctgctctccaggacgcctcctgcatgtggttctcatttggcacggctgagacgcggcagtgttcttgtcctggctccaagtaaaaaccctctccttgaaaactcaggagaacagggagaggtggtgtcctcagaatctctgaaagccaaaaagtggctcaaaaagatgcattcatccaggctgggcgcctggcagggtgctgaaggcggctccagctcatgccacccggagccaccagcgtctgctagagaaccctggcatccagcctccccagggtcagaaaaatacacatggagtgagagtcaagtgtatttaaattcctgggaaatgtcaaagtgctaattaagcctaatattctccaggtggccagctcctatggcaacactaaagctgtgtctgtctcctgcaccaaccaacagccatggaaagcggcagccatggaggatgcaggaatttcttcccatattcaaagtaaagagaagaccagtacttagcatgagctgaccatcgggtgaatactttgtgccttgatttttttgtaatgatagaaaagaaacagcattctttgtgagatttgctttcatgtttttagtatgagttagtctgtttagcgaatgcatgggatgaatgtgattcagctccttgcacatcttgcacccccagtcccctctggttcctctgcttagtgctcccaggtaggaagaggagactggaagcccctgggactctcgagaaatgccacctggtttccttgcagcaagcgcagcgcaatttgccaagtattaagctaactcccctgaaagcctgttgctctgcagcccctataactagcagcatctgagccatccccaaggtttgggccccttgtctcctgtctaggcagggctccattcatggcactcgtgaggacaacttgttgggctatcaaatgtcactctgttactcccatgcagaaggcaggtttgtgaagcaatgatgagttattccaagcaaatgccagggctggacagggcgttgatgctggaatgcagggtgagagacgttgccagcttccatctcaccaccaaaagtgcgagggtgcatctgccccatacactggcccagccccttcaggtcctgtgcctccaagctgtggaggaaaggacacacggccttcatgtgctcaggcctgtggcagtatttttttgatt

SEQ ID NO: 476097 - DNA, 998 bp, Homo sapiens
gaggaggctgggatcctgcggcctgcaggtcatgctgctgaaggcgggggattcacgtccctggggtgccggaagtgaagccatcagcaatgccccaacaagagctctttgaagtcttttgcttctatattaaaatcaggagagatgaacgctctacacccaaagtctatccagagcccgacactcctcgcacaggctgctccgtggccggaaccgcccacctctcccacgtggacccgagcagacacctcaccactctcctccttcagcccttcccatctgttgtctacacaaacatggaaaccagcagtcctctaaaacattccacccaagccttccaatggcctcactcagagaagcagccagaggcttctgggctatgctggaggcggggtgggctctgccccatccacccatgtggcatcacatcactccggatgcctgttcctctccagtgcccgacttctccccacccctggggcttgctgggcatggcgttcctgctgtcctctgcaggctgctctccacccgacggcccttggttctcctctgctcctccagtctccactcactcgcaccttgcagggcctcctccctgcccccatctaacgttccagccctcctgaccttcccttctgcctcctccacaagcaacccctatcgtgctgtggggtttcttatttatctgatgactcgcttccacaccaaagtataagccttaaagagacacacattcctgtgtgtttactgttattctgtcaatatctagagcagaaagtacttggtcaatagttttcaaatgaatcaatagatgagggaagtatccttcatcccatattccttgattaactgttgatttctatccactcaataaaaaacatggagtaaagagcaaaattgctctattttcaaactgtcttcccttgccataacgcaaatagaaacagagtatgaaaaggtgaaaaacaatttgcaattaggtaaattgcaaaaacatc

SEQ ID NO: 476098 - DNA, 840 bp, Homo sapiens
gatgtgcgactccgtggtgagaactgaagatgcatgaggatgaggggcgctcgatccctgtcctctgtgatctggtacaacagaatcaacccctgcatggtgggccccagtgagcagcctgcgggatgcacggagccacccagaaacacacagaatggaaacacagagagttacagagatgtgatccaggtgggggctgggaaggggcttcctgcagaggtttatacccaggctcgtggagaaaatgccctacgagggaccaagccaaggactcaagcaaacgcagggaatgagacagcgtttccaggccagaatgcgggagcccttcagcagaatcaggggttaggaagctcggtgacttcaggcaggaaggcgatggaacgggaacagggtctttctgtttcacgtgatggaacaggaacggggtccttccatgtgggaaatgctgagcctgcgctgccaaccgcctccgggtgagacatcttgtggacagctgggacaggcggcagagttcaggcctatactttatattttaaaagctcaaattattttataatctcctgaaaatacatcatcttgccatttgctttcaatactgcactgcgaccttttataatctttcaaaaacatgttctccctttggataaatgagaaaataaatagtattcagtgaagaccaactactgaattattttaaaatatcttgtttataaaaggtttttaccagtgagaggatttaagagttgcttggctcttgaagccagcagagacttctgtgtgcattgcttcatttgtgggggaggactctagccccacatggcagatgaaaaactgtgcctc

SEQ ID NO: 476099 - DNA, 613 bp, Homo sapiens
tcgaccttgtccatgttatacacaaaattcctgcagcacagtaggcatgtatcttcaacagcaaagggtattcacctggggagaaatatggagtctatgtgttgttgtgaagggcagatggagaacgagtgcataaacagcacagtaaaacccaggcctattagaacatggaaccacagtcatcactggaatctgcagtcacagcggaagccccatcacgggggctcagaggtgaagcgggaagaagctcggctgaaaggaaagctcggtggaggtgagccactgacgtttcacactgagaaatacggcaggtgggcagtgccattgacactttacactgagaaatatggcaggtgggcagttctgaggcgagtgcaagcttccccatccacagtgaagctcaggtcttccacagcaactcctggttgccttcccggtcttctggactctgagcactccacgacctcacttgaattcctgcgtgtgcttccgtaaattgtagaagcaaattttaccctgagttctttcagaaaaatagcagtagaggagacaggccccaaggaagagtgtgtccttatttaaggcaagttttctagtctgttttatttattta

SEQ ID NO: 476100 - DNA, 525 bp, Homo sapiens
ggcacctgctgtcaccaggcacagtctcccctgtcttgaaatgtttgcagtaagagctgcagctgcccagcaaggctgttgggatcttgatgacacagcggtcagtgccctgtagggagcccggttcagggctgctgcttcttcttgcagttcaagatcaaggtgtcagcagggctctttctgaggaccacgaggggatctgccccaggcccctgcttgagtctcaggggaatgacagtgtgaatgtgcgtattatcgaggtgaagtcagtcccgtcagcaatgatgggcccaactgtccctgcccgtctttgctccaacgtcctaaaatacacctcaagtctggcactgtttttaaactccttctatgatgggtcttcgtgtccagcaacaagctggagcggcctggtgtggtatgtgggtcacgactcaattgcttcaatccctttcttccctgagcaatccccgctctcccaggtgcaactggtcagttcaatgaacctgaccttcactgtattctaagcac

SEQ ID NO: 476101 - DNA, 752 bp, Homo sapiens
gcaagcaccatggacctcccatcatgttcactgccgaagaccccatagtgttcactgctgtggaccccaatctcaccaccaagggccctcacatttttgcctttacagaccccagatgcctaagccaccactccccttcccctactgctggagctgccctagccagtgtgacggttggtgctgccctagccagtgtgacggttggagctgccctagccagtgtgacggttggagctgccctagccagtgtgacggttggagctgccctagccagtgtgacggttggtgctgccctagccagtgtgacggttggagctgccctagccagtgtgacggttggtgctgccctagccagtgtgacggttggtgctgtggcttcaaacccaggacagccactgtccatgcccacaaatgtccctcccaccagcagcccctgcaccactatcacatgcatgctcacgctcatacagctcccaccgccagcccttgggcttgctttcctggaggcaatcacaactagacaactagacctagacgtgatgctgaagcccccacagccaccgtggatttccccaacagcttttggcactgagggccacgcaatggccagtgtcatagatcccagctgcctgagtcgctgagctgccacctgaccctctggagctagagccactgcgtgacgcagagccacccggtgccctgcacaccaccagacccagtgccataacgtgcttctgcacgcccttctcagt

SEQ ID NO: 476102 - DNA, 1335 bp, Homo sapiens
ccgaggctaccggtgggtatcgaatgccctcgagttgttcacggtccggcagccgccccgcatcggggtgtgcctgggcctggtccccgcaggtggctctcggggccggttctcggtgccgccggttctcggtgccaccagttctcggtgccgccggttctcggtgccgacggttctcggtgccgacggttctcggtgccggttctcagtgccggttctcggtgctgccggttcttggtgccggttctcggtgctgccggttctcggtgctgccgattctcggtgctgacggttctcggtgctgccggttctcggtgccggttctcggtgctgccggttctcggtgctgccggttcttggtgccggttctcggtgctgccggttctcggtgccggttctcggtgctgccggttctcggtgctgccgattctcggtgccgccggttctcggtgccgccggttcttggtgccggttctcggtgccggttctcggtgctgccggttctcggtgctggttctcggtgctgccggttctcggtgctgccggttctcggtgccgccggttctcggtgctgccggttttccgtgctgacggttctcggtgccggttctcggtgccggttctcggtgctgccggttctcggtgctggttctcggtgctgccggttctcggtgccgccggttctcggtgccgccggttctcggtgctgccggttttccgtgctgacggttctcggtgctgccagttctcggtgctgcccccgccccccaggcaggacccaccaccccctctgctctgcccgcagcgaccctgtccctgcaggccccgcgccccaaagaccagggacctcgcccatccaggttcctaaatatgaaggaaatggcggtcaaggacaggaaagagtaggttttcgttatcttagtgaaatgaatgggggctcagtagatgattctggtttcgagaactctcgctgcccccatctcctggcactgactcctcagccaccagcggggagctgtgcagagcccggggactcactggggtgggtggagaacgtgtcctgtcacccagagccaccaacaaatgccactttctacgtgtgctgagaccttcgaaatatcagggatgtctgatgggagctttaatcattactttctgaaaaaaaaatctctatctctatctgtatccatatatacactgagctagtttacgtggtgtataagaggggtttctctcttgcttattgggggagccacgaagtcattactgaactcagtacaatttttaaaagacttaaaactatccaacccctacttcattttcaaatgttcacct

SEQ ID NO: 476103 - DNA, 623 bp, Homo sapiens
tttatgaatttgtgttgggccacattcaaagccgtgctgggatgcatgcggagcacgggccatgggctggacgagctcggtggagacgaatgtggaggatgtgactctggagatgaccaagcaagaggagggaaggtcttcctggacccgccccgaggcattcgcagggttggaacccctcagccccgtgcagctgagggcctggagccgagaagtttccattcgacggtaaccacaacggggacatccctcaatgagatcaacgtttttgtctgtgttgctcactgcaccctcagaacacagaacagtggctggcacataataaacactcaacaaacattgattaactggaaacctgggagtgattatagcaatgggtcctgcacaggaccgactggatttgggggttggaaaaatttataggaatgcattctgggcaggcctgccctccgaaaccccaatttcctcgctgtttgtcttcatgccccctctttcctcccatgcagggcccagccatgtggacaacggggaggagctggggctttgggcacagccctgctgcagagcctgggcctgagcagctctttgtgagccagggtcctgtcacatccgtcttctgtgcc

SEQ ID NO: 476104 - DNA, 1198 bp, Homo sapiens
ccgcggaagaaggcgttttcattactctgatactaaattaaaagctttctttgtccttctgtctaatatggagcactggcattgccagcccggcacagtggcgctggatgacagggactacaccagaatcatgagggcagccatcctgggaccgagggaaaaggcacagcatttgattggcgagtctgtttcttgtctccgggctgctttatgcttttccctccagcattgtggcccctccatccccaagtttatagcattctgcgagcctcgggtaagagagtatttccatcactggccctggtgcatgaaagccacactgccaacttgtcattatcaccagtctgggttcctttccgatggagtaagggaaactccaggcccagactggaagaagcttatctccgccggggaaatgtctgcaggagattccactggccctttaagcaagaaacgacttcacagttgaaaccttggtttggaagactcttgtttcaaatctcggcagcatccaatgagccctcctcatcagctgatggtgaagtagctgcatatcaagaattggtcttcccaaagcctaggctttcaggagaacttggaagttttcagacaaaaaagaacggtgtttgtaaaccagttaccaaacccaaaccttcccctaaccacacaatacctgaagtcaataattagctcagagcatgaaataaaaaatctaaagtaataataatttactgaaaatatatttctgtcttcaaaagttttaacaagtatgacctcatttaatgtctttccctctgaatgtaagtaatggtagtgctaatgccttagctttctgcacgactgaaataagacactgcttgtgaagatgtttttgttgttgtctcacaagcgcttctgaaacatttgctaagcttgacccaactctgaatcccgctacattttaaagtattggcatcataccgagcacattctctgaccacagtgtaataaaccagaaattaataacaaaaagatgactagaaaatactcatatgttttaaaattaaacaatgtacttccaaatagcatgtgccaaattaaaaatgtaaactaaaaattaatatgaagtaaatgacaaggaaaatactccacatggaaacttacaaaatacaactatagccatgcttaagggacatttatggccttgaatgtgtatact

SEQ ID NO: 476105 - DNA, 1373 bp, Homo sapiens
agaagccccctctgtcttcctgcagcacaggaagcaggtgacctgagcaggtggggctttcagcaggtgacctgtacaggtgcggctttcagcaggtgacctgagcaggtgcggctttcagcaggtgacctgagcaggtggggctttcagcaggtgacctgtacaggtgcggctttcagcaggtgacctgagcaggtgcagctgtcagcaggtgacctgagcaggtgcggctgtcagcaggtgacctgagcaggtgcggctttcagcaggtgacctgagcaggtgcggctttcagcaggtgacctgagcaggtgtggctttcagcagagcagaggaagctgcggagacatgaggactaagtgtcacgtgggatcctgcgcaggagggaagactgaggggacgcggatcaaggacgccctgagctgatgttgattatcaacactgcctccatgacgctgactaccgacgccgcctccacgacgctgactaccgacgccgcctccacgacgctgactaccaatgccgcctccatgacgccaccaatgtggcctccacgacgctgaacaccgacgcggcctccacgacgctaccgacactgcctccacgacgctgactaccgacgccgcccccacgacgctgactaccgacgctgcctccatgatgctatcaacgtggcctccacgacagtgaccaccaacgccgcctccatgacgctgactaacgacgctgcctccacaacgctgattaccgacactgcctccatgactctaccaacgtggcctccacaacgctgattaccaacgctgcctccaccacactgactaccgatgccacctccacgacgctgaccactgacctggcctccacgatgctgaccaccgacgccacctccacgacgctgaccactgacctggcctccacgacgctgaccaccgacgccacctccacgacgctgaccactgacctggcctccacgacgctgaccaccgacgccacctccacgacgctgaccactgacctggcctccacgacgctgaccaccgacgccacctccacgacgctgaccactgacctggcctccacgacgctgaccaccgacgccacctccacgacgctgaccactgacctggcctccacgacgctgaccaccgacgccgcctccacgatgctgattaccaacactgcttctatgactgaggcagatgcaccacaccaggaaaaacgttcacggcatcagaaagtggtgtggggcttgtgggattccagtactgctttctcagtttttctgtaaatgtaaaataaaacagagttctaagaagtttgcttaaaaaaaccacatccatgtcagacatttcagacatgtggaaagcccc

SEQ ID NO: 476106 - DNA, 793 bp, Homo sapiens
tccttgccctccttcctgaaacagctcatctttgtcctggaaaaatgtcatgcttgaggcactttggcccttgggaagaacaagagggaagacgggaacctcctttttctggagctcctactgcgactggaccttgctggccggggccagcacctgctcctggaatgaattaatcagcaaaatcattgcagcccccacattattttcaacaaatattaaggtgttctctaatctttctcccattttggttattcatagtgtatcaccactatctgaaatcaccttgactatttgtctaggtgaattatctgtctccccacgaggatgtacactttatacttacaaggtcctgttcatctcactagtccctggttcttcctgtctaaaacaatactacgcctgtagtaggagctcagctgctattcaggtcaatgaaaggtatgaaggggtgactgaataatgatttaatgcaacaaggtaggacttcaggtgcccttggcggtcctgtcattagcggagtcattgtggaaagaaatgcaccagtgctaagtagaattaagcacgtaaataaagcagtcgatttgttaggttaatcccttggcaatagctctcagtttattttatgggcacattcttattttatttcattatcatttattagattcaaaatattatgagagccttgaggacccatttaaaataatctccacatccacagccatcgcagattatgacaacaaatgtgcttaattgaatcatgaactgtcacactgactccgctgccccacgctgc

SEQ ID NO: 476107 - DNA, 677 bp, Homo sapiens
acacacttaaactctatgaaaatggttctgtgtctgttctctaagattaggagctcccttctttcacaaataagggaaaagtacactgaaaaaaaatgttttgccgtgctgtgtcctctgcgagtgtgtattcagaactacaagaaatcactttgttccttctcctgtgtactcacggaacttgattcttgccctgagaagaaggcaggaaccggacacctccatcaccctctctttttacactttccaacatttctccttaatgtctttgtgtctatggttacccccaattttaccctgcggtgttcttcagatgagaaagactgcaggttacctactggagtttcactgccccacatggcctgctggagcctggccttggggtagaagctgtgaagctggtatattcactctgtgccaactcctctcctccaagtgctaattccagcccagaaactgcctgctttggagcatgatgtaaacttggcctcccttcatgctacatacagaccacggaaatgggacaaccaccccagggtgctctgggaccagcttgcattgatttgcaagagtgattgttgaacattctgcaatttccaagctggctgttccatcatttgtagcttgaaaccagaagttgattaaacatggtgggaccatttataccatggtacttg

SEQ ID NO: 476108 - DNA, 833 bp, Homo sapiens
cagtctgccagctcagagacagcaggagcaggagagctccagcacgatgggggtggacaggtggtctcggctgcaggggtagcatggggacggaggcggccggcccgaaggaccatgggtcagaagctgagtggcaggccctgcagtggccactgtgagtgtggggtgtggctatgctgtgaccacacgaccaggctgagggctgcttggagcctgcatcccaggctcacgctggccaggctcatcactatctgtactcagagctgggttgaccgtccttccgggcctccgtgtgtgccctggactgacctccagcctggggtgtggacagcagcatgctccctccagcaggctgccttgccctcctctgcaggcctttggctgctgcggccccagctctgggccatgagccgggctgggtcctttggcaggcctccgctcgttcatcccccaagagatccacgatgccaagaaggtggccggacagaggtgaaaagccagctctggaggtttagatgctatgttcccgacttcctcaccatgcttcttcctgacgtccttaactcctgcctctgagcaaagttcctgtgcatgtttcagaaattaagaatgatgaacaagggaacactgagagggagggaacttttgtgaattgatgatgatatttaggagccgttgctggaaagctgtaactgcctgaactagcggtgggtcaaaacttggtccagttatctcaaatacccacttgtatgtttctgggtagtcttttcaagaattaaaggaaagtgaaaaaaaagaaaaaaaagcatcgtttctcagcctttctcatttac

SEQ ID NO: 476109 - DNA, 1210 bp, Homo sapiens
taactgtccagaaacatgtgcacatgaggtgtggagaggaggctttcctgcccagcttgggatctgcaggggtgggcagaggtggcacaggccttgtgggcagaggtggcacgggccttgtgggcagaggtggcatggaccttgtgggaagaggtggcatgggccttgtgggcagaggtggcatgggccttgtgggcagaggtggcacgggccttgtgggcagaggtggcacgggccttgtgggaagaggtggcatggaccttgtgggaagaggtggcacgggccttgtgggcagaggtggcacgggccttgtgcgcagaggtggcacggaccttgtgggcagaggtggcacgggccttgtgcgcagaggtggcatgggccttgtgggaagaggtggcatgggccttgtgggcagaggtggcacgggccttgtgggcagaggtggcacggaccttgtgggaagaggtggcacgggccttgtgggcagaggtggcacggaccttgtgggcagaggtggcacgggccttgtgggcagaggtggcacggaccttgtgggaagaggtggcacggaccttgtgggaagaggtggcatggaccttgtgggaagaggtggcacgggccttgtgggcagaggtggcacggaccttgtgggcagaggtggcacgggccttgtgggcagaggtggcacggaccttgtgggcagaggtggcatgggccttgtgggcagaggtggcacggactttgtgggcagaggtggcacgggccttgtgggcagaggtggcacgggccttgtgggcagaggtggcatgggcctgccttcaggccctggcaagcctcacctgaagtgctcacggctctcgcgcgcagacatggcttcacccccactgtgcacactggcgctgggccctgcagatgctgcccgtggggctgctgacaccctgggccagcgggcttttccacggagaatggaaacggcctggactgaaactgcacaggggcagcagagtcaacagggcagctgctctccctgctctgtgactctcaacgggactcaagcatttctccttcgtagtggagtagcaaactcgtgttaaactaggcaatgcctgttactagctgaaatttagtgaagaaaaccaattatacacaagtttatatattccattaaatattgcatgaaataaaataatgcttttttggaaggataaaa

SEQ ID NO: 476110 - DNA, 721 bp, Homo sapiens
aggctgattggcgagtggattccagcgggactcagggcatatcctgttagtgatgatactaacaggacgcttcagcttcaggtggcaggaggagaaagaaattggcccaaacacgctgaaatcaaaaggaaattccttatctcctgtggcccaaacggcagcttcattccaggtcctgcgctttgcatatgcagaagatgtcaccacaagggagggaggatggggacagggtcccaggtccagggcccctagtctcagccggttcagctgccctaacaccagagcccgggtagtaaccacagacatctatgtccttgtctttctcggggttggaaggcgaaggcctctggcaggggtcacagaccagcaaatccgtcagccaagtgctggaagtgggggagggcgtctagaggctcacggcagccacatgtatccaaataggaggacaggagaaaagaatgaagactattccatgaaatcaaagaaaaacagaaaaagtggagataactgagaaaaacctgtgaattactaatttcaaaacgagcaactagcggaaacaattgttttctcaattccaccacccagagaccctgccgggaatagaactatgttttcagtcctctccggttctcctttatcctggtcttcatctgtccgtttctctctttctctccctttctgtttcatttctctccttctcaacctttccgtacatatattt

SEQ ID NO: 476111 - DNA, 791 bp, Homo sapiens
tttgtcagagaaagtggaggccggagcccgcggctcacccccagcactgccagggctgagaagcggccaatgcccagcctgacgctggacagcttgatcaaaataaataagcaaactttattcaatgtcagatgatgataagcaggagggcagccggacctgctggcccagaagagccagctgcaggcatttcctcccagcatggaattcagtgatgcccagaagagctacctgcaggcattttcccccagcatggaattcagtgacgcccagaagagccagctgtaggcgtttccccctagcatggaattcagcgatgcccagaagagccagctgcaggcgtttccccccagcatggaattcagtgatgcccggaagagccagctgcaggcgtttccccccagcatggaattcagtgatgcccggaagagccagctgcaggcgtttccccgatccgcggaattcagtgatgcccggaagagccagctgcaggcgtttccccccagcgtggaattcagtgatgcccggaagagccagctgcaggcgtttccccccagcgtggaattcagtgatgcccggaagagccagctgcaggcgtttccccccagcgtggaattcagtgatgcccggaagagccagctgcaggcgtttcccctcagcgtggaattcagtgatgcccagaagagccagctgcaggcgtttcctcccagcatggaatttggtgacatcactctgagggcttgaagggaactggccatggtgggtgtggaaagccccgggtgatgggtgct

SEQ ID NO: 476112 - DNA, 803 bp, Homo sapiens
tacttggtcccccagcagtgccggcccaccagcgctgttctcgatttctcgccgggccttagctgccttcccacgggggcagggctcgggacatgcagcccgccatgcctgagcctcccacccactccatgggctcctgtgcggcccgagcctccccgacgagcaccaccccctgctccacggcgcccagtcccatcgaccacccaagggctgaggaatgcgagcgcacggcacaagactggcaggcagctccacctgcagccccagtgtgggatccactaggtgaagccagctgggctcctgagtctggtggggacctcaaggtttgtgaatgcaccaatcgacactctgtatctagctgctctggtggggccttggagaacctgtgtgtccatactctgtatctagctaatctgatggggacgtggagaacatttgtatctagctcagggattgtaaacgcaccaatcagcgccctgtcaaaacaggccacttggctctaccaatcagcaggatgtgggtggggccagataagagaataaaagcaggctgcccgagctagcattggcaacccgctcgggtctccttccacactgtggaagctttgttctttcgctctttgcaataaatcttgctactgctcactctttgggcccacgctgcttttattgagctgtaacactcaccgtgaagatctgcagcttcactcctgagcccagcaagaccacgagcccaccgggagcaacgaacaactccaggtgctaccttaagagctgtaacactcacggcgaaggtctgcagct

SEQ ID NO: 476113 - DNA, 1556 bp, Homo sapiens
tgtcctccttccagccacctctgctctctctctgcatcctggtgcagagctgtgggcaccgcgtggcattgccccgcctcccagccatgctccgcagacccctcctcccactgcctcctctgagcgcaaactcatccatcctgtggctccactccggggagcctgtgcctgggactctggccaggctcgaggctcgagcccctgggaacagtcagtccctgtcagctggcagggagcatccaatcacaagagcatctggacctgttggtccatctccacttggtcattccatgggaagcacccactcactagaggtactattccgttttcatgctgctgataaaaatatgcctgagactgggaggaaaaagaagtttaattggacttacagttcctcatggctggggagcctcagaatcatggcaggaggtgaaaggcatttcttacatggtggcagcaagagaaaaatgaggaagaagcaaaagcagaaacccctaataaacccattaggtcttgtgagacttattcactatcatgagaatagcactggaaagacaggtctccatgattcaattactgcccccccagatccctcccacaacacgtgggaattctggcagatacacttcaagttaagatttgggtggggacacagccaaaccatatcactagagaatttcgacctgtaggtccatctccacttggtcattctatggggagcaccattcactagagtatctgggccagaactcactttccttcttggctctcatctctgacctctttctggcacctgccctgacatgacccctgtggggtccagggggaaaagatgtttcacgtgccagccatggaggtcagctctggttgcagagctagctggagaacagagcagagaagacctggaatggagacggcgcaatgagatgctcctgcctgcactgcctgggctcctacttgcctgataagttgtgtggtctcagcatctggagttgttgtcacattttctctcactgttcctcacccttccactttaagaagcattaggtttcccatcatcctccttttatactccatgagcaattctgtcttcattgccttcctatcctttaggcctgcatctattcctcctgtctttgcccagttgaagtagaaaacatctagtccagtgtttttgtttttcaaatgtggactatattaatactcttcttaggaggctaaagtcctagcacaatttttttaatactgtatttttatttttatgctaatctaaacctaattacttttactagttatgatgacaaaactttttctacagtgaaaacgtgcagttaaacggtatccctgcaggctaaacctctgcttcttatgtatcctcagagaaatgcagagaagatctatatattttccacatttaaaaatgctcgatgttacattctcacagaccccatcctcttggtcactatttagcacttggccttttgaagaactttagggttagtgaggaaaggacactgggaactgggtactccccaagcacacagtggtgttcccgt

SEQ ID NO: 476114 - DNA, 1546 bp, Homo sapiens
gagttctgctagcatgtgcggctctgtggagcctgggatggcagacacaggagatgccagccctgcgccttcagacagcagcccagctcgacgggacctggaagagcatggtgtggaaactgaaagaatgcagctgcatcgttgtcgtcatccctatcacctcatcattttcatcatcacctcctcctcatcatcatcctcatcgttatcttcatccccatctcctccttctcatcatcatcctcatcataatcatcttcatcaccatcctcttcctcctccccatcatcctcaacatcattttaatcaccatcctcctcctcatcctcataatcatcttcatcaccatcctcttcctcctccccatcatcctcaacataattttaatcaccatcctcctcctcctcatcctcatcaatccatcctcctttttcttctccccatcactgtcatcatcaatcatcttcatcaccatcctcttcctcctccccatcatcctcatcaccatcttcatccccatctcctcctcctcgccatcatcctcatcatcttcatcaccattgtcctcctcatcattatcttcatcaccattgtccttctcctcctcctcaccatcatccttaccattaatcatctttatcaccatcctcctactcctcaccatcattctcaccgttatcttcaccaccatcctcctccatccccccattatcctcgtcatcatcttcatcaccatgatcctccttctcctgatcatcttctccatcaccatcattctccttcctattatgctcatcatcatcttcatcaccatggtcctcctcctcctcaccataatctttacgatcatctctttctccatccccctcctcttcaccatcatcctcaccatcatttccatcaccatcatcctcctccttctccccatcatcttcatcatctctatcaccgtcttcctcctcctccccatcattcttaccatcatcttcatccctgtcttcatcttcctcctccccatcatcctcctcctcatctctatcacaatccccctcctcctcatcatcattctcacatcatcttcatctctgtcatcctcatcatcatcatcctcatcatctctatcaccatctccctcttcctccccatcattctcaccatcctcttcatccctgttatcctcctcctcaccatcatcatcatcaatgatcttcatcaccatcctcctcctccccaccatcctcatcatcatcttcatcaccatcatcctcctcctccccattattctcattatctccaataccatcatcctccttctccccatcatcttcatcatcttcattaccatcaccctcttcctcctcaccatcatcctcatcgtcttcatcactttcctcctcatgatcttcatcaccatcattatcctcatcctccctctcctcaccatcatcctcatcatcaatcatcttcatcaccatcattaccctcctcatcacaaacatttattgagcacttaatcagtgcaggtcacttggtaattgagccccac

SEQ ID NO: 476115 - DNA, 1763 bp, Homo sapiens
ggtgcagtaacccagcccctgctgagcgctaagcactccacacccagttccaggccataagggcactgggtccagggagctggcaggagggctgctgtgctcaagggaagggctctgggcggcaggccagggcaatggacgcaggcagtgtgcaaaggcacagatgcacctctgctcacctgctcagcctctaacacacctgtatgccagacattgccacaccgcccaggtggccagctcctatggcaacactaaagctgtgtctgtctcctgcaccaaccaacagccatggaaagcggcagccatggaggatgcaggaatttcttcccatattcaaagtaaagagaagaccaagcccacagcagaggcctcactcacgtgcgctctgggccagagcaggcctcaggcacttcagctccagggagaccggccagcaaggtcgggtatttggaaggagctcaggaagcgttcccctgcaggaagccgaaagcaggagagacaccaggggccgggagatggaattggaatctgcagcattcttcaggggcggaagccccaagccgtccatgtgaggctgttggccaaggggctgaggggagggcacgaagtaactcactagagacaagacacaggtgagtcctccaggcacccactcacaggaacagcgtgaaggtcagctttcagaaacttcagtaattttaaaaggatctgaagaggactttaaaaatatctaagatccttaaagggatctggtgggaagagactccacaaaaacacacaggacatgatgaggtgaggagtgcaaatcagggcctaattgctgatgattcatctgcagaaataaatacttttgtcacgctggatccagacacgcatgtgacctcgttttagcttggttatctgtgaaaactctatttccaaataataatatagttccaaacaatcaaatacaattttaaatattaccacattttgaagtactgagggttagaatttcaacatatcctttttctggggaacaggacacaactcaactcttaataccctcttacctgttagtgtgattaccagatattttagttatttgatattaatattggtatatcagagtttcactatcatttcccttcctcttagtttcaaattgtttctttgttttaagaatgtcccccataaacagcataaaactggattttaaatttcaatctcctaacctctgtcttgtacaaggtaagataactctccgtgtatttattgtgactattgattcaattagaataattttaatttgcattctattcttactttgctttgtttttctcctcttcccttcttctggcttgtgttggaacggaaaagttttatctctttagctcattccctttgaaggatgtttggatgtttatagttttacatcctattaaagattacctaaacatcttagtatgctattcaattttatattatcttacaaagttttgagttattcattatctctgctctcctttcaacaaagggtcttgccacagtttaaccctccttggaacccctcggtcttctgcacctgggatacctgaaatgtacgttcccccttaacaaataagacatagaaatcagctttgccaagagcttacaaggccattttgctgagagcttcggctgttttccctcttattcctgaaggctgttttcttctgctgaactacgtgtattaataaacctttcatcagtgcttgcaggttttaaattcagtttccctaccc

SEQ ID NO: 476116 - DNA, 558 bp, Homo sapiens
actaactttgcatctgcagaatacatgggtgtactccttcctttttcaaatacttttatcaaattcaatccagactcaggccaggaaaaacacatgtgggctgagctgagaaaccaaggcaaggagagaaatggaatatttgcatccctgtcagacgagatgcaaacagatgtgaactctgcagttgctggcatctcagaggcttgcaggccagttccggggtcagcttcctctcacccgggctctgctgatgtcctggtgtttaggtgcaggggactgagactggtgcagggcccttggcacaccccacagaaccacatggtgcccatggcacgcgaatgcgactgggcagtgctatcactcggaaaagggcctacagtcactgttactgtgaggcatttgcaagggccgtttaatacaccgcgtggaaaccgtgttcagtgtctactcacgcagaggcctgccttctgacacacacatcaatcaagctcagaatcgtgccgttcaaccatacctcttgttgttgttaatttgcaatttatgtttttgcgcaagaag

SEQ ID NO: 476117 - DNA, 2986 bp, Homo sapiens
gcccagcagggctgcgtgggactcgggctatgtgggactcggactcgggctgtgtggactcgggctgtgtggactcgggctgcgtgggactcggacttgggctgtgtgggcctcaggctgtgtgggactcgggctgtgtgggcgtcaggctgtgtggactcgggctgcgtgggattcggtctacgtgagactcgggttatgtgggactcaggctgtgtgggactcgggctgtgtggactcaggctgtgtgggactcaggatgtgtgggactcaggatgtgtggactcaggctgtgtgggactcaggatgtgtggactcgggctgtgtgggactcgggctgtgtggactcgggctgtgtgggactcgggctgtgttgactcgggctgtgtgggactcgggctgtgtgggacttgggctgcgtgggacttgggctgtgtggactcgggctgtgtgggactcgggctatgttgactcaggctgtgtgggactcgggctgcgtgggacttgggctgcgtgggacttgggctgtgtggactcgggctgtgtgggactcaggatgtgtgggactcaggatgtgtggactcaggctgtgtgggactcgggctgtgttgactcaggctgtgtgggactcgggctgcgtgggacttgggctgcgtgggacttgggctgtgtggactcaggctgtgtgggactcgggctgtgtgggactcgggctgtgtggactcaggctgtgtggactcgggctgtgtgggactcaggctgcgtgggactttggctgtgtgggactcgggctgcgtgggactttggctgtgtggactttggctgtgtggactttggctgtgtggacttgggctgtgtgggactcaggctgtgtggactcgggctgcgtgggacttgtgctgcatgggactcaggctgtgtgggactcaggctgtgtggacgtgggctctgtgggactcgggctgtgtggacttgggctacgtgggacttgggctgcgtgggactcgggctgtgtggacctgggctgtgtggactcgggctgtgtgggacttgggttgcgaggtactcaggttgtgtggactcaggctccgtggactcgggctgcgtggactcaggctgtgtggactcgggctgcgtgggactcgggctgcatgggatttggtctacgtgggactcgggccgcgtgggatttggtctacatgggactcgggctatgtgggactcaggctgtgtgggactcggtctgtgtggactcaggctgtgtgggactcaggatgtgtggacttggtctgtgtggactcaggctgtgtgggactcaggatgtgtggactcgggctgtgtgggactcaggatgtgtggactcgggctgtgtgggactcgggctgtgtggactcaggctgtgtgggactcgggctgcatgggactttggctctgtgggactcgggctgtgtggactcgggctgtgtgggactcaggctgtgtggactcgggctgtgtgggactcgggctgtgtgggactttggctgtgtgggactcgggctgcgtgggactttggctgtgtggactttggctgtgtggactcgggctgtgtgggactcaggctgtgtggactcgggctgcgtgggacttgtgctgcatgggactcaggctgtgtgggattcaggctgtgtggacgtgggctctgtgggactcgggctgtgtggacttgggctacgtgggacttgggctgcgtgggactcaggctgtgtggacctgggctgtgtggactcgggctgtgtgggacttgggttgcgaggtactcaggttgtgtgggactcaggctgtgtggactcaggctccgtggactcaggctgcgtggactcaggctgtgtggactcaggctgcgtgggactcgggctgcgtgggatttggtctacgtgggactcgggccgcgtgggatttggtctacgtgggactcgggctatgtgggactcaggctgtgtgggactcggtctgtgtggactcaggatgtgtgggactcaggatgtgtggactcggtctgtgtggactcaggctgtgtgggactcaggatgtgtggacttgggctgtgtgggactcaggatgtgtggactcgggctgtgtgggactcaggctgtgtggactcgggctgtgtgggactcgggctgtgttgactcaggctgtgtgggactcgggctgcgtggactcgggctgcgtgggactcgggctgtgtggactcgggctgtgtgggactcaggctgtgtggacttgggctgcgtgggacttgtgctgcatgggacttaggctgtttgggactcaggctgtgtgtacgtgggctctgtgggactcgggctgtgtggacttgggctacatgggacttgggctgtgtgggactcgggctgtgtggacctgggctgtgtggactcgggctgtgtgggacttgggttgcgaggtactcaggttttgtgggactcaggctgtgtggactcaggctccttggattcgggctgcgtggactcaggctgtgtggactcgggctgtgtgggacttggactgtgtgagattgagactctgcctccttccggtcactcagctttgctccttccggtcactcagcttgccccaacttgcgtgtggtcattctcaggctaggtgtaagaacacaccattgcacctaagtagacgaaatccagtggagaggggaaaatctcaatctctcctttgaaaataaagttgaattaaatcacagacaagcaaggactgctgacagttctgggagaggctcgagggactgactgtctcttgcttcagccaggagaaaagagaggtcccgggggcctggccgcccgagctcaggcgtcagccggtatcagagccggaacaggaggactgtgcgggagattgttggactcaccgcgtcccagtgggacttggcagctctggccagttgaatatgagtaggtgtttaactcaagtagaagaggaaatc

SEQ ID NO: 476118 - DNA, 758 bp, Homo sapiens
gttccctttcctgtgtccaggtaccattggaaaagcacagtattagcatgggagtgacccagttttccaggtgctgtctgtcacagcttcgcttggctaggaaagggaattccctgaccccttgcacttcccaggtagtatggaggacagtgcagagactgactttccattccagtgacatcaccatcatccacatgtttgattgggcaaaatcttcaagctctccaaatgaactatttcacagcttctcacacctgtgcttggcttcagattgggatggcacttgtgtgaggtgttttcttctacctggaagactcaggcacttcaaattcaacattttggctcacaaactggctcctaacaagcaaattaatatgtattctaatatatgtaacacaaacataatgcacatattttttaaatcgaattttcttaaatattttcccaactaatacaaaacattttcaatttttacaagagaatcttgtaaaacttgccccatagacatacttacgtatatatatatgattattatagaatttattatatatgtatataaagaatgaataaaagaaaaaagtaaaataaaacaaccattaattattaatatgtaaaatccccagaagaccttcactctgttgaagaaagtcttctgaacagattttcagacataaactcccttcacagcacaactggggacgaatttcatgtctttgacagatggatgagaaagcgtgccaaaaacagagtcattttcc

SEQ ID NO: 476119 - DNA, 563 bp, Homo sapiens
agactttatgactaaaacaccgaaagcaatggcaacgaaagccaaaattcacaaatcggatctgattaaactaaagagcttcttgactaaaattttcagtttttatttcctggagtcttttaaactgaagcattgtgaagaccaaaaacttaaaagacatgttgattgtaggacatatattagtttactcaaatacgcaatgtgtttgtttcaaaaccacatgtataagttgactactatttctgagtgggataaaaaacttcatggaaacagtttatatagagaagagggtccaagtttaaaccacaaatggctccaatctgtagaaggagagtgcagaaagcaaaatgaacaaacagaaaactgccagaaatggagactagaagaaacagcaagacacctcagaggacttgctggtaaaaatatagaagaattattaatattcattgcatttatacatgtgtattgaaaagtgtttggaaaacctaaatgtaatatattcacttagtctcaaaaggattggaataaacctttgtccctaaaggaagttcttaaaaggaatg

SEQ ID NO: 476120 - DNA, 3168 bp, Homo sapiens
tctcttccgatcgaaggtttttatcaattgaagagtttgtggttccacgggcttcaaagaatgaaggcttggaccgcagcagtgagtgttacagctcaatttgagaagcatgcagacctaaagagagtgctgggtcaagatttattaaagccaaaaattcaggcacagctgaccagtattaacattaaaaaagataccttcagactgacaaagggaatctttgtaataatgcgacaccaacatgatagacagcaggccctgatagaaatccaagtgttttaccccaaaatatatttctttgacatagttttaaatggccctgcaaagctgtctcttttggggaaaaatctacattctgtagaaaatctctgtacctttttaagtcagacaagaaacatttgcaatctattctctctgatgcctgctacctggaggcttcatctacataataagaaccttggtctctacaccctcttatcttaagccagacactcccttctattgatttcaggtctttagataaaactctttcaaccaatagacagtcagaaaacctttgaatccacctatgacctggaagtccctctccacacttcaagttgtcccacctttccagacccaaccaatgtacatcttacatgcattgattgatgccttatgtctccctaaaatgtataaaaccatgttgtagcctgaccaccttgggcacatgttttcaggacctcttgaggctgcgtcacagtccattggtcaatcatatttggctcagaagaattctcttcaaatattttacagagcttgacacttttcatcaacagactgcataatttttcctggcattatacatttctatattcacttcaatcactctgatgctcatgatttagcacataaattatacggaaaatacttaaatgtaatgttcaatttcacaatatagattagattgttactgagcaagatggccttaaaagttccccttggcttgactacactgtacacaggtttcttctctggtctttgatcttcctttccttagagcatttactttagaaaacttgaaaccaaattctttctctgtgactttgagatataaatcttcttttagcttcttgatggttttacatcccaggattctttttcatgtggaccttggaactgtccttttgaaatgtgatcatcaagaaagacagtgctcctattctctcctttctgtgggaggggaggagcctgctttccattagtaccaattatagaacacagataacctaatcacaatgacaaattttttccctaaaatcttccaatttttaaaaaatttatttagaaggaacaaatgcagatttgttaccaataatttttcagtagctcatcctagccttaataactctctggctttgtgtttcaatagatttgggttcagtctctctccctttatttctcttcagccctactgcaatcatcttgaataaagtcttccttacctctttaactcgtctggtgcaatttttctttgacactaccagatgttatgctttatttgaaatgttttccaaagacatagggccagagatttatataaaagtataattagattaggcaacaaagttaaataggagaaaaatacatttaagaatattatgtgcatattaaaatgatttcatacatttaatatagaaaaaattcattaaatctaaaacatatttttaatgcacttgatatggatctagttttaataggaaaacagtatcaatcatacatatatttgtgtgtatgcatataatattcatcaaaacagcaaaaggatacagtggtcttcactagaaagagatgttattttataatttaaaatttattttcttatatttctaccagaaaggggtcccaatccgttctccatgagagggttcttggatctcatgcaagaaagaatttggggtgagtccataaagtaaagtgaaagcaagtttattaagaaagtaagcaaggcaaaactgcagaatgtggtatctgaattttcaaggtgccagggtgacttgtataccattttcgcacctagaaactagtccttaactggttatataatttgtagatatcttctctgcatgtgtaggttagtctattaactttgaatgtggtatgtttgttaaacatacggttaaatgaagtcgattttgtccagtttttcgttcttggttgtacattttatatctcatctacaaaatctttcctactgtcactacataaagatattcttctctattttatttttaaaattacacaattataatatttatgtttaagtctttaatctatctgcaaattactaacatataaagtgtgataggcaaatccaatttcatccttttttcctgttacattattacattggttcattgactgtctctgtgctggtatcatactgtttttattgatacagatttatataaaatcctgataaatggcaaacttattctcttttttaaaaactgacttagttattgatcacttattaactttttattaagattttaagatcagcttgtgaagttctgtaaaaaaagccattaaaattttgaatggaattgcattgaattcataagtctgttgaaatagtatgttttatgaatacattttataatataaaaatattttacaaattctgtgataaattttacttggttattatatatgatatatatataacatcatatataataatatataatatatactaacatataagttatatacataaatatatttgtgcattggattaagtttactattattatctttagcatgtatagacctattttttatatgagagattacctataattttactggtatagcctttacccagttttaaaattaaagtaatattagtttcctaaagtacattgagaagttttagcccttcttttttattttttaggacaatgtacatgcattcatatcatctgtcctgtgaaggtttgatagaacttgtatgtataaacttatgggaaggagaagagagtgttgtatgacaaaagcaatgtgaaaatattctttagcaatacagatagtgttgatttgctccaagaagagaaagactgagaattgaccatataatttagcaaaatggatatcattgttgattctgattggagtacatctagtgac

SEQ ID NO: 476121 - DNA, 476 bp, Homo sapiens
tctgcagcaagcatgggcagtcccgcagcccctttactcacttataagtgtacttctgtgtatggcttaaattttcgccttttttcagggggctcacaactttttatcttcagcttatacctcccctctgagcatcagacctatttatttatccaactacctaatttggggttctactgtatatctatcttaagagaaatgcaaatcaaacttttcaaaactgaatcttacgtttctcctacatcttggttctcagcaccattccattgcagacaacaatcatctcaggccacccttggatctcccagtgctgatcataatctggaatgtcaaaatcccaaaggagcaaaatccctaatatttaaaattcctaatgtaaaatatcccaaaaatcacaatcccaaacaaacagttacaatcctatatttcaaaattctggaagttgaattctgagaaagggattagattgacttggc

SEQ ID NO: 476122 - DNA, 988 bp, Homo sapiens
aataggaacagctcgtctatagctcccagcgtgagcgacgcaaaagacaggtgatttctgcattttcaactgaggaaccgggttcatctcactggggagcatcggaaattgggtgcaggacagtgggtgcaatgcactgagcgtgagccgaagcagggtgaggcattgtctcagccgggaagcgcaaggggtcagggaattccctttcctagtcaaagaaaggggtgacagacggcacctggaaaatcgggtcactcccaccctaatactgcgcttttccaatggccttagcaaatggcacaccaggagattatatcccacgcatggctgggagagtcctacacccacggagcctcgctcattgctagcacagcagcctgagatcaaactgcaaggcggcagcgaggctggtggaggggcgcccgccattgtcgaggcttgagtagtagtattccatgtattacactaccctcattactactgtgttaaaatcagtcttcccattttgtggtttaaatcctccaactttgttttcttcttcaagattggcttatttatacattttagaatcaacttgtcaatttctaccaaagatgggagattttgacttggattggattaaatctgtagataaatttggagagattagcttaattacaactttgaggtttcaaatgactaacacgatatatacccctatttacttagattttctgtccttttgcctctttcctacccaacgctattatccctttattatcctgtcttcatctcttccaccgctggaaacagataatatcttgactatagtagctgaaaaacatgactccctcacgtcaccgggtcaccagtgggagctgaattgtttaaatatgaatgatggaactgaaggagcatgagcaaacttcagggtatttcattgttagctgtggtgtttgacagatgtttgtagagtccttccatttgaaatgtctttctaggttgaatt

SEQ ID NO: 476123 - DNA, 597 bp, Homo sapiens
aaactgctttttatccagtaaaatatgaaagctggaatagggtcaatttgtttggaggtctccctggggcacccaggagactcctcagagcatgctacaaccaagcacacagaactgctgctaggttattttaaaaggcctgcctcctcccttgggctgggggagctggagcagggttgtatcacccggctgacagataaatataaagtaaaacctcagatgcttttctgtggtgatctggcactgcaaaaccagaagaccatcaaaaagtctcccaattttgctataccccagtgggaccctctgtctaaaccaaacttccattgccagctttccctgtatcaaaccactatggtatgcaggggcatactgagcggtataatggacattggagtctcagaagtggggaggatggaaagaggggtgagggatgaaaaattacctatcaaatacaacgtgcactatttgggtgatgggtatagtaaaagtttttgtttctaggcatgtgttcctgtttggggtggagaaggtttatttttaataattaggaaatgttttctagttcagagatgagataattattttactaacctagta

SEQ ID NO: 476124 - DNA, 3436 bp, Homo sapiens
gcattcagtctgtgaggttattccacagcaacccagaatggtagatccaccaatgtcttggaccgggcacctggaaaagtgcagacattcaatgccaacacatgaaagcagccaagaggggagctgtacccaacaaagccacaggggaggagctgcccaagagcatgggagcccacctcttgcatcaatgtgacctggatgtgagacatggagtcaaaagagatcattttgggactttaagatttaatgactgctctattggatttcagacttgcatggtgcctgtaaccccttggttttggccattttctcccatttggaatgggtgtacttacctgatgcctatacctccattgtatctagaaagagactgtgggctggacaggaaatcagaagggaatatattgcagtctcaacaagtagaagacgaagtgctaccaaaaggagtcctgccacaagcacaaggaacaattttctcctcagggaatttgccaggttttgaaatccgaagtgtttgcaggataaagaattaagctcaaaaggacagaatttctaagcccacagtagtacaaatcagtgtaatatttgttaatcttactataacttatgccaaataagttaaattttatttattctatcccctggaactttaagcatctaaattactgaagaaagctaaatgattgacttgaattattttcaattcggttaatacattactaagaagtgttttaaattgattatagaagagtaatcaacgctaagggcatactaccctgaatgtgcccgatctcctccgatcttgtgggctaatcagggtcgggcctggaacactcttccactggtttgtcccgtgactcgttccttctcgtcaactatgtctcatctcaaagcggatatctgaaagacctgccccacccatattatttaaaagcctgctcacatctttctattttagttagtctctggcacatacttatctcttatttccttcttagcacctgtactaatattgctcatttggatttgtaagcacagatctgtatagtccttcctctcaccaaagtttattccatgagagtgagaattttgtattatgcttcctgttgtatacttagcttgttgaacactttctcacacaggagagatactctgaaaatgtcaagttataaaatgaataagatattgatttaatctgcttaaatttataaatgcctagtaaacactaaaataatgtataaaatatttaataattatttcattagctatgagtattgttttaactaaaactaaatttttatttacaaatgaatggataagttattacttagctatacaatagaaacttacttattaataaaagcaatgaattattgacatgcaacaacacggatgagtattaaatcactatgatgagcaaaatatctagacaaaatatgtatgtactgtgtaatatcctttatatagatgtatacataatagagttctctctacaacagaaagccagtcaatggttgcgcatgtacagaatctaaagacatgaggaatattaatatgtttggtgtgataaaaatgtatttttattggaattttggttccatgaatgtatgcatatgtgaaaatccatcaaattgttcactttaaatatgtacagctaattgtgcagaaattattcttcaatgaatttgcaaaaaatacatccaaatgagaaataatttggattggtgtttcttggtgtttcattaggaaattcttaaattgaaagtaagcttgaagaggaatgtagctatttattactagtgataatgcatgtaccaaacaccatggtgataggtttttacattccaatatgcagacttttgtgttaggtacccacattctgatgatgagtgtcctgctgcaaaattgaacaatgtcaagtgaatcaaacttcagtgcagtgataataattgtttttcagcagagaggaaagtatattgactatttaaaatatagtttttctgccttctcagtaactggcattaatttttctttgacagctggattccagctgtcatccatttcaaagagaaattatttagatataaaatgtttagactggttccctatcatgtctgcttcattttatagttaaaagaaaaatcacaaatccagcctatacataagtgggtcaactccatctcatgatgaaaaaactgcaacatcaaattaaaagaatatggtagaaaaaaatgagagtaaagatttgtggctctttgtaatgtatctatcaagaagtgagaatgaacaaagggtgcttgtaaacttagcatactgaatacagtgcttctcttgtctttgtcgtaaagaaactggccttcctgttatttcatacatctataatttatgctggcttctatattcactagtatgctaacataacttctatgtcacaagaaataataaattagttgaaataggacaatattaatgtaactctgcctcttgttgaatttagtgcttgagaataaattggtaaagagttgtgagccttcgccaatcaaaagcttatataagaagaaatttaaataaacttgaaaataaattgtctacgtgattctatctataatgtgacaagatttggaaggtttttatttttaatcttatggaagttgaaaaatcacaggatgataaccattgctattctattgctatgggtttgctgataatattgtgagactagggtgaattattactaatatgaaaagcgaagaaagaaatgtaagctctgaatctatttattaaaattcctgaggatagacaatttatttaaggcatagattagacatttgtgtggatgttactcattttctccatcttggcatatgtttctaaaatacacgtctggcagaaatatacatggctttacctgttcttatcatcttatacatattgccagggagtacaaagctaatattgatgatcatttagagtaaatattttggaaaatattttggatattttcaatcttctcagcctaaacacttcattttaatgtaacttattttatatttattttatcaaacttttttgctttaaatatagcttattcaaatcatacctgaagattgtgaatgaactataaaaattacaaatttttctatcatcattttcatattcatctatttgaaactaattaatatagaaaattttctgtgacataatatgaggcacatatgttttcaatgagaaatcatcctagaattatattttaaaaataaattgctttgggaatgatattcaaagtattctttctccttcaatttttaaaaataatttgaatacaactactttttttaatatttggtagaactcagcagtgaagtcatcaggttcagggctttactttgatgggacactttttattactgatttaatctccttatttgttattggt

SEQ ID NO: 476125 - DNA, 792 bp, Homo sapiens
gtaggttaaattgttaaaaatgatgaatgtagtttcattatatgtacaagagaaacttaaaaacctgagcctgtttgcaaaaacataccagaaacttggctcccagaggagctccattgccctgagaagtctactgggtggggcactgctgaaaagacaactgaaaatggggaagcatctttggaactgggtaacaggcagaggttggaacagtttggaaggctcagtagaagacaggaaaatgtgggaaaatttggaactccttagagacttattgaatggctctgacaaaaatgctgataatgatatgaacaatgaaatgcaggttgaggtggtctcaaatggagatgaggaacttgttgagaactggagcaagggtgactcttgttatgtcttagcaaagagacttgtggcattttgcccctgccctagagatttgtggaactttaaacttgagagagatgatttagggtatctggtggaagaaatgtctaagcagcaaagcattcaagatgtaacttgggtgctattaaagacattcagttttacaaggggagcagagtataaaagttaagaaaatttgcagcctgacaatgcaatagaaaataaaatcccattttctgaggagaaattgaagccagctgcagaaatttgactcagtaatgaggagccaaatgttattctccaaaataatggggaaaatgtcgccaggaacatcaaaaggtttcttcctaattataactttgtatctgttggttgaccgacctttcctggtccctgcttcttgctatg

SEQ ID NO: 476126 - DNA, 935 bp, Homo sapiens
acatcacacaccagggcctgtcagtgggtcgggggtaggggaatgataacattagaatacctaaagaattttctcttccagagtggagctgatatttcttcagcattccccatctactgcatgaatatgtatcctttaggacctctgcagaaacatggaacaagaagcaggaactgtcaaaaccaactttgccctaactctggaaagagtcaaagatttacagaaaccaagcacaatttgaaccaagaaaaagtcaacttaaaaatagtaaaaaagcattgtgacatcttaactttctctttctccaaactctctcaactgtgcgggactcctgaagacaatagcctgcattccaagtgtgagaccatgatccttgatcccaaagggagcagagcatacctaattcacaaagaattgtctgggtcttttctaacccatcaggagatacttgaaaaactgatgaaaggtgttcatctctgtttcaccgaacttggagctctcccagtgtggaaaggcagcaggctttgttcaaaacacattgtaaagtggggtgaaacccacagctaaaagaattctccctatctcttcataaacagagcccctaataacctattttaacttaactcactatattttaattgatgcatcatttatgtcttccaataagattgcatttcttaagaacattgaccatatttatattcatcattctacttccagtatataggcatatggtaaagtgactaacacatagaaagtcctccatgaaaaaaaaaagactgacataatagaaatagccgttgtaactcacacagaaactgaatttcatttttatggaaatctttattttagtttaagtatttatttaagattttacatttaaatacatgctgtttatttaaaagttacaatgaactaatgcaatctcctttagc

SEQ ID NO: 476127 - DNA, 679 bp, Homo sapiens
gcccagacttatattaataactggtccttagaattgagggcctcttgtggtttggcccctgcagggagctcatggcccttcagttggcacaccccacccatagcgccttatgctgcacaccgggctccccagcattcttctcaatatccaggccctttcactcctgtcttctcccatgcacttccattggccttcctccacttctcctcctgaagaactccaccccacccttcaagagcctgatattttttctggattgtgctgcctgcagggctgggaatgggccacaggaggcaaaggtggaggcagagacaacagtgaagcggctacagcagttactcagatgagaggggagggtggcgtggataagagcagtgggactgatgaccatctgctaccacagaggatattcacatgtccagctgtgctggtgtcattagaagtcagctacaatttccaggcaggacaaatttccatccacacaccagcaccccttcactggaaatcttcttaacagcccagcactcatttggatgtagattctggcataatatggtttttaaattgtgttattctgcaatggtggatcatccacatatctttaaagagacatttgagctaatctcaataccaggtatatttatgttctcttaagctactaatttgttctgatgttatc

SEQ ID NO: 476128 - DNA, 840 bp, Homo sapiens
tttctgagggtgacaccagatcagacacactaggaaaccctcaatgtaaagatggtctcctgtcccaataacgtgagctttacagaggaggatgccagcagaggacccaaccatatcaaggaatggaggatagcaacgaacacaaacagtcatgacttggatccttgctgcattcagaccattggcagctcaaggctgtggaagaaggaacataggagcttgacccagagagagaaaagatttggagattttagtcagcaacagacactgaaggtgggcaaggtcaacatttacaaagttatgacgaaggcctttaaacaaggagattcctaccatcttcttagtaggaagttgtcgttggaggtcaatgaaatggaagccacttcctgcaaaagggatcttccagaactgtggatccccttccctgaaaaaaggttcctcattgcacaaaaggtgtggtaataccaaccttggaggactgttatgggactgaatgagataatagacgtctaaaaaatggcaaattttattatcagaggcatcactgttattatcttacaatgcatgatttatacatatctgctcgcattctgagagttacctttttactttgttgatgatcacattatttcttacagctaattttgagggtggattgtcttcccagaaaatggggagaaataatgtctcaattttttaaaggtagaagacccaggatgaataaagtttcaggtctaagaggaaaaatataaattcttaagctatagaaatggtccttcacctgattttgtacctcacagtaatgtaaaactgaacctgtttcaaagccaccttttctgt

SEQ ID NO: 476129 - DNA, 422 bp, Homo sapiens
ttggctctcagtctatgccacgagaacatgctgtgggagactggcccacagaagtggctctgctgcagagcacagacagatgggggctctggctgtaccaccacctggggctgcctctcccgttagacttcctcttggtagcaggtcaaagccctggaactgttgagccgcctttggctagtgggaaactagagcagaaagctggaaaacaaggaaccttaccaataccctcatcccccatcagccacagcatcagtgtcgtgtggggagggagaaaggaggtgctgaaggagaggacaaggtgcaggaaagaggaggagagaagccggtgggctgtccaacgtgatggctctgaagcaccagtggctcctaggccctttaaggtcaatgtgattaatcacgttccatgtacaaggtgactt

SEQ ID NO: 476130 - DNA, 607 bp, Homo sapiens
ggaggccacatttccaggatgcagagccccgtgctggtgcgtctctgggctccctgccagtcctgattttcataggatggtctcaagccaacaggtctgtctctactttcaaccagcccagcaacagacaaccaacaacctcagagcccagatacaagaggcagcaagggaggaagatcctgctttaaagctgaagccccactgggcagggtccagcgacgcttggtacatgactggcaccaccacacaaatacagaagactgtctggttgcaaatgcatttacagatttggattaaaaataaagtccccggatggacccaccaagcttatattttagaaggatttctttctctctctctctggaaatgttctggactcctgaaaatagaggtttattatggaaatgctgacagacccttaaatagagcactgtatttgcaacactgtaattatgcctccattgaaaagctccaaagaaaacatgatttccttgtgcaaataaatcatgcatggctttaaaggcccagatttggatcatttgaaccataaggaaccatcgtcttccatatgtgaatgaattataaataataatggctttaaaaaagg

SEQ ID NO: 476131 - DNA, 3669 bp, Homo sapiens
ccatttttaagtgtacagttccagtgaggtggaactcagcagagcccaggagcatggcagtgagcacacttgaggaagggttccaaggaggaaggaaacacataggctccttggtggcccccacggcccagccatgccctgaacagagagggtgctggcttgggtggctcatttccatggagctgatgggtctgttgtggccatctacccctccctccagtggccccaaccttctgctgcccctttgcatctgggctgtggccacagccaaggaggcgagagtccggctcctgtcaccatcgttccaccaaattcctcaagcccagaaccacatgggccacatggaagagcccccgttaacaactttaaggaccagcgatgtggacttcacaggcaaaggagccaaaaccatccccagaggcaaagaccacagctcgctcttcaaacctgtgttctgagtggctggccatgatggaaatctgcaattagctgttttaatccctaaaatagctttgctactattgtatatagtcacgtaggaaaagagaaaaccagggaccatcacagcaagtggtgaagagcatggagggagtatctaactaggatgcatggagtgtggaagtgactaactaggatgcatggagtatgggagtgtctaactaggatgcatggagtatgggagtatctaactaggatgtgtggagtaggatgcatggagtatgggagtatctaactaggatgtgtggagtaggatgcgtggagtatgggagtgcctaactaggatgcatggagtatgggagtatctaactaggaagcgtggagtatggaagtgactaggatgcatggagtatggaagtggaagtgactaggatgcatggagtatgggagtgtctaactaggatgcatggagtatgggagtgtctaattaggatgcatggagtatgggagtgtctaactaggatgcgtggagtatgggagtgcctaactaggatgcatagagtatggaagtgactaactgggatgcatggagtatgggaatgtctaactacgatgaatggagtatgggagtatctaactaggatgtatggagtatgggagtatctaactaggatgcatggagtatgggaatgtctaactacgatgaatggagtatgggagtatctaactaggatgtatggagtatgggagtatctaactaggatgcatggagtatgggaatgtctaactacgatgtatggagtatggcagtatctaactaggatgcatggagtatgggagtatctaactaagatgcatggagtatgggagtatctaactaggatgcatggagtatgggagtatctaactaggatgcatggagtatgggagtatctaactgggatgtgtggagtatggaagtgactaagtaggatgcatggagtatgggaatgtctaactaggatgcatggagtatgggagtatctaactaggatgcatggagtatgggagtatctaactaggatgcatggagtatgggagtgtctaactaggatgcatggagtatgggagtatttaactaggatgcatggagtatggaagtgactacctaggatgcatggagtatggcagtgtctaactaggatgtgtggagtatggaagtgactaactaggatacatgaagtatgggagtgtctaactaggatgcatggggtttgggagtatctaatttggatgtatggagtatagaagtatctaacttgggttcaaatcccagcttagtttgaatttcctcatcagttaaataggaataatagttaactgggtcatctgacttaactgagttacctcatcagttaattgggaataatatgagtatctccttacaaggagaaaccagacctgctgacaccttgattttgaacttctagcctccagaactgtgagaaaataaatttctgtttaagccacccagtgtgtggcattttgttatggcagcctgagctggctaacacacgggggaaggccaattagaaaaacagaaggaaggccccagaaaatgctcatgatttcaaatactttgcctgtgatttctcaaacattctagctttctgaagaccttcaagtcttagtctcttgggagatgaaggtagcggggagttaaggatggattcagtttccaagtcctgggatacaagtgtgtagctgcaggcttgcatttctaacaccatccagtcctgatgattctgctgagtgccatcctgtccagttgctccacagtgttccagaaacatttcttacatgtccactcaaacttaatcacctaaatacctgccatttctcatgtacttttgaagggttctgtctgctttgtagtttaaggaaagcatttgatttttctacccttgtaaaaactgcagttgggagaaataattttactttcgcttccaggtttattttgtttaactaaagccattagaaatagcttcagttttacatttttcttcagtctgcttgcaaagtgtgttaacacggtggttgaatttcaatggtttggattgctttgaatgacttctgtgttttcattcccaattcctcacatattggttgctatctaggtgaccagatgaaagagttaatttttttttattgatgtgtaatagatgtacatatttttgggatgcatgtgacaatttgataccctcaaataatcaaataaaaatcttaattattaagaaagtattttcactaagtaaaggcttaaatgtgcatatcaaagttgaaaacctgatgtccccgtagctacaagttcaacttgtataccaagagacccagcagccagatttttctctttgcagaaagtgacttaagacctcacaaagtgaagtccctgggacacatgccatggccctggggagcacagcctctattaggccaggaaataaaaccaccaggaagggtctagcagagttgcactaccctggagcctgtcttgtggcaaacgatgccataggaagttttcacttaactaatataattttgagaggctcatactagatttccagactcattatattttcctaaccatctgatagagccaggtgctgtttttattatcatcatccccattgtacgtgaaaagaaacaggacaagagaggttgtctaaagctgccttctatgtcagttttcctttgtgactgttgcttgccaaccaacagtttgctggtggggtcactggtgggcaggagctgggttctttcactcctttatatcccctcttggcaccttgtaatattaggaacagcatcatgggctatgattctcaatgatatttgcaatttaacaagatgccctcctgtgcctgctggagatgctcccctatggcgaaaccagggacctcttgtgtgctggtactggtaggatcacatgttgtgctccagctgccaaggaaggctctttcctgcagttgatgtgcagaaaacagcagttaggattgacctctaagaggagggtgactcttgagagatgagaatcaagaaccaaaagattcttccccccttactggttttggagtatctggggctcgattttattgaagaaaccaagcctttatacgaacatacatcaaattaacaggaaagcctctgactttttgctgcagaaagacttctgccttaagtattcattctgaa

SEQ ID NO: 476132 - DNA, 589 bp, Homo sapiens
tataaatgaagaaaaggacgccgtagtgaggagaggcaagctcttcatcatatgcctctggctggcctgtgtgtgttgccagcattttcgtgcctcacagatggccatgtggctttgcagaaagtgttcatagacacccaagaagtttgcagcatcctacagttggaacgggaccgagagtatgctgaccaagccacccattttataggcaaggtgggactcggagcagtgaccagtgaggtatctattgctgctcaacaaattaccccaagactcagtggcttaaaacgacaccattcatttgtcatctctcacagtttctgtgtgccaggaattttggagcagctcagctggtcggcacctctttatagcttacagctagacatgcctgtggccagggtcatcctgaaggctgtgtttggcagccgggaggggaaacttgaatggctggggcccctcgggactggaacaggagactcaaggctcattgtcttcttcatggccagcattaaaatattgagggagtcagataagggggtctgatttgggggattttctctagagtgttacctcatttttaagctgtcct

SEQ ID NO: 476133 - DNA, 729 bp, Homo sapiens
tcattgccatacacatcagttagcgtggaaccactgatgaatggacaatctggcctcctggaacccaagtcttgccaattaccttgtaatatctctgttcattcctctctgttctttctaccactgccttgttcaagttcccatcactcctcctgggattcctgcatttattgccaatcaaccccattgtcaaagaataggttttatttccctctcatgcttgagaactctgatggccacctatattggcctggaagtgaagcatttggccataattctcactctgcttgcttctgtcggcgctcttggtccatgtgtttgttcttcccagttcgaatttgtgctcagtgaccttccggactataacttacttgtttgtgggttcccattgtcaaatatggtgtctgacacaaagtagattgttatttgactctgctcagtatgaatgagtgagttttaattagagcaaaagaaaaaattcaggaaggacccagtacagtgactgacacacagtaggctttcagaaagatgcattgaatgtgtaagtcttgagcaatgcctttgcatgcaacagtgttctctaaatgctgtttggttggttggttgattgacaaagccagccaaatcagggcaggctcatctgcttctcttccagaagatgccctggactgaggcttggagacttatttctcagggttaatagagtgagccttgttgagattgtcacag

SEQ ID NO: 476134 - DNA, 794 bp, Homo sapiens
aaagtgaacatgtctgttgaccactgcccagaacaagaaagagaatgtcaccagtgccccagaaacgcccctgtgtccctcctagatactagtcccactgtcctcaaaggccctcctgatagctatgaggatgatgaggatgatgatggaggaagaggaggggaaggagaagaaagaaaaggagaaggaagagaaggagaagaaagaggagtaggagaagaagaaggaggaggagaaggaggaggaggagacaaagaagatgatgttggtgatgataaagatgttggtggtgatgacaatgttgatgatgatgatgaaagaggaagaggggaggggaaaaaggagcaggagaaaagggggaagatgatgtcagtggctgtaatgatgttgttgacgatgatgataaaatgaaagtgttgatgatgttgataaagctgatgatgatgatagtaagaaagacaaagacatgatgaaagctaataattattgaacattcaccatgtcccaggcattgtgctaagcatctcacatttatcgactgaggaaactgaagtgccaagagggtaaatatgagggcaaaaacatcaggccaaggaattaagagttcttgtaagacaggctgaagtgatggcatataatgaagggagtggagatagaaggggctgatagagtggagaaaatgaagtagctaagggtctgcaggtcttaataaggttaaaaacagatgctgtgagattagtggaggaaaatgctagaagcacagtgatccttactggactgtgaaaacttcagtt

SEQ ID NO: 476135 - DNA, 2115 bp, Homo sapiens
cacttgtagcaccaaatatgagccccggctgcagggcacccccttacttgggccgagtaggggtggcagacgaggggcgcacagacacagcgtaccgcgtggtggctgaccacatccgcacactcagtgtctgcatctctgatggcatcttccctgggatgtcaggtcccccgctggttcttcgtcggatcctgcgtcgagctgtgcgtttctccatggagatcttaaaggcaccacctggcttcctaggcagcctggtacctgtagtggtggagacactgggagatgcttatccagaactgcaaaggaactcagcccagatcgccaacctggtgtcagaggacgaggcagccttcctggcctccctggagcgggctgaagtggcctggtccttgtcactgtgtggagacctgggactccccttggacatggtagagctgatgctggaggagaaaggggtccagctagactccgctggactggagcggttggcccaagaggaggcccagcaccgggcacggcaggctgagccagttcagaagcagggattgtggcttgatgtccatgcgcttggggagctgcagcgccaaggagtgcccccaactgacgacagccccaagtacaactactccctgcgacccagcggaagttatgagttcggcacctgtgaggcccaggtgttgcaactgtatacagaggacgggacagcagtggcctccgtggggaaaggccagcgctgtggcctcctcttggacaggaccaacttctacgcagaacaggggggccaggcttcagaccgtggctacctggtgcgggcagggcaagaggacgtgctgttcccagtagcccgggcccaggtctgtggaggtttcatcctgcatgaggcagtagcccctgagtgcctgcggttaggggaccaggtgcagctgcatgtggatgaggcctggcgtctaggctgcatggcgaagcatacggccacccacctgctgaactgggcactgaggcagaccctgggccctggcacagagcagcagggctcccatctcaatcctgagcagctgcgcttggatgtgaccacccagaccccattgaccccagagcagctccgggcagtggagaacactgtgcaggaggccgtggggcaggatgaggctgtgtacatggaggaggtgcccctggcgctcactgcccaggtccctggcctgcgctctctggatgaggtttacccagaccctgtgcgggtggtatcagtgggggtgcccgtggcccatgcattggacccagcctcccaagccgcactgcagacctctgtggagctatgctgtgggacgcacctgttacgtactggggctgtaggggacctggttatcatcggggaccgccagctttccaagggcactacccgcctgctggccgtcactggggagcaggcccagcaggcccgagagctaggccagagcctggcccaggaagtgaaagcggccactgagcggctgagtctggggagccgggatgtggcggaggcactgaggctgtccaaggacataggacgactcattgaagctgtggaaactgctgtgatgccccagtggcagcggcgggagctgctggccacagtgaagatgctgcagcggcgtgccaacactgccatccgtaagctgcaaatgggacaggctgcaaagaaaactcaggagctgctggagcggcactcgaaggggcctctgattgtggacacagtctctgctgagtctctctcagtgctggtgaaggtggtacggcagctgtgtgagcaggcccccagcacgtctgtgctcctactcagcccccagcccatggggaaggtgctgtgtgcctgtcaggtggcccagggtgccatgcccaccttcacagcagaggcctgggcactggcagtgtgcagccacatggggggcaaggcgtggggctcacgagtggtggcccaaggcaccggaagcactactgacctggaagctgccctcagtatagcccaaacctatgccctcagccagctctgacccaggtccgcccagggacccacatggactaaaggcaatgccaggagccctgaaggagccagcagaaccttcccacatgctg

SEQ ID NO: 476136 - DNA, 1623 bp, Homo sapiens
cctggtatagacgttgttccctgtgtgtgatttcaggaccctggaccctggtcctgaggatgcagaggccaatatccgtcggatgcgccggatcattgctgaggatcctgagtggtcactggccatcgtgcccctcctcacagagctctgcattcagcacattatcaggaacttccagaaaaaccctatcctgaagcagatgctcccggaacaccagcagaaggtcctgaaccacctgtcccctgacctaccactggctgtgaccgccaacctgatagacagtgagaactactggctccgctgctgcatgcatcgctggcccgtgtgccacgtggcccaccatggcggcagctggaaacgcatgttcttcgagcggcacctggagaacctgctaaagcactttatcccaggcaccacagaccctgcggtgatcctcgacctgctgccgctctgccggaattacgtgcgcagggtccacgtcgatcagttccttccgccggtgcagctcccggcccagctccggccgggcgaccagtccgactcaggcagcgagggagagatggaggagcccaccgttgaccactaccaactgggcgatctggtagctggcctgagccacctggaggagctggacctggtgtacgatgtcaaggactgcggcatgaatttcgagtggaatctcttcctcttcacctaccgtgactgcctctccttggcagccgccatcaaggcatgccacaccctcaagatcttcaagctgacccgaagcaaggtggatgatgacaaggcacgcatcataattcgaagccttctggaccacccagtcctcgaggagctggacttgtcacaaaacctcattggagaccgtggtgcacgaggtgctgccaagctgctgagccacagccgcctgcgtgtgctcaacctggctaacaaccaggtgcgtgcacccggtgcccagtccctggctcacgctctggcacacaacaccaacctcatttccctcaacctacgtctcaactgcatcgaggatgagggtggccaggctcttgcccatgccttgcagaccaacaagtgcctcaccacgctgcacctcggtggcaatgagctgtctgagcccaccgccacactcctgtcacaggtgctcgccatcaacaccacactcaccagcatcaacctgtcctgcaaccacatcgggctggtgagccacctattctgggcttgtgagggtgggtgtggaatccaactgccaggggtacttgtgggataattgtgaagatcacagagtttacatactacatactgcatcaagtatgcacacatactgtgtatcccaatgattatttttcctttaatccttacagttacctaagtaactgtatattaaccctaagcatatttaaccctaaatatatttaagtatataactaagtatatttaaccctactttctagatggaaaactaagtttcagagaggatagtgagttgcccaagggcatcaagtcagtagcaagtggcaaggctacgattcaaacccaagattgattgaaagcctgagtcctttctaatagactgtgtctctaaaactttcttaaccaagtctgagagtaagaaatgcaatttac

SEQ ID NO: 476137 - DNA, 1425 bp, Homo sapiens
ccgctgtgaggctttagaagcttggcatatgtgtgtacccaatgcacctgtcacccacaaccctacaatagcacatggtcatcataccttctccggaagcaactggaaggagaggaagactctgcctactgggaagtgggggccagcccagctgcccgctcccctcaatataccaggcactgactcactggccctgccatgcccacgccactgctcccgctgctgcttcgattgctgctgtcctgcctgctgctgcctgctgcccgcctggcccgccaatacctcctgcccctgctgcgccgattggcccgccgcctgggctcccaggacatgcgagaggctttgctgggctgtctgctgttcattctcagccagcgacactcgccagacgctggggaggcctcaagagtggaccgcctggagaggagggagaggttaggcccccaaaagtgaggccacaagtcctggcagcagctgtatccacaaaatgctttcttttggagtaggataatcctggcaccagcactgaccgaagcctgcccagtggacagaagatatagtgagggttgtgcatgagagggatctgccacagacatgcctctccactcccaacagaaatgtctttctggaagaatgccttgcatctagcacaaaactgattattgcccctctgtcctccagcagttcctcccaaagaccactcctaatcacctctggcctcaggcgggaggggaactaacacccacccacccctgccctccctgcaaatgggaacatcaaggttcccagtgcttaactgagggacaagtgacaatttagcagagaggcaagatttgaatccagactgtcttccagactcaggacctaccttaaaataatatctgagttgcttatggaggcagacctgcctgcaaagcccagcactcagcaagtgctcaataaatatttgatttgaattctttccatggctttgaaagtctaatcacccagactgctgctctgcaaaacagtttaacctggcctggcagttggtgggggtgggggagaggagagatggacaattgtacaagggtttattttgctacctattccatcgtggtttcagtcctcacagcctggaagttgtttccccctgctaagtttcggtcagtatgtcacactgtgacccagaaatggcttgagtccatctaggaggaagtttgcctggctagctcacagtagggaggaaaatatcctccagcgagtttgaggacttctcagctagtggtggtgggaagaggggtgatacgtttgctaagagactgggtgggaggccacccagggaggcagtgcagaaatgcatccccttgagggtcatcccaccctagaagagactagggttgggtgagttgccttaagaactgacttcatcatttcctcctccct

SEQ ID NO: 476138 - DNA, 1108 bp, Homo sapiens
ctcatgtgactgtcccggaagctgcgggctttgctgcctaagcttcacttctgggtgtgggatgcaaatgagggttgtgttccatgctctcctgcctgctccacaatacagtgactcctgtgtgtgccctcggctgccctgtcaccaggcgctctctgcttgtacgttatcatcagtgctgcgtcttcacttctgaggcctccgtgatgcactccatcaaggatcctaccctgaaccttaatagttctcacaattgcctcggcaaaggcccaccacgggatgactgcagggtggatttacgtgtaaagcgtctcctgcagcagcggaggcattccccagatggcaggagggaacagccagccctcgctgtggtggatggcaaggcctgctccaggagactggcactgttgtggaatttcaccctttctgtggacttttattattcttcctgggctagcttcacctcctgctcaagggtttcgacttgttctacccacacctgtgaaaacagcctcccatgccaagtattcccacaggatcatcctaatagattccaggacctggcggctcctcttccaatgccccaaactcttacagggatcagctttctcctgctcggtctcgaggatgctcagggtctggcctcaaccctgtcatcattgtcaatccctgtggctcctccttccaaggaggccgggcagaacagcaacaggagtaggtgcaaagggacagcagatggtcagggacaacaggtgctcgggggcagcaggtgctcagggggtggcaggtgctcagggacaccaggtgttgggggcagcaggtgctcaggggacagcaggtgctcagttggcagtaggcggtcagggacagcaggtgctcagggggcagcaggtgctcagggacagcaggtgctcagggacagcaggtgctcagggacagcaggcctgggtctagacctgctccagcttgcgtccttggacacctcactcagtcccatggggctccctttccccttctcctggtggttgttgtgagtgtcagataagactttagctccaagataggccatggacacattttggttgctgttcttaggcccttggactcc

SEQ ID NO: 476139 - DNA, 835 bp, Homo sapiens
tgctgcaaggggcaatcccaggaaactaggaggatgttatgttagtttttaatcaaaccctgactaccatggaaaagcaggtcaccctgcaagaagcagagaattttggggatgagctttgtatctcatatagtgccagggaagaggaggagccttatccaaatggaaaaatatcagtaccattggaggaccctaaatggggccccagtggtgaaatgggagaatggaaaaggaaacactttcaggcatgcacactagtgggcttacaaaggactagaactaagcctctcaattactacaagccatccctggtagacaagggattagatgagaatcccactgccttcctagaaaggctaagtgtggccttggtaaagcacacctctctatttcctgatccagtgaagggacaactgatcctgaaggataagtttattacttcggtagcttgtgatatcaggacgaagctgcaaaaacaggctacaacaccagatagcactttagagaacctcctgaaagtgaccaacttggtctttcacaatagggattgggaggaagtccaaaaaagagaaaataaatacaagaaaaaggtagaggctctaatagtggccttgcaggctcacaaacctcagagcccccaagatatacatgttacctgctacgaatggggcaagccagggcaatttaggaaggactgcccaggcaacataaggaagccacctcaaccctatccaatttctgatggggaccactggagggcagactgtttacagagacacaggtcactgggtccagagccagtttcccaaatggtccagcaggactgacaggttcc

SEQ ID NO: 476140 - DNA, 848 bp, Homo sapiens
agctgagtgcagcccaccggctgagtgggtgaaataagcccagcaggcccaagcaaaactcagttcaaaatgggtcataaagcagtggagacaactctcaatgtcagcaatgcatttggtgcagaaactgctgaagaatatacagtgcattggtggttcaagaagctttgcaaaggatatgagagccttgaagatgaggagatagtggccagccatgggaagccaaacttgcaccaaaaagagttcatggtcactgtttcgtggtctgctgctggtctgatccactgcagctttccgaatcctggcaaaatcatttcatctgagaagtatactcagcaaatcgatgagatgcatcgaaaactgcaatgcctgcagccggcattggtcaacagaaagagcacaattcttctctgcaacacccagctgcatatcacacaaccaactcttcaagagttgaatgaattgggccaccagcttttgcctcatccgttatattctcctaacttcttgccaactgactaccacttcttcaagcatcttgatgattttttgcagtttgcagggaaaacacttccacaatgagtaggatgcagaaaatgctttccaagacttcatcgaatcccaaagcacagatttttatgctacaggaataaacaaacttatttctcattggcaaaaatgtgttgaatgtaacggttcctattttcattaataaagatgtgtttgagcctagttataatgatttaaaattcacagtccaaaactgcaattacttttgcaacattacttttgcagcatcctttttgcacctagcttttgatttaaagtgaaagaacacttgaacactt

SEQ ID NO: 476141 - DNA, 1064 bp, Homo sapiens
aagtggggcctgcagaacaatgctgcttggcttcctggattcagctactttcctagaagaatgtacagatggatctctcaccttactgggattcccagcaccagagtctgtaaaactccaggatctctatgcaaagaaacctgagaccgcagcaagtggagctgtgggactgaagcttcctgtcagcaaggcccaggtgtggcccataggacaagaaaaccttcaaggcctggggcactgctgccctgcactacctgctgcttcctatcttctggccgcttcacttccacctccagccatggctcaaagagacacaggtactgcatgggtcatcactctggagggtgcaagccatgagcatttgtggcatccatgtggtgttaagtctgcagatgcacagaatgcaagaataatggaggcttggaagcttctaccaagatttcagaggatgtactggaaagcctgggtgtgcaggcctgccacaggggtggagccactgcagagggtattcactagggcagtgcatattggagccatagcaacaggggccttacttttgagacccaagaattatagagccaccagcccaaagccatgttggcgagcagggctgcctgaagccttgggagccaactccttgcaccagtgtgctcagggtgtggaacatggagtcaaagactatcttggagctttaacattgaatgtctgccctgctggctttcagacttgcatgagaaagcccctcaacagtcaacaggcaagccttgtgatgtggttccaaagcccagggccactggagcttgtatggtactggggcatacgagaagactgggctgtctgtggttgacacagcattgaggcaagctaaaagaccaaacagttttgtctttgaagaatttatctatgcagacttatttcttaatgactcggagtaactatgatttttcagtggtttgagttaactggtaagccaatgtttgcaataaccagtgtattcctttgtgtgacaactgtattagaaaattaaaatattatgatttcttattgatcattttatatttgta

SEQ ID NO: 476142 - DNA, 1063 bp, Homo sapiens
gcggagggcatacaccccccgtgatatggtttgggagcacatcccctccgtgatatggttcgtaatatcctggggtggagaggatgatattactcgcaatatcacagggggtacttatacaccccccagtaatattgtttgcaattcagaggatgtacaccaacctataatattgttcgtaatatccaggaacagagaagatgatattacacccagtatcacagggggtgtacagcttaatgtgatattgttcgtaatatcaagaaaaagaaaaaatggtcttactgccaatatcgcaaggggtgtacaccctcttgtgatattgttcgtaatattaagtgtgggagaggatgatattattttcaacatcacaggggctgtacagccccctgtgatattgctcataatattcagcgaaggcaaggatgatattactcttaatatcacaggggctgtacaccttcctgtgatattgtttgtaatatcaaaaggggaaaaagacgatattactcccaatattgcaaagggtgtacaccaacctatggtattgttcatcatatttagaaggagaaaggacaatattactcccaatatcgcaggaagtgtacacatcccccccgtgatattgtttgtaatacccaggaagggagaggatgacattcatcccaatactttaaacaccctctttgtacacccactgtgataatttttgtaatatccagggggagagaggatgatgttactcctaatatcacagggcgtgtaaccaccctgttatattatttgtaatatcccagggggtggggggaggatgatattactcccagtaaggcagggtgtgtacaccccttttaaatattgtccataatatcaaggggggggagaggatgatattattctcaatatcgcaaacagtgtacatccccccgtgacattgttggtaacatccagggaaaaaaaaaaaagaatattaccctgaatattgtaaacagcctgtgtgtacaccctctgtgatactgctcgaaatatcaagaggaggagaggatgatattactcaatgcac

SEQ ID NO: 476143 - DNA, 1070 bp, Homo sapiens
ttgctagagcagcagtctgagatcaaactgcaaggcggcagcgaggctgggggaggggcgctggccattgctgaggcttgagtaggtaaacagtaggtaaacaaattggccaggaagctctaactgggtggagcccaccacagctcaaggaggcctgcctgcctctgtagactccacctctgggggcagggcatagctgaacagaaggcagcagaaacctctgcagacttaaatgtccctgtctgacagctttgaagtgagtagttgttctcccagcgccgagtttgagatctgagaatggacagactgccccctcaagtggatccctgacccccgagtagcctaagtgggaggcaccctctggtaggggcagactgacactacacatggctgggcacccctctgagacaaagcttccagaggaatgatcaggcagcaacatttgctgttcaccaatatccactgttctgcagcctctgctgctgatacccaggcaaacaggatggagaatgactttgacgagttgagagaagaaggcttcagacgatcaaacttctccgagctaaaggaggaagttcaaacccattgcaaagaagctaaaaaccttgaaaaaagattagacgaatggctaattagaataaccagtgtagagaagtccttaaatgacctgatggagctgaaaaacatggcacaagaactacgcgatgaatacacaagcttcaggacttttgccattggaaagtgtaacaatgggatttgtaatggggttgctgtaatatgcgatgagttcccacctcctgaaaaactggtgactaaagaaaatgacttaatgctttggtcatgtgcttcagttcatatgtaacgaacctgcactttgtgcgcgtgtaccctaaaacttaaagtataataataataaaatttaaaaaaaaagagtgaagacaatattcagtgtcttacaccttctgagtgtttgacattatgttatccttccaactgtgaaatgaattctgggctgtcctcaaatcccagaaggactggtggtaataacatctctcagcatttgcttgtcc

SEQ ID NO: 476144 - DNA, 1630 bp, Homo sapiens
ctccctggcgatatgaacagtaataacacactctccccctcggggtattacgaacgatatcacaaggggctgtacgccccccgcaatatggacagtaatatcaccatctcccgaccggcatattatgtacaatatcaaaagagggtgtacttccattgcgacatgggcagtaatttcaccctctgcttccccgaggtggtgtacaccatgggcgatatggggactaatatcaccctctcccttcaagatattacgaaccacatcacagggtcccccccaggatataatgaaacatatcacaaagggttgtacaacccccgcgatacggggagtaataggagtaatatcaccctctgcccccaagatattaggaggcacatcacaccctccatgatatggggagtaatatcgccctcttttttcctggatattacaaaccatatcacaggggagatccccgctatatggggagtaatatcaccctatgccccccagaatttacgaaccatatcacatggaagtgtacgtcctccacgatatgtaatgtctccctctccacttctggatattacaaaccatatcacaaggatgtacaccccccgtgatatgggatgtaatatcacccacttctcccttcctggatattatgaaccatatcacagggaagtgtacaccctccaggatattgaaagtaacatcaccctcctctcccaccctgggaagaatataacaggaggggtgtacagccccgacgatattgggagtcatgtcattttctccctcatggatatttggaacaataccacaggagtagtgtacaccccctgcgatattgtgattaatatcaacctttcctttttggatattaagaacaatattacaggggtggtgtacatttcctgtgatattgggagtaatatcatcctgtccttctttggatattttgaacaatatcacggggagggccccttcgatatttggagtaatattatcctctttttccctggatattatgaacagtatcacagtgggatgcacaccccatgcgatattgcgaataatatcgtcttctcccaccctggctattacaaacaatatcacgggggttgtacagcccctgtgatattgggaggagtgataacatcctctttcccagtaaatattacaaacaatatcacagaggggtgtacaccctctgcgatattaagagaaacatcctctactcccctggatattataaaaaacatcacagtggggctgtataccccctgtgttattgggtgtaataccatcctttcccctcccctgaatattaggaacaatatcactggggggtgcacaccgcctgcgatattgggagtaatatcatcctctccccctataaatattaggaacaatatcacagcaggggtgtgcacaccctacgatattgggagtaatatcatcctgtctctccctggatattattaactatattacagtgggagtgtacaccccctgagatttttggagtaatattatcccccaattccctgaatattataaagcatatcacaggaggggtgtacaccttctgtgatattgagagtaatataatcttcttgccctctggatattagaaacaatattc

SEQ ID NO: 476145 - DNA, 1330 bp, Homo sapiens
gaatgcttgatggcctgggctctcctcagactgccccggccacactcggcatcgttccgctggtcgatggtatgctggtgtctgtcggtctgctcttgtccccccagtcggtggcctgctggcgtgctggtgtctgtcggtctgctcttgtccccccagtcggtggcctgctggcatgctggtgtctgtcggtctgctcttgtcccactggttggtggcctgctggcgtgctggtgtctgtcagtctgctcttatcccatcagtcggtggcctgctggcgtgctggtgtctgttggtctgctcttgtcccactggttggtggcctgctggcgtgctggtgtctgtcggtctgctcttgtcccaccagtcggtggcctgctggcatgctggtgtctgttggtctgctcttttgccaacgtgctcctcttgacatccagccacttgtgtgtgtgcctgccagggtcttgggggtttttataggcacaggatgggagtgtggtaggggccagggtggtcttgggaaatgcagcatttggtggtgaaggcaggagtgcctgtcctcacctaggtctgtggagatggagccccagccagggacctgccttcctcaacccagcacttcccttcacacttctatatcatttaaagggaccagctctccccttcccagcactcccatatcactgtgaactctccacgtggggctgcattctggacactttggcctcctgtctgttcttccaacccaacacgccaggcagcttctgcccacggccttagtgctcactgctactcctgcctgaagacagcttcccaggccccactaggcccatgctcacctccctcaggcctctgctgaaacttcaccttctcaatgaggctttctctggcagtgcgtgcaggggacacaggaacatccgcctgctgcgtcagtgccaggtcagggcggcagagctgccacttttcgagctgctgagggtggacatctcagccctgcatgtggagggcggagactggggtacacccttggcagctgcagccacggcaggggagcccctgttggttcagtactggcagctccacgccaagcctggccgcgtctggccagggtgctctggctttcccgccgtgcctgatggcctttctgctcacgttgccatttcttcctcccttcctggtccaccatggagcctcagtttctcaagggtggatgcctgccagttccccaaactctacattcccagctgctctctgtcgatacaagtaggctgttcatatggttgagtgtggcgctcactgtaccacgctgtaccgggcactgccgcccctt

SEQ ID NO: 476146 - DNA, 1130 bp, Homo sapiens
ggtgaagccccacaggtccccctgctgtgcacgtccccagccgtggactcaggccctgtggtcctgaggggtcatgggtataggagatcccagcccccacccttcaccccgcctgcggcccgaccccagccccacgttgcaccagacctgcggccaaaccccagccccaccttgcaccccacctgcggccaaaccccagcccccaccctgcaccccacctgcggccagacaccagccccaccctgctccccacctgcggtcaaaccccagcccccaccatgcaccccacctgcggccaaaccccaccccccaccctgcaccccacctgtggccagacaccagccccaccctgctccccacctgcggccaaaccccagcccccaccctgcaccccacctgcggccaaaccccagcccccaccctgcaccccacttgcggccagacaccagccccaccctgctccccacctgcggccaaaccccagcccccaccctgcaccccacctgcggccaaaccccagcccccaccctgcaccccacctgcggccagacaccagccccaccctgctccccacctgcggccaaaccccagcccccaccctgcaccccacctgcggccaaaccccagcccccaccctgcaccccacctgcggccggacaccagcccccaccctgctccccacctgcggcccgaccccagccccaccctgctccccacctgcggccggacaccagcccccaccctgcaccccaacttcagtcatgcttcccagtagacctcaaagccgaaatgtcaggcagcttcctgttaagaaataaagaggaggaggaagaaggaaaggtgtgcagggcgttagtggtgaccaggtgctttcatcccggcctctccacggctttcacgtgttgggtgattccagctgagaaccctctggcctgaaaccaagcatggccctggggcttttaaacccttctcttacgggccttggcaattgtttttgaagtgatcactttaaccttttgttttaatcctctggttattcccctgactggggaatgcaacctgagaagcatcctttggcaaaagagaagttttattagtgaggcaagcagttaattaaaaaaataaaaact

SEQ ID NO: 476147 - DNA, 951 bp, Homo sapiens
gtcatctacctgctgatgacttcatctccagaccaagccaagcccctgaaatacacactgtattccactgtttatctgacatctcaacttggatgcttaattaatccccaggggcatgaacagaaccagccagtagagacccgggagctcattccgattcctggaccacgatcctgcagggacagggccaaggctattcctacccactctgattttcttggtgacattatgataaaggcgaaaggtacattaaaagctttggatctatactggggtcgtaaaatgtcacccatagacagttcctgtctagggattcatttgccagacagatcaataaatgctgtgaaaagttctacaataagtattcccaaccagctgttctgcaaagcacccgtatttccaactcaccaggaagaagacaaaataagcaaatgtatcttggtagatgtttactctttgaatgtcaataagaatttcactctgaaagacagcaggtttccattgtcctcagacaggcagcagacagctgggtcaggagccgtgctaacaagtgaacccaaggtgagggaactttcagatccacactcaatctctccaacaggaagcatcgctttcctggcaacggaaagattaatcatacattgcaccagggagagacgaagcttggtaatagacaaagatgttcctgcgagtcacctcgctgggagtggagctgagaagccctgcactgagctggtgtgagacagggaggtaaagcctgcagggaggaggtggaagggcgaggccaccccatgggcagcagccctcagagtgggccaggcctggaggaggggaagaagctggactgtgtatcctcgatgcccagttgtgctgttccgggactggccccactggccccctgggacccagagagaaagacctttgctctgggcatcacaggcgtgcacagcc

SEQ ID NO: 476148 - DNA, 1834 bp, Homo sapiens
agcacttgtgatgagtaagtccctgtgtggagtcctccaaagcaggtgcctctgccaggcgagccttaggtggacgccggtcagagaaccacaggggtctcagctgtgaagggattgagtggaccggacaggctggccatagtgcttaggcctccattgcaaagttaccagaattctgcaggaatgggttgttgtctcagtgctcgttaaaccagtcaggcagtgggtgaccatcaccagtggacctggctgtgggggccttggcactcgggcctgtgatttatgtgcccagctcacacatgtcagctgcaaccccttcactcgagtgttggggcctggaaagcaaggactgtgtcttgttcttttgaggattctgggacttttctaacctaagattcctcagtcctagtgtgggcatattcatggaggggggcggttatgagtacgaaatgaggtaacagtaggtaaaacacctattaacagcaccaagcgtagcgctttctagaggctcacgaagacgtccatgcccttttcccatatcggagctgctcaggcactttcccaggggctttgccattttgcactgtcctcacctaactcctggacctacagtggcaaacccaatttgaccagttatgatttggccttgcccctcaattgccagccatggggcatagcaccccctaactcacccctcaattgccagccatggggcatagcaccccctagcttgcccctcaattgccagccatggggcatagcaccccctagcttgcccctcaattgccagccatggggcatagcaccccctaactcgcccctcaattgccagccatggggcatagcaccccctagcttgcccctcaattgccagccatggggcatagcaccccctaactcgcccctcaattgccagccatggggcatagcaccccctagcttgcccctcaattgccagccatggggcatagcaccccctagcttgcccctcaattgccagccatggggcatagcaccccctagcttgcccctcaattgccagccatggggcatagcaccccctaactcgcccctcaattgccagccatggggcatagcaccccctagcttgcccctcaattgccagccatggggcatagtgccctggaacccacccctcaattgccagtcatgacagaatatccacattggaattgtggtttgagagaaaaataaaaattttgtcttgttaagctgtttaaattttgaggattatttgttacaggtgccaatattttcctacctaaaagaggattccttattaaaggctgtggcaccaccatccctcaatccctgaaccagaaaacgaaggcaacaactttaatatttctttatcctcatttccagaccaattccaaagcctgattttttttttaaacttttaactttgagatgatttagacttaaagagttgcaaaatactgcagttaccaatatacccttccctcaacttcctccagtattaatatcttatataaccatcatatagtaatcaaaactaagaaattaatatcgataaatactattaattaaatgacagagtttgttggatttcacttgttgagggacctgatgtgaagggggagcacaggaaaggaggagagacaagcccagtaggtatccacacatggaagaggacttcatctgacagtgccacctgtgtctcagggcttctgtggcaaagatcacagactgtatgaggccgaagccacagaaattttttctcatagctctggaggctggaagtccaagatcaaggtgtcagcagggttagtttctgctggggcctctctgc

SEQ ID NO: 476149 - DNA, 4438 bp, Homo sapiens
ctctttgctgcgtaagtccttcctacaatgttctcctagtccttaccacattgtccttttaggaccttactgttgcatcctcctaggtccttgctatgacgtcctcctaggtcctttctatgacatcctcctaggtccttgctatgacgtcctcctaggtccttgctatgacgtcctcccaggtctttgctatgacatcctcttaggtcctttctatgacatcctccttggtcctttctttgacatcctcctaggtccttgctatgacgtcctcctaggtccttgctatgacgtcctcccaggtctttgctatgacatcctcttaggtcctttctatgacatcctccttggtcctttgacatcctcctaggtccttgctatgacgtcctcccaggtctttgctatgacatcctcctaggtcctttctatgatgtcctcctaggtcctttctttgacatcctcctaggtccttgctgtgacatcctcaaggtccttgctatgatgtcctcctaggtccttgctatgacatcctcctaggtcctttctatgatatcctcctaggtcctttctatgacatcctcctaggtccttgctatgacatcctcctaggtccttgctatgacatcctcaaggtccttgctatgatgtcctcctaggtccttgatatgacgtcctcctaggtccttgctatgacgtcctcctaggtccttgctatgacatcctcctaggtccttgctatgatgtcctcctgggcttactgtgatgtccttgtaggcccttactatgttttcttccaaggtctcaataacgggccaaaagcaaacaggaaaacaagcagagaaagagaaacaaagggaacctcatacataaaaagccaggaacctgacgagcaattagctttgcatttaccaaccatctgtcttctcaaagaacatttatgttggggagatttgacacctcccttgatctccactggccaccgtcatccctgcacaaggacggtgaatgcctgccatgtaggcaaaacagagggtctaccatgcacatccgaaaaacagcgggcctaccacgcccatccgaatcctaactcattgccttcgtctcctcttgcaaatggatggctgccgctcagcccctctatgtagaaactctgtagcccagatttaatctgttctggttttctcttgttgtaattccagctcctaccccagcctctggcaatcactaacctgctttctccctcgatagcttcacctttcctggaatttcatgtaaagagaatcatacagtatggagtctcccatgactggcttccctctggggcatgacatggtagagtcacccatgctgctgcatatgttaagagttgagttgtttttatcgctgagtaatatttcattgcatggttatactacattttgtttactcaccagttgatggatatttgggttctttccagtttttggctattatgaatgatgctattacgaacattcacataaaacttttaatgtggacgtatttcttcatttttcttgggtagatgcctagaagtgggattgatgggtttgttggtaagtgtatgtttaacttaataagaaattgccaaaactgtttccattttctacatccagcgataatgtatgtatattatttcatcaacttagctaaaggtttataaatgttattgatctttctaagaaccatttcttggcttcattgatttttaactattgcttgccttttgtccatttcattgatttctacactatcttgatgatctctttccttcttactttgggtttaatttgaccttttcctagcttcttaaaatggcatttcatatcattgactatagactttaagctgtcagcagtaagcatgctactttagctacgtctcacaaattttggtatgttgtgttttcattttcattttgttccagatatgttttccttatgatgtctcctttgacctattgattatgtataagcattgtgtgtgcagtttccacatatttggggatttgccagaatattttttctgttttaatttaaaattttattctgctgtggtcagagaacatactcttcatgatttcagtctctttaaatgtatagagaattgctttatcccaggatgtggtctatcctgttgaatgttccctgtgtgtttgaaaagaatgtatattttactgttgttgagtggaatgctttccagatgtcagttgtttgacagtgttgctcaagtcttctatgatcttgctggtgttctatctacttgatctacgaattatggatggaggagtagtgaaacatctagctataactagttgtctatttcttctttcgattctgtcagttttgcttcctgtatttggagttctattgttaggtgcatatatgcctaaattattatatatttcttctacattggacattttatcattatgaaatgtacctctttgtcttgagtaatattctttagcttaaaactattcgtgtgatattaacatagccaatctactgctctcatatgtacagtttgcatatcttttcacttttactgtctttgtagctttgatttaaaatatgtcttatgtagaaagcatatagttagatctagtctcacaatctctgccttttgattggagtggcaagtaaatttatatttaatgtaattattgatatgcttagattcatgtctgtcattttgctctcttgttcttccttcttttgtattaaatatttaagtggaacatttttatatctctattgatttcttagctatatttctttgtgtgctttaaaaattatttgtagttgttctagggattatgtaagtattttaaacttatcacgatctacttcaagttgttactgactttcttctggtaaaatataggcactttgtactcatatagcttcattttctcttccctttctttttgctgttgttgatacacacacacacacgtacatatatatatatgtatgtataacatatatgtgcatgatgtatatatgtataaaatctatatttatacaattagaattaaaatatatataatattacacatatgtatatacatacacacatatgcacacacacacacattcgtatatgttaaaatccaacaacacagtatatattttttgctttaaacactctttaaaagaaattaagagataaaaagaaaagtatatattcttgtgtatttatgcagattataactcattttctctttatctttggctttcagcagtttgactataatgtgtccaattgtggctttcttattgttcatcttacttggggttggctctgaggctctattcatttttctttgtctttcttctctctcttctttggattgaatattttctactgatctttctttaagttcattgatttttttttttcttctgctacctcatagctgctgctgagcccatctagtgaaatttttatttcagttattttactttccaggtctagaatttctgtttggttctattatatagtttccaatattttgttctctacctattcagtcatgtttagcacattttactttaatcctttggatgtattttcttttgaattgttgagcatatttataatagctttttacaaaaatctttgtctcctaagttcaacttctggcccttcatggactcactttatattgattggtttttgtttttcttccctgagtatgggttatacttttattttctttttgcatgtctcataatttgtgtttgaaaactggacattttaagtaccacactgaaatgactatgaattctggtttgttcctctgagggtgtagacaattagcttgcctggactcaaaatgcaaagtgtctccactgtgtgtgcagccactaatatctttattttgtttttcttttcactttctttttggcctggctccccagtggtctcccagtggctgcataggctagcagtcagccaatgatttgagtagaggtcatgctgttccattcaagccaggaaagcttctgctgtgctatgtggctgtgtgtggactgcaggatgtattcaaaggcatggcaacttcacaagtgtctcatgcatgtgattttgacagacttttccagcatcttccgcgtgtagtttggcagcagtgacatgtgatgagcacatctcggctctttcatggcttgtttccctccacaacctccttcttacatctctagctgctttgccacccaccctgaacattggtgaggacacatgaatttgctgttgggtgtgtgtgtgagctcatgagtgagtgtgggtagtgagcagtgtttgactggaaattgtgggacttggattttaagtaatttctcattttatctgacgactgaaccaggcagtcagaagcttatggtcagaagctacagactccatggcttctgaccat

SEQ ID NO: 476150 - DNA, 1002 bp, Homo sapiens
tgggatgtgggttggaggcctgcaggtagcagccggtctcatgtggaaagacgtgtttttcacagctgcagaccggagccctcgcctccagtgccttcccacagacacttgctactggacgctaatggggaactgaggctgagaaggttcaatgaaatactcaatgatgagtctcacggttctcctgcccgatcgtccccacgctcagggacagatgggaggattggtgctattggaacatagccagggtctggcttttctcaggtttgaagctggcatttgtaaatgtacaaagcaagctcacattgattcttggtatcgatttccaaatatgaaagcagtacttggaattttcgaagcttctaaacagatctgggagcccggggagggctcgtcatctgggagtgtcagcagacaccgcagccatcggcagcaagcatccacctgctccgcgggcgcctttttcaagcgagttcagctcacctctgcttctcttggttttcctttgcttaattgcagtcaactcttactcttggtagtgtgtggacaaagtcatggaatatacaggaaggttgtgttgactttgttttcagtcctcacccctcttcttgggttgaggtgatcgaactctgcccgtacttgctaaaacgctccactctgttttaattctttgtaaatagagctccccctccccgctaccgtggcttattcctgcagttccattcactaccacgttcagcctaatcacatctcctggaaataatatgagaaagttatgctgttttactccatcagatttaataagtttggatggtttccaagtactaggcattaatcacacttaaacctgggccttgatagttcatccacccggagtattcatgtcagagacataaaacaatctgctttaatgctcagagtcctcttgaaaactgagcacttgcctcgtgttaataaaacttgctttctacagtggggctgggagaggacagggcatgggga

SEQ ID NO: 476151 - DNA, 2066 bp, Homo sapiens
tgtaggtagaaagacatagtgaccttccttacccctacgtgcaattaaatcagactccctagggtggagctctggcagtagcctttaaaaaacccgcagaaaagatttggtgattccagtccacagccaagattgcggaaccactggtctatagaacagcatcacctaacccatgaaacccaggcctcagcacggcacttcccatagcgagtggattaccacgccctcttcatgtgacccctaagcacctctccaatctgctcacctctggcctatacctgagtctctgctcttggcgtctgtcatgtatgctggacgattttctcccagctgctttgcctgctcctattcttctagaaatatgtggataatgcctctgactttaacacattccagcttccttatagcgttacctctgatgtccggggcggtgctgacggcagccactgggcctatctggcctgggcctgatttggagggaatgttccttccacggttttctcatgaagaacgatgttcatgggaagtatttcatacacactctgccagactgaagacgtgtccttctattcctagcttggatgatgctgcgggaccaaagctgacttatgatggtgtcatcgggttacatccagagcacctgcctgctcctcacgcagctcctcagacgtctccacctaatcacagaatgacggagcctcacgtttcctctcatggccaccaacgccgtggggcagccaacttaaagaatgtcttcacttcaagatgggatacagcctgaaaacacgagcagcgagtgtaaaatgggtggaagaggtatggctaagcctttcgaggttggcactgggacagcagtggcacctcctcctgacacatctctgaaggtgaaggctgggcttccacggagcatgcggatgcctaacgtggtgtgttttcttactttttccccagccattatgcctctacttgcccaagagagtgtcatttaaaacactgtcatttcctcatctttaaagtgaagggaataatagcgtctaccttaaagagtttttagataaatcacttaaaacatagcaattatgtaacaactgccaacaagtactagttatcatcattggacactgtaaaatgtttagtgtccaaacctataaaatagctcctaaattgaatgatctcatggtctagctgggaaaataatgtgtaattcaaaaataaaaataaaaatgtcaattctgtacagaaattcccaaatgaatgtgtagaatctactatccgcaccaaggaacgtggagagatcacaacttggagcccctgcagaaagtgtttagggaaacaatgggacttgaacgggagcctggaggctttaggtaatgagagaggaagggagagaatattctagaaaggaagaataccaggtgagaaggtttatgatgtatttggaagccacctcctgtgccagtcgggctgaaatactgagtttgtgtggaagaatatggggtgaaccatggagaaaactgatgaaataagatggtgggtcagcatcatcccagaagccaactactgcttggagaagagttaactcagtggctgtctgtacgatgaactgaagtcaagaagaaattagaagcaaggatgaaacaagcgaagtaaacccttctatgtttaaccacaactttgtaaacgcagtgactcatctccattcatgggtgtcagcttggttctgagcatgcagatgaatgtatccaaccagggctgaggaagccgggttgaccctgagctttggccttttagttccgttcctttgcaggcagatacaactaggaaacgaggcccatattttgagaagtaaaaatattctactctgagatctttgcagttttatttccctaattattttggataatcaacattttcattttttttttccaattttcaaatcaactttagatttagccccttaaatatatcttttaggaagtagcatcttgttgccttaggaacagtgtttgaaaaagttctcatttgtgctgtacacttcaatgataaagaaagttcactggcatccc

SEQ ID NO: 476152 - DNA, 763 bp, Homo sapiens
cagacacaggggatcttgcctgctgggacttttgctgtgttggtcagctgtggcatggggtgccatgaggaggtgggaagtgagcctgaaaaggcagttaagccacacggtagtggtgctgtttccaatagcgagtcgtgtagaatggaaagtggaaagtctaacgtatgggtcttgttcttgtccctggcaccggcattcctatgggattccatgggaagacatcacagcacagtgggaaggcgtctgctatcgactggacctgagtcagaaccctgccagcccagctctgggagagaagggtgcatgtgagggccctggtgagcccaggatagtcagagaggccagtgtgagtgggggcagaggaagcccggaagccctgaaagtccagtgtattgcaaaactttctcaaggcactaaaaataccaaagtaccaaatattcagagggcttcatggtccttaatatttccctatttttattatatttttaaagatgtcattgtgaaatatacgtatggcaaagtgcattaagcataaatgcatactttaataaataattataaacaaaatgtgaacccacctctcttaccatacctcctcccctcccctatttatgtcccatttatggtcattgttctttgctttgccttgtagttttaccacctatctatgcatcgctaaatcatagaattaaaaaggtttgttgtgaactttatatgagtggagtcatgtagtctgtattctttggcatcttgtttctat

SEQ ID NO: 476153 - DNA, 911 bp, Homo sapiens
ctgtcctcaccgccctcaccgcccacaggaccacaggagggcagggacaccagctggaggaaggactgccgggcacgaaggagccaggacgtaccggtgtgaaaatgaacctttctcattccaggcttttctggatggcagagaagactaccatgaaagagaaactctcctcgaggtgccgccctccaggaactgcaccccatgaggtcatcacgcacgcacacagtgggttccggtatctcacccctgagctcaatgccaggagagcagtggcctgcagggcccagcgccggctgccatctgaaggtggcctctgggcagaccccatgtcggagctgcccggcagggccactgctgattttgtgacctacagaagtagtgagaggagcagcaaagggcatcccgtggtcgacgatgtggaatgcgatgcccacggggccactggcccagagggtctccaggcagctgttggagctcaggccctgtcagctaagcggtttctctccaccgcaggcgttgctgctctcacgttgccagatgagggtaacttgcagtttctgcagagccaatgttcagaattaaaacacatttactatgacacgcaacgccctgtgtggtggctggatcgcagcaccaatgggtgaaaacatctttaaactaccagtctatatttcagctgtatttacccactggggactggtggattcagagctgtcactcagagctggaaacacacctgtggttctggtagcttgggctccagagcttctgatgttctgggctgagagtggcttgcacaggacctggggtggtcctgccttgagtccgcccacccccttcacatagaagggtggccctcggttagagactgccgctgcgaagcagatcacaaacacacttgatttcaggac

SEQ ID NO: 476154 - DNA, 2338 bp, Homo sapiens
cagatggctgacaggatgatgatggtgatgatgaaggattatttactaaatggcatggcaatgatggcgatggtaaggatgatgacggtggtgatgaaggattatttactaaatggcatggcaatgatggtgatggatgatgatggtgatgatgaaggattatttattaaatggcatggcaatgatggcgatggtaaggatgatgacggtggtgatgaaggattatttactaaatggcatggcaatgatggcgatggtaaggatgatgatggtgatgatgaaggattatttactaaatggcatggcaatgatggcgatggtaaggatgatgacggtggtgatgaaggattatttactaaatggcatggcaatgatggcgatggtaaggatgatgatggtgatgatgaaggattatttactaaatggcatggcaatgatggcgatggtaaggatgatgatggtgatgatgaaggattatttactaaatggcatggcaatgatggtgatggtaaggatgatgacggtggtgatgaaggattatttactaaatggcatggcaatgatggcgatggtaaggatgatgacggtggtgatgaaggattatttactaaatggcatggcaatgatggcgatggtaaggatgatgatggtgatgatgaaggattatttactaaatggcatggcaatgatggcgatggtaaggatgatgacggtgatgatgaagtgattacttactaaatggcatggcaatgatggcgatggtaaggatgatgacggtgatgatgaagtgattacttactaaatggcatggcaatgatggtgatggtaaggatgatgatggtgatgatgaaggattatttattaaatggcatggcaatgatggcgatggtaaggatgatgacggtgatgatgaagtgattgtttactaaatggcatggcaatgatggcgatggtaaggatgatgatggtgatgatgatggtgaagatagtgatgatatggtgatgacgatgatggtgatgatgatgatggtgttgatgataacaatgatggtgataacaatgatgatggtgacggtgatattgacaacaatgatgatgacaatgaggatggtgataacaatgatgatgatatggtgatgacaatgatggtgatgatggtggtgatggtaatggtaatgatgatggtgatgatggtggtaatgataatgacaacatgatggtgatgacaatgatggtgatggtgatgatgacaacaatgatggtcgtgatggtaatgataatgatgatgagatgctgatggtgatggtgatgatagtaatgatgctgatggtgatggtgatgatagtaatgatgatgatggtgacaatggtgatgatttggggtgggggacagaaatgagaaaagatggagttaggggatgatgggctcacctgcccttttggccctccagttctgtacttgcatattgaggggcttggtctacctggtgttgcccaaatgactagaaccatgtaggaagcttataaaagtacacagatccagatcctataccagactgaccaagtcggcatctcccatctggggctttggggtttatggttttagtacagttgactgtaatgtgcagccaggctggggaaacatgaaactaatgatctgagttcaaatcatcactgctaaaatgagcacaagggaatagaaccagttattcgtgctgaataaaataaatgtaacccccaagttgttgcactgctatttgaaataatttatgttattgattttcttcaataaaactgagctgtgtgtggatttgcctgaaggggtctgtgtcccaaccttcaactcatcctctgttttcctggatccccacacaatcgtaggcagcttagcttgtagttttgcggactgtgagctggacatccttcctgtgtttgaaaatgaacctgtcatcagcacaggctcagtaactcagactgtaggaacccacactaaagacgtgtttttaaaatgtgggtgaaaaataattgaaagcacgtttgttacagctttatttataatgttgaaaaactttaaaacaacccatatgaccaagcatagcagggaacagtgcagtcagcctctacagcaggtggccaagaggctctttccatggttccgggaaatgctcgcgtgtagtacccagtgggagtggcaggagacagccccgaggctacagaatgaatttgagtgctttggaaaaagtacgtaattatgctttggaaaacactggaagaaaatgcacctagaatgatattttttttcaccattttctgtatgcttcagtttttatgctgtaaga

SEQ ID NO: 476155 - DNA, 3364 bp, Homo sapiens
cagcaaagcagacaagtctcctcctatgaaactcacattctaggtggggacagacaagacacaatgcacacaatcaccgatgtcaggattggggacggttgctatggaggacagacaagacacacacaatcaccgatgtcaggactggggacggttgctatggaggacagacaagacacaacgcacacaatcaccgatgtcaggattggggatggttgctatggaggacagacaagacacaacgcacacaatcaccgatgtcaggattggggatggttgctatggaggacagacaagacacaacgcacacaatcaccgatgtcaggattggggatggttgctatggaggacagacaagacacaacgcacacaatcactgatgtgaggattggggatggttgctacagaggacagacaagacacaacgcacacaatcactgatgtgaggattggggacagttgttatggaggacagacaagacacaacacacacaatcactgatgtgaggattggggacggttgctacagaggacagacaagacacaacacacacaatcactgatgtgaggattggggacagttgttatggaggacagacaagacacaacacacacaatcactgatgtgaggattggggacggttgctacagaggacagacaagatacaacacacacaatcactgatgtgaggattggggacagttgttatggaggacagacaagacacaacacacacaatcactgatgtgaggattggggacggttgctacagaggacagacaagacacaacgcacacaatcaccaatgtcaggattggggatggttgctatggaggacagacaagacacaacacacacaatcactgatgtcaggattggggatggttgctatagacaaagaagagatgaagaggaaatgttcaaacatacacgaaagcagagaagataacggcacggacgccatcggccacggccacccatcgctctgcagagaagacaacggcacggacgccatcggccacggccacccatcgctctgcagagaagacaacggcacggacgccatcggccacggccacccatcgctctgcagagaagacaacggcacggacgccatcggccacggccacccatcgctctgcagagaagacaacggcacggacgccatcggccacggccacccatcgctctgcagagaagacaacggcacggacgccatcggccacggccacccatcgctctgcagagaagacaacggcacggacgccatcggccacggccacccatcgctctgcagagaagacaacggcacggacgccatcggccacggccacccatcgctctgcagagaagacaacggcacggacgccatcggccacggccacccatcgctctgcagagaagacaacggcacggacgccatcggccacggccacccatcgctctgcagagaagacaacggcatggacgccatcggccatggccacccatcgctctgcagagaagacaacggcatggacgccatcggccatggccacccattactctgcagagaacataacggcacagatgccatcggccacggccacccattgctctgcagagaacataacagcacggatgccatcggccatggccacccattgctctgcagagaacataacagcatggacgccattggccatggccacccatcgctctacaaagaagataacggcatggacgccatcggccacggccacccattgctctgcagagaacataacagcatggacgccatcagccacagccccccatcgctctgcagagaagacaacgacatggacgccatcggccacggccccccatcaatctgcggagaagacaacagccacccatcactcttcagagaagataacggcatggacgccatcagccacagccccccatcactctgcagagaacataatggcacggacgccattggcaatggccccccatcgctctgcagagaacatgagaatccagagcccccactgcctgggatgaatgggctccagaatccagagcccccactgcctgggatgaatgggctccagaatccagagcacccgcctgggacgaacaggctccagaatccagaggccccgcttgggacgaacgggctccagaatccagagccctcgcctgggacgaacgggatccagaatccagagcccctgcctgggacgaacgggctccaggggcccgcaaaaggacgtcggctctgcaccacccctacctattactctatactgagccgcaaacccatgcacgcctcagtccaaatgtcatagcttctctttctcccactaccctgagggccacacacacatgactcggagaaaggccacagcctgtgtgtcacaggatctccctaaatgtccagtggcccctgtccagccgctgtggctgcccacatcatggtgctgggccctgccgtttctccatcatagaaccaccaagaggcaaccgagaaacccaggagcatggcaacatccacagtctccaggatggggccctatctacatgctcctcctagaggggctgtgtaccgtgagcacaggagggtcatccagctacaggatgggactctatctacaagttcctgctagagggtctgtgtgccgagagcacaggagggtcatccagctacaggatgggactctatctacaagttcctgctacagtgcctgtgtgccgtcagcacaggagggtcatccagctgcaggatgggactctatctacatgctcctcctagaggggctgtgtgccgtgagcacaggagggtcatccagctgcaggatgggactctatctacaagttcctgctacagtgcctgtgtgccgtcagcacaggagggtcatccagctgcaggatgggactctatctacatgctcctcctagaggggctgtgtgccgtgagcacaggagggtcatccagctgcaggatgggactctatctacaagttcctgctacagtgcctgtgtgccgtcagcacaggagggtcatccagctgcagaatgggactctatctacaagttcctgctacagggtctgtgtgccaagagcacaggagggtcattcaactgtaggatcggactctatctacatgttcctgctacaggggctgtgtgccatgagcacaggagggtcatccagctacaggatgggactctatctacaagttcctgctagagggtctgtgtgccaagaccacaggagggtcatccagctgcagaatgggactctatctacatgctcctcctacgggggctgtgtgccgagaccacaggagggtcatccagctccaggatgggactctatctacatgttcctgctac

SEQ ID NO: 476156 - DNA, 933 bp, Homo sapiens
tgaagtcgcctcaccgccgaccatttaatcaccctagaaaccacccagagcccgtaaccctcaggcccctcctctgcgggactcctgccttcgtgttcttgggacacagccaggaccccacctgggatctgagcttgcttggggtttcctcatgaactctcttctacttcggactctgtttcctgtgccatggccctgcagcctgtcgacatgaccctatcgtcgaagcccggactgacccgtccagctctgcagccctgcgggccatgctgagctcccagctggaagtgcatcaccgcaccgcagtggaggcaggaggccttggaaacacgtgcacagctgctaactcatacacgcacataagcacagccgctaacgtgtttaactgccaaacttactgtgcgtgcccaaggatgccgccaatccaacatcataaacccttccggcaaacagacactgcccgtgcctctgcgcggaagcctaacccccaggtgctcctcgatgacggcttcgtgccttctccctctgtcttccctgcagcgttgggtgctctcatcaacgaggctcatcatctctgtccccagcattgcctgagccttgcaaagccccttcctgttctgggagcaggtcagtgctatgcctgctgcttggctgcctccgccccacaccctcgtcccagggaagccacagctctgccctgcatcctgcttgcatggccaggccaggacagccgggagacacgcacacagaaaaagcagacactgcaggctccatgctccagagcttccaggatcctggggcaacagatgttcaccactgatggttcggttataattgtggacaggctgcaaaaaagggcacgagagcacctgacagagggcactgacctcacccagcggtcagagaacgaacagcggccgacctgaggacatc

SEQ ID NO: 476157 - DNA, 2922 bp, Homo sapiens
gtggcctgtctgaggacagaaagatctcaaagaagcagcagagggaatgcaagggcagagtgaggaagtgaggggtgctgcggggctggtgttggcactgacagacagcaggcgggagactgcagagtggccaagggagattctgcatgacttcagccgcgctgtgaaatttgtgaagataatcgtgttggtgaagaagctgggctcatggtgcagctcagacctatatgctgagtctgtctacctgctggagactgtcctgtttctcctctatgctgagtctgtctacctggtgcagactgtcctgtttctcctctatgctgagtctgtctacctggtggagactgtcctgtttctcctctatgctgagtctgtctacctggtggatactgtcctgtttctcctctatgctaagtctgtcaacctggtggagactgtcctgtttctcctctgtgctgagtctgtctacctgctggagactgtcctgtttctcctctatgctgagtctgtctacacggtggagaccgtcctgtttctcctctgtgctgagtctgtctacctcgtggagactgtcctgtttcttctctatgctgagcctgtctacacggtggagactgtcctgtttctcctctatgctgagtctgtctacacggtggagaccgtcctgtttctcctctatgctgagcctgtctacctggtggagactgtcctgtttcttctctatgctgagcctgtctacacggtggagactgtcctgtttctcctctatgctgagtctgtctacacggtggagactgtcctgtttctcctctatgctgagtctgtctacacggtggagactgtcctgtttctcctctatgctgagtctgtctacctggtggagactgttctgtttctcctctatgctgagtctgtctacatggtggagaccaccctgtttctcctctgtgctgagtctgtctacctggtggagactgtcctgtttcttctctatgctgagcctgtctacacagtggagactgtcctgtttctcctctatgctgagtctgtctacacggtggagaccgtcctgtttctcctctgtactgagtctgtctacctggtggagactgtcctgtttcttctctatgctgagcctgtctacacggtggagactgtcctgtttctcctctatgctgagtctgtctacacggtggagaccgtcctgtttctcctctatgctgagcctgtctacctggtggagactgtcctgtttcttctctatgctgagcctgtctacacggtggagaccgtcctgtttctcctctatgctgagcctgtctacctggtggagactgtcctgtttctcctctatgctgagtctgtctacctggtggagactgtcctgtttctcctctatgctgagtctgtctacacggtggagactgtcctgtttctcctctatgctgagcctgtctacatggtggagactgtcctgtttctcctctatgctgagcctgtctacacggtggagactgtcctgtttctcctatatgctgagtctgtctacctggtggagactgtcttgtttctcctctgtgctgagcctgtctacatggtggagactgtcctgtttctcctctatgctgagcctgtctacacggtggagactgtcctgtttctcctctgtgctgagtctgtctacatggtggaaaccgtcgtgtttctcctctatgctgagcctgtctacacggtggagactgtcctgtttctcctgtatgctgagcctgtctgcatggtggaaactgtcctgtttctcctctatgctgagtctgtctacctggtggagactgtcctgtttctcctctatgctgagcctgtctacatggtggagactgtcctgtttctcctctgtgctgagtctgtctacctggtggatactgtcctgtttctcctctatgctcagtctgtcaacctggtggagactgtcctgtttctcctctatgctgagtctgtctacacggtggagactgtcctgtttctcctctatgctgagcctgtctacacggtggagactgtcctgtttctcctctgtgctgagtctgtctacacggtggagactgtcctgtttctcctctatgctgagcctgtctacatggtggagattgtcctgtttctcctctgtgctgagtctgtctacacggtggagactgtcctgtttctcctctatgctgagcctgtctacctggtggagactgtcctgtttctcctctatgctgagcctgtctacatggtggagactgtcctgtttctcctctgtgctgagtctgtctacacggtggagaccatattgtttctcctctatgctgagtctgtctacatgatggagactgtcctgtttctcctctatgctgagtctgtctacacggtggagactgtcctgtttctcctgtatgctgagcctgtctgcatggtggaaactgtcctgtttctcctctatgctgagtctgtctacatggtgtagaccatattgtttctcctctatgctgagcctgtctacatggtggagactgtcctgtttctcctatatgctgagtctgtctacatggtggagaccatattgtttctcctctatgctgagtctcctctatgctgagcagatttctcagccatcttcttgaaaacttgtctttataatcttggcttccacgaccctgcaacaagaacgttgtgtttctactagctacacctgctcttttactctaaatgtcaacaccaatagtttgatactcatgatagactgcatgatcttgcttttgaatttgtgtatctgttctctctctttgggtcatgagtttgtaaaagttgggcattactgctttctattttttctctccttgatagacacaagctgtacatcatcataaatgaataaatgagaat

SEQ ID NO: 476158 - DNA, 1299 bp, Homo sapiens
tcgcggagggacaggacggtcgcccactgctccatttcttttctccccaggccgtccctccctggcaggagcagcctcatgcggaccgagccgctgtgcggggcatcccctctggtggtgcccggcgacccctactctctggtgtttctgctcaagggctacgcggagccagagggtgtgggcgatgcctgtgcgcgcacgacggctccgtgaccctggtcctaccccagacccggggcccaggcctccagccaccgagagtccccgcgcgggagtggcggcgcagaggcctgccctggaggaggcggcccgtggccccatcctggtggacaccgggggcccctgggctcgggaggcgctgctgggggcgctggcggggcagggcgtggccccgggagacgtgacgctagtggtggggacccacgggcactcggatcacatcgggaacttggggctgttcccaggcgcggctctgctggtctcgcacgacttctgccttcccggaggccgctacctgccccacgggctgggtgaggggcagcccctgcgcctgggcccggggctcgaggtgtgggccacgccgggccacgggggccagcgcgacgtgagcgtggtggtggccggcacggctctgggcaccgtggtggtggcgggagatgtgtttgagcgagatggggacgaggattcgtggcaggcactgagtgaagaccccgcagcccaggagcggagccggaagagggtcctggtcgttgccgacgtggtcgtacctggtcacgggcccccctttcgagtgttaagggaagcctcgcagcccgagacggagggtggagggaacagccagcaggagccggtggtcggagacgaggagcccgccctgcactaatcagcctcgagagggactgcactcttgtcagggaagccctaacagcgaagagctgctggagacagagtcagagcagtcaagggtgggagcttccagcccttccaggaggccagttttctagtgaagacagagtgcacctgacactgccatcacatcgtcagtatcactgcctgtctctgccaccaaactaagatcaaaggaggggctcagctccctgtgcattctccctgggcctcagtaaaatgggagaaggttcgtgggaggggcctccaaaataaaaatggaaactgcattgaaaatcatagtgccctagtgtaaatgtgaagcattgacaatgataatcgtgcaaacatggtaatctacaactacagcagaggcatactttgggcaattgcgcctttcttataggatggagg

SEQ ID NO: 476159 - DNA, 576 bp, Homo sapiens
tctctctagggaggctcctcatgcaaataaagtcctggcagcctccaggctgggtcctcagatatccccagatagatgtggatactcaagcttcagtggaagatcagaaaagcagagcaggaattggtttcatgcattttccaaattcctataaaatgctcaggttgggtttgatgctggttacttcatctgcagtaactcaaagtgcagataacaacaaattatcccccacggatacacagaaaagaggcaggagagtatcagggaaagaggacgtggctaagagggctgactggggatggcgtcttccctctatcgctcaccagctgtgggcttccgtgtacatcacatcatggttgaagctgtggattacaacaaaccgaaatacaagcaaaaagggcaaagaggaagaaaatgagagtaaattactttaagtttcttccatatgcctaatatcatactatcataacaacatactataacatacttgatgctattgcaaggtagatttggtaaatttaagataagtaagatataataggtgctctcagagcaactgtgcatataaacaaaagc

SEQ ID NO: 476160 - DNA, 599 bp, Homo sapiens
acagtcacgtcctatgggctgctgcaataactggccacacttccgattttctttctgcttcttcatttttcaacccatatgcagcatgagcaagtggagtggcgcactgccgagggagcacagccagcccggcggaccttggcctgggaaaggagcccaggcaagatgtcctggcagaggactgagcatcagtaaaagagagaagcgtgaaggagctggcatgctgggagctccaggtgtttgtgtgattggagaagaaggaggcctcggccagtggaggaggacagagctggaagagcgggcagggtcctccctgaagggcttcctgggctcacctgggctggggctgtgtactgaggagagtggcctccatggggtctcagtggaagaaaatgagaagggcctaacgccagccactgggaatggagagaaggagggctcgagtgatgcctggctgaggacagtgatgcagcatctgcaaaggattggaggcaggtggaagacaaaggcacactcgaccttggtggcttccggggtggggaaagggtgggaagcacaaggaggctttcacaggagcccctgcgacaatgaatgagaaa

SEQ ID NO: 476161 - DNA, 515 bp, Homo sapiens
agtgttgagcttcaaactctgctatgttcagaaggaaaccgagccccattaccacccaatcttgctgctgcacgaccttgaccctcgggctatgtggagaacttggggattgtagccccaaggtgagtgcgagccctcttgggctcctttctacgcgtgtggatcagtggtggcatagaggccgtgatggcagcggaggagctgtcacggaaacggcgaccattctcaaagtccttaatggccaggtcccaacctgggcagcgaggagatccttgtggaggtgtaaggcagatattggaaggggtaggaatggagtactattaactagatggttggaaagtgcctctgcaagaacagaggcactgagggcccaagtcatagagcaagtcctaagtgcaaactacaatgccgagaagttgattagcttcaatagacacaaaaagggagctcagcagcaagctcaaacacggattttcattttatgagtctccctgcttcacttcagaatttcctct

SEQ ID NO: 476162 - DNA, 732 bp, Homo sapiens
ccctttggagccatctgggaacaatgggtccataaactttggtgtggcgaagtgggtacccagcaggagaaggtgcttttgggagggcctgccctgttctcacctctgccctgaatcaatgtatcgattttcaccatttgcctggactgattgcaggtacctgtgtgagggagataaggatggagctggggatgaagacaggcatgtagataagggtggaggtggggatggggatgggataaagatgaggatggaaattgggatgaagattaagatggaaattgagatgagcatggggatagagagagatggggatgaaggtggagatgggaatggggatggggatgaaggtggggatggagatgaagatggagatggagatggagatggacatgaagatggagatgggaatgggaatggagttggaatggggatggagatggagacagagatgcagatggggatggaaatgaagatgaagaaaggaatggagacgagagatgtagatggggatggaaatgaagataagaatggagatgaggttggggatggagttggagatgggaatggggatggagacagaggtgcagatgggaatggagacagggatggagatgataagaatggagacgagattggagatggggatggagctggagaaggggatggggatggagacagatgcagatggggatggagacagggatgaagatgataagaatgaagatgagg

SEQ ID NO: 476163 - DNA, 811 bp, Homo sapiens
ccccagcttcattcccaggctgctggggtgctcccagtgtccttttgatagtggcaggccctaaggatgctctccagcgcatcagagcccttgtgcaggccactctgcctccctgatatcgctgctcccccagtggagctgccctgggcacagctgctggattttcagatgcccaatcctactctcaagtttccgaactcttacttttccccaatgcttcctctgctggctgacctgagccctctcctgctggtatctggcatggaggagatgtttctccagcaaaggaaagatgtcccttatcagacacggctgggctctcccccacctctcagcagcagccttgcggcccctaacaccagggctgccagggaacagcaccagaagaaaggtgagctgtactacgttagcaggaagtgggaccagggcctccaggtcctgtttgtgtttatgtcttgtccttccatggattatgaacgggagatgttctgtctcctttgtgaagggacaatctgagcacctaacacccctataagcaaataaatgcagagatgtcctattgttttgtttttgtgtttttacttaaagacaaatgcaaacaaacaaaaaaaccacagaaacctccaactacaaggccaacaggaagtcagaagagacatcaaaggactgttacaatgagacatcatggaagttacaaaagtgaatgtatttttcagtatctttagtttacaccctaggaaagtctctagtattttgttttagaatatatgtatacatataaatattttatatataacttatatgtatgttt

SEQ ID NO: 476164 - DNA, 1393 bp, Homo sapiens
cggcttcattcttgaagtcaatggtaaaactgagattcaggatgatgaataacacacccaagagcaatagccaagtgtcagagcgtggactcaggccccaggtcatagatgatggtggtaatggtgatgatggtggtgatggtgatgatggtgttgatggtgttgttgatgatggtgatgtgatggtggtgatggtgatggtggtgatggtgatgatggtgatggtgttgatggtaatggtgatgatggtggtggtgatggtgatgatggtgatggtgataatggtggtggtgatggtggtattggtgatggtgatgatggtgatggtgatgatggtgatggtgatgatggtaatggtgatgatggtggttaaaaaggtggtggtgatggttaatggtagtgatggtggtattggtgatggtgatgatggtgatggtgatggtggtgattgtgatagtgttaatggtggtgatgatggtgatagctatgtctttatttaagtactttgtcatgctttgcagatttttttcataaagtaaatcattaaagacatggataaaccttgctatttgcccacaatcaatctcatttctttctctccctctcaataagagccactagtctgaatttagtagttttcattggcatgcatattttaaaatttactatatatgtatatatccctgtataatatatagtatgctgtgcatatttttaaatgctgtaaaatgacatgctttttaaaaaacatcattcatggagtagaacgttggacagacgggtatgctcatattcaactttactactaatagtcaaatcactcttgagattaattgtataatttaaacttctgccaacagttttggatgatccagatctttgtcaacatttgacttgtcggactttaaaattttgatccatctaataaatatggaatgctaccatatttttattttaaccaaggaaacataattgtaataataataagaccaataaaagtggattaataaatttttttcaggcaataatttttcaaacgtacatatatccagtttctttattttctgtcaattatgaggcataattaataaagtttgtatatatttaagatgtacaaaataatgttttggtatacgtacatactgtgaaattattaccgcagtcaagcttattaacaaacatatccagtacctcatatagttacctttttgtaggtatgtggtgagaacatttaagatctacttaatctcttagcaaatttcaagtatacaagacagtattattaactatagtcaccacactgtacattagatctccagaaatttccattaatagtaataccaataattattagtattattgatataattattgtaattattactacaattat

SEQ ID NO: 476165 - DNA, 642 bp, Homo sapiens
ccagggcgggactgggggagccgcagcagctggactctggctcaaggaccagcaacccgaatgtttctgtccatgacccatggaaacctgtgtcctgatactgagatatctaggaagccaaaaccgtcatcatcagaagctggcttagagcaccagcagatccctccagagctgctgccattgtgtgagcctgatcatctggctgtgggtattgttcaaggaccgcagccaacaacacccacagtttttgctggcccggagcctgagaacttgagccagttcccaaacgtatacagagtttctctgttaggatacaacatactgttgtacgtggcacggctgcagttgagtttactccctccttgggacaggcagaatctaaagctacgattgcagggcctgagatggtccttctcaagaagggaacaggaccactgtcctggacaccactccaggtgtagcacaggtgactgcaaagtctgagctagcatcatctctatcaatcaggtttgagcattctttcctctgccagttcatatttactgatgagtccttctgctgaattttttattttagttattgtgctttgtacttgaataatttcctcttggctctttttcatagtttatctttctttattga

SEQ ID NO: 476166 - DNA, 574 bp, Homo sapiens
agcgtgctaaattctcactgtgttcagatcagcagatcagatgagaggggtgggtgaagcaggaggagctgcagggtttcccacgtcttcagcatcacacattgggccctccagcctctgccctaccatcgtcatcatttggtcactaccgggacttgcttgttctggcagcgctgggctctcagcctctgggactctggcccaggaagcctgtctgtccacattgggcccattttactcccacagtcacagaattccaggccccctctctcctgctggtcttcgtgcctgtcctgtggctaaagcctactggttaaatatatcaagagaagagtttctcctcaaaccctcagtcagaaagcattttctcggcaggaatacattagggaaagtattgtctaatacaaacaggagaagcggaatactgcactttatttccaaattctgactaaatccgcagtgtctgtacggcagagataatcctacatcatttttagattttgcagaaaactgtccctcccttattttttaacatcaaagagaggatagaatcagtctggataaccattaacag

SEQ ID NO: 476167 - DNA, 1014 bp, Homo sapiens
ccaaggcactctaggatgataaaatggggcattaccccataaaatctctaagtcattattttccatttggggggtatctggcagaagaaatttctaagcagcaaagaattcaagaggtgacttgggtgctgttaaaggcattcagttttataagggaagcagaacataaaagtttggaaaatgtgcagcctgacaatgtgatagaaaaaaaaatcccattttctaagaagaaatttaagccagctgaagaaatttgcataaataacaaggagctgaattttaatccccaagacaatggagaaaatgtctccagggcatgttacagcagctccttccatcacaggcccagaggcctaggaggaaacaatggtttcatgggctgggcacagggtccctctcctgtgtgcagtctagcgacttggtatcctgcattccagccccctcagccatggctaaaagaggccaagactgctcgctacaatcgtcccacactgaggttctgttaaggtttcttgtcttagtctatttctgtgtctgcttctatttcaatattttctattgctcatcatcaagtttattggtgtttcattttgtttactatgctgtcatttcatccactggcacactctttttcatctttataaataacattgggttcctttttatgctttttatttctctcagtgttgtactttaattttatgaacatgtctgtaatatttataatacctattttaaggtccttgtcatttctgaacctgtgttaactggtttttctcttttaggtcactgtttgctgtttctttacatgctgataactttctacaggattctggacattgtgaatgttacattattatgtgtttggattgtgttttctcccttttggatgggttttgtttcctcatttgtttgttgttatattttgctctgttttgttttgttttcttttaacggacaattgtaaatccagttgagcctcttaagttttatgattcaggaacgtcagctcta

SEQ ID NO: 476168 - DNA, 1107 bp, Homo sapiens
ttaaggtggaagcagccagttcagcggagggcatgttgcgttgtgctgcctgtgaacaccaggcacaagttccttatcggcatctggcatcacaaaagacctctgagctggggaaagatatgtcagactcatacatcttggatgtgaagagtggagagtggttaccttactgtttcccagaccctcagattaacatgctaaccagggagcttgtcctgtgccgtgccctaacgattctggcccagttgtctggtgagcaacctttgaatctggattttatgcagattcatgaagcgaggttgatgcgaagtgagttttctaagaaaacaaaggtagttgatagcaggtccaaaagtccagtatcatttacactgggaaaacagtgcagctgccacccaagcccccatcctttctcactttcacaggatttgcttcacaaacaactgagaaatagaacccaatgcaatatctatagtctagaagtagacaccagggagttcaggccgaagaatcctgaggcatcttttgtatcctgctggacatgcagctaatgctagaatgtgtgaccaattaaagtaggtgaaaatcacctatcaatttattcctaaacgaggtaaacaaaccaacagtgcacatctccaagaaaatttcagactttgaacagcacattgtaactcattagccctcccatctcatcctcgttttggcgaagggtcaggaccagatatctagacagccccaggagtactcataaggctgccccagtgcagccgtaagattccctgttcctacacagttcaggagatgcactaggaagatacatatgcaaaacgccatggattcatgaagatttagacatataagagagtgaaatgtatattcaaatggtgcttcaaatcattgagcaaagatatattattcaataaattgtatttccgtatgttctaggcatttgtggtttttccagagtaatattttctatttaattatataaatgacttttgattcaacttcttggttgctcacggacttttctgatggtaatatgtcagtaagataccaagaatactcaaatttaaggaaaacatattgttgtagttctgtgtc

SEQ ID NO: 476169 - DNA, 797 bp, Homo sapiens
gggctaccgggcaggatgccctggccactggcctccagtgccctgggctcccctccgttttcaagccccctcctaatggagaagatgaggaggctttgggattcggactggcttccctgctcctcagcttgcggatggcctattgtaagaccttacgatcgtcctcgccagatgtctgctgttaaaatgagggcattgattggaaaagaatgggaccctgcaacttggaatggggacctgtggaaggatcatgatgaagctggggacactgagtttgtgaactctgatgaatcttttttgccagaaggaacagcttccccatccccagtagtggcaacatcccctctccgacccatgctgccatcagcctttccacctttgtctgggaagataaaccctgcactgcctgaggcaacagtgatgtccttccctgagacagttgccaggcaaaataatgttgattctcctgaggagccacccccaacacccctgtttgcttctagacctaacactagactaaagtcctggcaggcacctagatatttaacagtgagaaccgcagtcactcaactacaaaatttaaatacaatggaaatattggatcccgaggtggcagggagcaaatggcagcactcaactgtcaaaggtaaggtgggcataactaccgtaatggacagcagaggcaaatcagcaatcagaatagtctgactcatgtagagctgtgacactggctaattaatgatggtgttcctagaagtgaaattgataggaagcctactatattcctatattaattg

SEQ ID NO: 476170 - DNA, 1415 bp, Homo sapiens
ccttctgctgtgctgcctggttcctaacagcactcagtcgatgaggaactgggagagggacctgtgcactaggaaataaattgcttgttgaaactgttccgggtatgcctgcatgccagatacccaatcttgcaagaccgccattaaagttttgcttctgctcttctccgtgcccctgagtccattctttgggtttggacggatgagaaaatactccagattagatccagaggacccagtaggacagggtcttctaaaggtcaactttgtgaccaaaagccgcccagatatcaccaaacagttacaaaagattgagggctggaatgaaaagtcgattgaagagttgctgagggaagcacagaaactctttgtaagaagggaggaagagagacagaaacaaaaggcaaagattgtggtctctattaatctaaaagtagagatctctttgccatcaaataggaaaatcccacaaccgggaggaaacagcagcatcgctggactgtgctgccacatcgtttcactgaagccccaaacttatttggtcaggtcctctaaaggaagaaattcaggcattagaggaacaaaagcaagctcttgtaacagctccggtcctggccctcccacctctagagaaaccgttccatttgttggtgacagtggatcagggtgttgcccttggggtgcttactcaaatctggggatctttgtttccaaacttcttgatcctgtctctagaaggtggcctgaatgtgtacaagtgatagcagctacagctctgcatgcagaagagagccaaaagctaacttttgatggggctctaatatcagcaaccttctggtggtcaactattaagaaaaaggtaaactggatcaattacatctattataatcagaaaagattcatcagttacactcaagatgcccttaagggtgtagccagccaactaaatgccactagccaaatgtcttgggaaaacaaaattgcactgaacattatattagcaaaagatggggcaaatcaaagcggggaagcttactggtcaaagttggattcaaagattgtctgattgtcagttgattgaaagtttatataaagacctggaaccaatagaagggagtggctgggttaaggagtttcattgagctattccttaatgcaagttctgctagtgacaaattatttgctttacttagtttgagaatgtctttattgctcctacatgcctaaaggaaaaacagttttctcagctacacagctttcagttgacagcttttttggtttccacgtttgaaaactgttgtgctacttccttgtggtctccaggctttcagatgaaaattctgctgtcatccatattggtgaactcctataggaaatgtatctctttgctctaactgctttcaagatttatctgc

SEQ ID NO: 476171 - DNA, 627 bp, Homo sapiens
cgctgcctccccatcaccttccaccatgactggaagtttcctgaggcctcaccagaagcagatgccaataccatgcttcctgtacagcctgcagacctgtgggaaatgtgacaggcataccaaacaaggtccccacaccctgggcatagtctcctccacgagcattcctcgctttggcacctccgatgctgaggcagttcagcacagggttctcctcctcccaaccagaatctgcagctgcttcctgacaacttttgctgatgagcagatctcactttgcctgcaccacagtggagcagagtgcagcagaatgaatgccgccaagtccttccccatcaataaccttaaccaacacatggcaggaatgggtgaaccaagatccaagaacctttgcccccaggtgggacatctccgaggcacttgttctacactggtttcaagggttctccagtgggattaaggagacaagtatctcagttttttatgtgattattttgtggaagagagagattaggtaacataaccaaagtcacatgaatattgcatttctggactgggatttggatggaggtctttctaattgcagagctattttgcattaaaactctgatgaagaagtacaaagac

SEQ ID NO: 476172 - DNA, 824 bp, Homo sapiens
ctgccaacacactgtcacctctcaatgctgaatattgtcatgacaatagggctatgggtctcaattcctgggaaagacaaagctctggggcctttaatttgcctgactgccattccagggctccttcacaagctctgttttccacactgcaatgtctataacaatgacacttttttctctctaaatatttcagattcctttctgcatttattatctcagttgctgacattaccagtcatgcagttacaatgtctggaaatatccatgaatactcagtctccctttagagtcctcattcaattaatcagagagtcttatttatctaatctctgcaatgtccctttacttcatcctctcctctgcagatctctgctgctacactgctcagaccctcataatctcctacacatcaaatggtctttctcctttagcaactccacccttccaccctattcctggaaactgctacgacagtgttgattataaaatatagatatgatcatataattttttcccattctgcatgaaactccagctcatggttctctcctgtctgtagaaaaaaaatcccaaataagtcttgatatataactctaaagtaaactcctatagctttctctgcaggactttgtccgtgaccatagcagtcatcatcatactgcagattttagtgagaccccctccacctcacaggacaagtcagtctttttcattgttgggatcccagttcctagcttactgactgactggcatttagcagacaatagatatatttagcagacaataggtactttcaggtgtccctttgtggtagctttcatttt

SEQ ID NO: 476173 - DNA, 874 bp, Homo sapiens
cttggactggctctccttgctcctcagcctgcagatgagcgtcctgaggtttgcaggctctttacagataggttgcttccatttctcatgcagtgtgatccagcagcacacccaacaaggctgtgaaggcagctcagggctcgcagcatctccagtgctccaccacagtcccgcctgcgtcggtaaaactgcttaaggcagcgctaattaatgtctcctgcttatcctgcactcccctcgcagggtatcgggtctcagaatcgacttcctggactttctttggcacgtctgctgctggaaatgaatcagaatacagggagagggctaattgacaggtctatggatgccgaagacactgctctgcctcagaagacatcatccccacgttaccaaaaacatcactgggcctgccctcgtggcacccttggcctcaaaaagcaggtgaacacccatagacacaggctccaggactcccaagggccaggaaggtccccacagcccacactacaggttggcccctgcagccccacaatccagcagacccaggttccgggcctgctccagcagaccagggtaaaaagctgtctagaactggaaagtcctccaaggacccaggttccaggaccacccctgtgttcccaggtcccaggctggcccctgaagactcaggacccaggccagccctcacttcaatgccaacaccaatggacccggtctccagactccaggccagccctaatggctccaggcaccgggttaatgcctgtggtcttaggtaccagaccagccctcatgggcccagattccatgccagcccttgctggaggctgaccccaaattcagggcagtcctcattgctccaaactttagagga

SEQ ID NO: 476174 - DNA, 3619 bp, Homo sapiens
ttattttctgacacttgttattttcatctttttttaatagtagcctgaatttgtggcctaacatatggtctattatggagaacgtccttccactgagatacatttgttccattcttcccattataggtggatgggaaaattcccaggtaggcagagatatctagaaggcgttgtgatcataggagatgacagctctatgcctgtcattgcccctgaagaccttctactgggacaagatgtggaagtggaagacagtgatattgacgatcctcaccttgtagcgaatggtgaagaaatttcagttggaggaaaactaatagaaagaaatggaatggttactagtagctgttctacaaaagaatttgctgccaacagcagtgtacctaaagaaatactaaaagtttttcttcaggaaaaggggtatcatggaaatgcagggataattaacaaccaaggaaaggttacacatggagtaaatctaaatgaatattgactatataaaacaatcataattttatctgtttaatgtttaatcttcagtggcaaaaatcatagaacataaacatttaaaattttctaaatttcaaccctgaaggtggaaaaaacactgacgtatatatatattagattttaccaatttatgcatgctaataagaatgtattctattcactttatgaaatttcatttagctgtacatttatgattgttatacttcattatattaagatgagatcaaaaagctcacccaaaattatgtaatgcaaataaatattttgaacaatactttttggttgaaaaacgagaaagccaaaatatcattgcattttgatatttttattcaatgtattaattatataaagtttttttttttacatcaattaccctcatgcagacacatgtataaagtttttcaatgttgatattaactaaggtttttgagaaattggtaaaagtttcagttttattaaagcatagtgtcagtattattaaattgttgtaaataaatgagagaattgttgaaatgaccataaagtttaaatgtttaagtattacatgttgaaaaaatgacttgttatcaataaaagaacagcacacatttaaacctggttagataaaaaaataaatattcagtagaattaagtggtcatatctgattagtctaaaacttagatttgttttcatttttatatttctgtttactgtgctgtattaatgatgagtaacaggttatttgaatacctataaaagcaaaatttgttgaagatacaaaatatttggttagtgaagaatttaagagattttgaaaaactccagaaggatgtaataaaactagataactaaacaatttgttgtcaaatgaaatgtaatatacacagtggaagatataatacactataagaaatattttaatgtacatccactattttgaaatgattataaccactgaaaaattaaatattaatatacactcgtacagactgtccttaacttatggtggtttgagttatgattttttgactttattacagtgtgaaagcaatacatattcaacagaaaatccatacttcaaagtctgaattttgatcttttcctgggctagcaatatgcaataaatactcagctcccagtcatccacaggatcatgagggtaaacaaccggtagtgatgccagatgattttgcccaactctaggctagtaagtgttctgagtatgtttaaagtagggtaggctaagctatgatggtcagtaggttaggtatattaaatgcattttcaacttacaatattttcaacttacaatggatttatcaggatgtaaccccaacctaagtcagggagtatgtgtacttatttcatcctcaatattttatttagataattatggagtacctattatggtctttagattccatatatctcatatttcaaaattatatggaaggatcaaggaccaggaataaccaagacactccttgaaaaagaagaacacacaagacaagatttgtcctattacatattcacctcgttgtaaagctatattgcattttataggcagtattgaagtagggatcaataaatacaccagtggaagataaaagaaacatattccagaaacagattcatgcatatgtgaaaacctgataaatatcagagctcttgtgtcatatcagcgggaaagacagttaacacagaataaagggaaagcaattgactattcaagtaagaaatgagaaacagaccccatttcaattgataagcaaaaatttatcccatactgacatttgaatatagtcttgattttagataatagtattataatgacatcaatattctggttgttataattatactatggatttataatatgttaacattagggaaaggttgaagaagaaaataagcgaactttctgtgttggttttgtaactgttctgtagctctataattctttgaaaataagaagtgttttttaaaaaggtagtacaagtaatatgtgatcagtaaaaattgaattccatgttgatcatgagttttaatgcgaatagcaaaatttaatattcttttgaaaacaatatataagaatacttttaaccctttgtacttggaaaaaatttcttaaataagacttaataaatacaaaccataaataaaaatatggataaatccaactaccttaaaaacaagattttctgtatatcataatttctatctcattaccacaattgttacaatatttttaagaaacagagtttcaagaggtcaatgacagctcatagaaaatagttacttagatatgaaaatcaaatttaatctcatttctgcctaattctatatttttttcctttgggcgttatagttttctccttctcaaaaaatatattttaaacaataagctaattaacctataattgtaaaagaatgcatggataatataacctgcattcatggcatagttgtatgctcacacctacctaaatttacaagagaaaacagcttttagtttattagaatccattttatctttggttttgacattttgaaatgaggcataaataaggatatccttatataaaaacatgtcatgcatattgcaattacaaatatagattgatacaagtatgctggattggtgacataccatgaaaggtgtggctattgatgttaagattttttgaaattgtaaacaacttttaacaaaagtctgagccaaagtatatgttttatttaacttacatgataattttatttctgaataatcccataaatattaaatcccagcaaaaaacactttatgtttcaaaagagtattaggttttatgctcaatcatccaccaataggaatattaatgggacatttgattttccagtagaaaaaacttaaaaaactttttattgtacagggctgtcctgtgaatttcagtaaatctcactgatgggacccaaccaattatattcagtgcattgcttttctttgtgacaatgcaaaatcattcataggaggggtcttcaaaaagtttgtgaaaaaatgcattttatgaaaaaactaagaagagattctaaaattgttttggacccaaataaactcatactaacttgttataacatgtctaagcagga

SEQ ID NO: 476175 - DNA, 1003 bp, Homo sapiens
gaaaactctagataggtccttataatggaaaaaagacatgtttaaatgctgtgaacagactaggaacctctggatccaggaaaggtgactgagtccacaatgcctctaacagacctgaagataaatcacaagacaacaaaacgtcgctgtctcttatttggtgccctatggctgaaaatgtgcagtgtttctgatggcattgctcagtttagtgcaaattattcccaaccctgcaaccagacacttcagcacagtctacaggctgcttgtgaatgtggagtttttcccgtctgcctgtggaaagagacactattctcagcactgttactactgatccttctgggtggctcctctgtggccccgattgttggtagaaatatggatgggaatggtcattctagtatggtctcaggtggaaatgaggaacaggttattggaaactggagtaaaggtgatccttgttataaagtggcaagcaccttggctaaactgtgtcctggcattttgtggaaggtggactttgacagtgatgaaattggacatttagctgaggagatttctaagaaaaatattgaagaagcatattcggttttccttacattaggagtaagatatgagagaagagagactatccatattgcaaaaaaggagaaaacatgttccaaagagaacactacaggtgtagatgaacaactacttgataagattcatgtttctgtaaaccgcaaatggaatcaaccacttcagcggaagccagaagtagagatgggattatacctgcagagacactgccagtttgaaatgagagtttggactttagactttagggttgatgctggaatgagttaaaacattcagggctgtcaggatgatatttgcacacaaggagaacatgaatttctggaggttggaggtggaatgttatggactgaatgtttgtgtcctcccaaattcttatgctgaagccctaacccccagtgtggctgtctttagagctggggag

SEQ ID NO: 476176 - DNA, 670 bp, Homo sapiens
tctgagaaactagaaactagaagagactttgcacaaacttaacccaccacacaaacccacatgaatagaatctcactcacatgcttgctttccaggcagtatccacagagaaataaactgaacaaccacaatctgaaattttggggaaacttttgtgaaaacatgcaaactccaaattgttaccccgtgttgccaaagaaagtgaggggagcagaatccgcagaagaagctgcagggacgttttggtgtggtgggaagtgcaaggagaagagcgctgcctcaggtacaggaaactgcggtgcccagctggaggcagcggcaccagaaagagtggcacccagctggaggcagccccatgcacagggcggggtttctgagggagacaggaaagatggtggaggaagctctccacagggagccaaaggaagcccatctcaggaagcaccttcttctaagaagcatgcaagaacgtgttctgacagttctctcctctccctgagcttggtaccactcaggaatgttacttgaacatgaaatagtcttgtgttctattgcaaagttacctcctttggggacaacttatttttaggttggtaactactataactgatgtattatttacccgtgatgtagtctgtacccttagtcttttgatactaactcttgtagc

SEQ ID NO: 476177 - DNA, 750 bp, Homo sapiens
ttcaattttccataaatcccacttggtcatgctgtgtaatttttttggatgccaacggatgtctgtaaaactggaaatacgctggctttcacagcagattcaggttgattctttatgtgaccttaacaattataccacaaagtatgatggctgtgacagagagccaaggcgcacatggctttcagcagaggtcaaaaagacacagggcatgaagagaatatgggacgaaagagatttattaatatttgtctctcttaaaggaactaagcaggtggagtcaaaagatagtgttggtgagagaatgtggattcttacagcaaagtgcaactgtgagaaagatggaagatttaattcaggctatttcaaggctcagcaatctagacagaaactgatgatagaaaactataaaaacagtaaaggcataaataattttaacaatactatcaaccacattgacctaattgttatttatagaacactatacacaactactgctaaatacacattattttcaagtgcacatgatatgttcactgagatcaattatacccttgtccataaagtttgcctcagatatacgcactatagctactaaaaaaatgtgttcatattatctgcttgagttcagaagttaaatgtgaaaaggttgtcatacctgcatttttagcaattattagtctaaacgcacttttaagaagtggtctctttactttttttgttgaatcagaataacatcacaaaaaaatgtta

SEQ ID NO: 476178 - DNA, 574 bp, Homo sapiens
ctttctattcaggattatgactctcctttagtgtcaggctcgtatgcctattgttatatcttcatttctttggagtcagtttctggaaatttgtattcctttggtggtgtcatatttccttgaattttgtgtttgttgttgtgctgtgttggtgtctgcacttttaaaggagtcatcacctcttacagtgtttacgtactgggttcagtggaaaaataccttcatctactggtggatacaaggtcaccagctgagttggaaagggcgaggatcacgtaaaaatggaagggaaactggtgcaaaactctcaggaacctgtgattctctgcatccacctgtcttcgtcttcaatatttcggtcggtgtttcactttgtgacctcacatatcctcacctgacggatctaagaagagttgagaaagtttttgatcatttcaatcataaaaatttcatgcgcgtctgtgtgaagagaccaccaaacaggctttgtgtgagcaataaagctgtttatttcacctgggggcaggtgggctgagtccgaaaagaggcagcaaagggagataggggtggggcc

SEQ ID NO: 476179 - DNA, 705 bp, Homo sapiens
ttgaacagaaaatattgccaaagtcagccaattggggctgtagtctatttcctttgggttgagggtgttttctggtatcgtcccttcgtggttcactagaaaaaatggtactggaaaggggtcccaatacagacccaaagagagggttcatccacgacagcgccacgggcccgagggacgaggacctgcctctctggcccacccgggcctcgcgcccggagggcggagccacctggttttttttaaagcatctaaactggcaactggaatgttgttttgtgttcatgcagtaattgattcagtagaaggtagtcttcctccagttcatattgaaccaatacccacggtagcagttaggagaaattatactattaaaactgacatggctgtaaaattgggcacattttacgaatgcttgctcatttatttgcaccagtgtatccacattcctctgattaacggctttggattggctattgttattgacagaaaacctgttatatcttggagtagcctctcattagaatattcttactggggtgctgacttatgcaattggcttagaaaacaaaattcatctttcaacaaagctacaatttcactttggaaactctgtgaactggaaagcattagagaaatgttgaaaaaggtgatgatcatggagataatgacaactcatgaaagagggtcttgaaagggctctgc

SEQ ID NO: 476180 - DNA, 831 bp, Homo sapiens
ttttatatcgatgaggtctttttatatgatctcattgagatcatatgatttcaatgagatctcattgtatatcaatgaggcctttttaaggccttatctccaattgcagccacgtttgtgggaaagtttggaacttcccagagactcattgagtggttttgaccaaaatgctgatagtgatatggacaatgaagtccaggttgaggtggtctcagatgaagatgaggaacttattggcaaatggagccaagatggtgcaagccccaagccttggcagcttccaggtggtgctgggcctgtaggtgcacagaagtcaataattcacatttgggaaccactgtctaggtttcagaggatgcatggaaatgcctggatattcaggcagaagtttgctgcagaggtggagccctcatggagagcctctgctagggcagtgcagaagggaaatgtggggttggagcccccacacagagtccccactgaagcactgcctagtggagctgtgagaagaggaccactgtcctccagaccccaaaatgatagattcaccgacagcctgtaccagaacattgacccctatgcttctgagagtgaggatttcttctttattaatgtttcagatcacatcttcaagtctctttcacatgaagctgtctacaacttttcctgattccaaacaatgtgattctatgtgcaataagattttggttagaacttattaattattatcattacaaataaatgtttggtattatgttttgatataactgttcatggattaaatcaagtacgatttttctgtttttatcttttttttaagttcacaacctg

SEQ ID NO: 476181 - DNA, 1749 bp, Homo sapiens
agcagcagctgctccgttcagtcccagaaagccacttctgcagtgagcatttgaggataggcacaaaatgaaaatggcagatttcctctttggtcaggagctcttccctggtgtgactagaatagctaaagttgaacgagaggatggaaagttaattcctttagaaaatattgatggatcacagatggtttaccaggcactattccacagagtggagatttctggagagaaggtgttcagaaaaggagaacatcaagtgaaaggaaaaggtgtcaatggctgtttctttaagctttgtcacgatgagttgagagcaggcattgctgtagaatgtggttcttactcgggaatcatggcctctgtggaatcttggctgaatccctctggtgttgatgaggggaacaacactttggatacccccttgaagagtctgattcctctgcaaagcctgaatgtgccagtgccagaaacagactccccagactctcctgaagccaggaccttcacctattaccaaattctgaccattgggacctgcaagggaatactctggaggcctctggaaggtttccctgataaaaaatacatgcctctggatgtatatttggctgtcattgatgcctggaactcaaagaacaagcaacaggatcagtctattaaattaaggtcatcacagcagaaacgtgcaaagagcctgagttctcaatatcacaactgagcctttggaacaactctgaaattgcggacttggggtcttcttatggtttgaaataataagtgcctttattgtttaaactactcttagttgggttctctgtcattgaatacctaaagaatcttaactgataaattcaccactctgcgttttgtctgttttatctttaacaatctggcaatcgatctaatttacctcattgttgtttcaatttgtaatacccaaatttatttaaataatatttaaatgtagcatttacttcagtatatacataaattcattccttgttcttgtgtgtttcttttttataataatatatttttatacttaaatctgtaatccaaaaagaatcaagagaaagaggaaagaaagaaagaggaaagaaagaagaaagaaaaagaaagaaaggaatgaaggaaggaaggaaggaaggaagaaaggaaaagaaacagtacaatttccctgttgtctccaaatagcttgccaattaagaaagaaagaaaagaaaagaaaaagtacaatttccctgttgtctccaaatagcttgccaattgccacaacacatgtcataaatataattcatcatttccatacttatttgaatttttttcatatcatattacaagattcctacatatgcttgagtgtatttctgtgtttttcagagttttcactactctgatttatggatatatattttcattaaagtttctacagtatacagatttaattattgtgttttatattacaggattagggatatcaataatctcccacttctatgatgcaccttttactaactgctcatcttcttttgaaagaccttagatggtgttttagtatgtgattgtttatgtacctttttatagttatttatgttcacattgagccagaggagcagggccatccttatctttgtattacacctccaagcacaatgccagacatgcagtagtgtctccaaatctgaccaactggtgcaaaatcaacacctgtagcatatgtactgtattagtctgctttcatgctgctag

SEQ ID NO: 476182 - DNA, 603 bp, Homo sapiens
acctggaaaagctgcaggcactcaatgccagcctgtgaaagtagctgccggaattgtaccctgaagtaccgcagggacagagctgctcaaggccttggcagcccacccattgtgtcagtgctgaaggagggctgttgcgttcaaggctttttatgcacccacttcccatttggtttcagtcataattcaaggtggttcctggaacacctattagttgaactgctagcaatgggtaggagtttatcaagtcaacaatgggcaaaaggatctaccaggaaaaaacaaaacgaccttaccctttcttatgatgcactgaaaatagagctttcccatgtggtcactacagatgaatgcagggaaaagaattcggaaagaatcagtatcaaaacaaataaattacatgcaataacagcttctattcttccttcagcagcacttgtgaggaagcctttggtccgtatcacatgtggaatgataaacaatgtcagctagggagggtcagggtctttttttgtctctctgtgaagctaaatttcattgaaacagcccgatttttcatctcagaaactctatttttagaagtaaaaaggggccacagatgtc

SEQ ID NO: 476183 - DNA, 665 bp, Homo sapiens
tcacttctagcactctcaggacgctgactgtgggctctggtgccaggagagccatgatgtcctgtgttttccttagacaggatgctgaccgttcactcagtagatcatgttcctttcaagttcatgttcggtcaagagcaccccacagcaaagcgacaggaatcagttccaccatgtttggtgctcacaggcgacttcagcacacttgcatacagcattttctctgggacatgtccaaacaccacaaagaggtggctgaaaaacctggggtccggcaccagcaagacagaatggatgacatcactgtcaccatcactctgaccctacaagagctcattgctcccaagtatgtgaaaggaaataagaacactgggctggaggtccacttaccctatgccctgatagtttataagcatcaggctcctaacaaatttaacatccttaaattgtcacagccaaaagggaccaatccagactttgcagaacaaaaagactctcctccttaaagtaaaatgccaatctatgaaccagaaggcagaaactgctcagaaatttttttaaaaagcagttttctagctttaaaactctgaaggtccagagcattatagttaattaactttattaatgagagcatttttagaatattttcacctgttcctattttt

SEQ ID NO: 476184 - DNA, 632 bp, Homo sapiens
tctacaagcatatagtaaaatgtgagggactctggaaggaacatatcatatgaaaagatttgcttttgcttctaccgtgtgcttaagatgccaggaatatgtgatcactttaaatgattttattgaatttttgtataaatttgaaccctatgacccaatgatgtcaggtttagggctacaatttctcaagaaaacatcctatttcttttcttctcacttgactgtaatgcctgtggctttgtcagctgaagtctcctttgtttcagagcagggctgtgtccatgagtgtgttttccccacacctctcctattagcagatcaacattacattgtgaataacagatggagacgtgcaggttttccaccctcccctgaagctcctggccttggcctaagactagatggcagcagcatttcctggctgtccccaagcagcacatggcatttgcttcctatgagagaagagtttcaaaactaggttctttctgtttttatagattgatggcttaaaatatatacttcttgttattttagaggttttgggaaatatatatatgttttaagcccataatctttaatataaaatctataatttatttagctgctgtcactgtgcttatttttaaatttaa

SEQ ID NO: 476185 - DNA, 1022 bp, Homo sapiens
caaaagtttaatctaggagtaggtaactcaacctaagacattgaataattagatatggagggagaagaaaaaggaaacatactgatgaacttgtttttctgtcctggcaaactggattatgggagcacctttgaacaggatggaggggagccatgtttggaggtttatggccatccagccagacataacgcccagacacaacaaagggttggtctgatgaggacatattgccaatattggcaagcagcttttaccactcatatatttagatgttcatggatgctgcacgtagcaccatcaacattaccttccaagacaaataatattgattcatcatccactccttttagggaaagttggaatggatggtctccagagaaggctgattcctcccattcttgtacatgcctgctacttccatcaatgaagtccacttcctgtcttagactaacctgttgagtagttttgatcaatgtaaagtggtaaaagaatcttgctgtgatgagttttaaatgcctcccatactgaatgttctccaacctctgtctccagctccaatctctggatttagagatctctggatagagttcactctatctagctccacattcctaaaaggatgagaaaacctggaggcctctaagcactttatgctgaattggtttgcacccaaaacatcatagtcctgtagaatttcacgagaactatgtgagcatagttctagtttctttgaatggcacatcactccagctgcttaaaccagggcccagaagagtcttaaatgccttctttacccttttactccatgtccatgcagtctacctgctttcagaacccagaggaaaaggatgtcctcatccccaatttacagcaaaagccatgaatttacagatgacagcttcagaattcatgtcaggatatgtgttctaatctgaataaagcattatttccaatatttggataagcctattttgtgaggaatgtgttcagacaggacagaaggaaggggcaagagttgtgtc

SEQ ID NO: 476186 - DNA, 555 bp, Homo sapiens
ctgccagttacccagttccaaagtcacttccacatttcaggattcatctcacaactgatggcgccctccctcagctgtcagcgcgaactttcacggtatgcagagatacccatgggtgtctatggtctttctctcttccctggacatatagagcaaatcagcataaccacctctctgatgtcaggggttgctcagagacccacttcttccagtaggatatgtggacaggcagtatccccagcttcagacaggagcttagatttgcgcttctacagcccaggtttcatctgctccgtggccggcactgtgcaggcagagaattcagcctctacgaagcttctgcatttaacccgttggacaattagtcagtttcagaactacttctactgcttcattaacggtaataataagatgaatacgactgtctgggaaggagggggaagtggaaagaagagagacagagattgaaatagcctcagctttgtagagggaaagtaaacactgatggcatgtcatgctattttcctagctggggaaaaaaaaaaaagcagtttt

SEQ ID NO: 476187 - DNA, 902 bp, Homo sapiens
cagcacagaaaaaccccgaaccactctgagagggattatggttatgaacggcaagtgggcccactctgagtgatctggaagaacgagacctcacacagtcgaattctgctctgggcgttggagccagcagcccgtctgagccgagctggaggagacaaagcctctatgcgcgtacaacactggtggagacttagactggccccatctttggcatctgcaaacagtgctgtgatgaatagcttggtacatgtggcttttttcacttgtggggatgtgtcatttctaacggcagtggacgtgtccactagaattgttatatcttcctcccacactggtcaattttttgagagaagtaagctagcaccaacttctgctacacaggagagccatagaaaactggagattcaaaggcacatcctggagcttattctaagtttgaaaaaggctttcagccatcataagtgcccaggactcccaagttcatgtccagaacctgctctggtcctccaagcttcagactggaccaatctatcaccagaagccttaccgaagactgtagatggaggtctacagcccgggagcagttccatcagaggctccaatgtggtgtttcagctcacagtttatggacgggtggtgaaggttcagacgggtggctcatctgattggacagaatctcagatgcaggctgtgccaaggcaaggctggcaagagtcccagaagttcagttcacttgcccctggacttcctgcccttgccctgtttggggaacaagcccctgaggcctgcatggctggctgtcctctcttccgttcatctcttttgtcctgaacaccagggggccaagtgtggcagaagtgtcatcttcccatgacacgcgccttgtgtccctggggagggag

SEQ ID NO: 476188 - DNA, 1089 bp, Homo sapiens
cagctgcccttgcatctgtgtctgagtctgaaccaggaacactaagattctccttcattcaatcttcttccgtttttctaactctgtagcattctcagcacatgcggctactgagaatctcaccggctccgtttctacctgcaaactgcacttgtggggtctctaactccaggggcaaggttcatccttgcgtgtccatccctacggtgtgtccagtagtttcctggagatggagcttcttgacagaaggaggagatgtcggatggagaatgagaagaggattccggctgcctcccaaagctgccctcctgagcgggctgggagaagagggatgcgtgctgggaggaaagacggtcccccagtccactccaaaaggcatatacgggtcagccccggataacagaccgcagccgagcgcccccagccctgcagctggtggcatgcccccagatcctagctacagatggactgtgtgcctcagtttcagcactattgtgaatttcccccgtgttttcatggatattttcacaggtggttgaaaaattacaggaaaggaaaaagaaagagagaagtgtgaaaaaagaagtgttaatatccattgccttcactcttacacacaggaatagagttgcatgtatataaactaccttggaaaattgttcagttggcaaacatcttttcaacgtcttcagggagacctgagtagaaactagtcatgtttcctttttaaaagttagcaataaatgttccagttattttctctcacctcaccttagacagagtatattcttcaatatcttctatcctgaaaaaatatctacaaaaatatttctgaaagtcaaggaagagacgagaagagggtgtcagccttacgtttatggtgtattaaggactgagtaagccctgagttctttgggcatttatctactggtattcaaatacaatggacagttactctgccagcatgattaaatcacagtattcatagttttcataaatcaagcagataatttcctgcattttaggtctttcagcatcaaacaatgttttccagtaacaacttattaaataaattattcctgtgtgaag

SEQ ID NO: 476189 - DNA, 858 bp, Homo sapiens
caacccaaaactgaaggatctggggctttcttcctgcaagctctgctcagcgaggggcttgtgctcctacaagctctttgctacataagtcaagccaaacttccatttcccgacatgacatggccaaataagagaaggccaggttaccagagattaaaaataggacgttgctgcagagtcctgggaccggctggcaaatgacacaggaactttgggagcgcatggactcaggccaagcggccgtcctcaccctcggccacctcagggcagggacgaagagtaagcccagcctttgatggtggggattagtcccaaaattctggagttcaccactcctcccgctacactggctttatttcaaatctctgttggtccatgtcaacatcagcgatgggagttgaaagaagtaaaacagctcctggaaaaatacatgttggtgtgtttacaacatgggaaaaatatgtcatctcagcattcagtgataaagcaggtataggtcccaacagaagcgagggtcaggacaggcaacgggaaacatgtgctcgctgctgggtcccaggactgagtgactcaggaaagctgctcagacttatcagctctgatccctgggacttcaggcttcaagagatgtggtttgacgggtctgagaccactgcccagtgggcctttccccaaggtgggggatctaaggacccttggattaatcccaggctttgtctcccacaaaagcttccaagaccagtgccaacattcttggtggacacctgttctctaagagctgggcttgagcccaaaatgcatccacacaggccacttaaaagccatcccaagttaacttgggtcagaatttaatcagcc

SEQ ID NO: 476190 - DNA, 1227 bp, Homo sapiens
cagcagccatttcttagggacaagtgttttctgtgccaagaatgaaaacagttcatcaggtgagaagaatcaactacagaggactagatgagacaggcccagtgcatctcattctgaaggctgttgatatggaaaaccattcttggggcacgcttttcactttctcatcagctgaatgtgatgtgaaggacctggctgagggaagaacagatactgagactcctggccaggatgtgcagcaagtgctggaggaacccaaggaaaccaaggtagtgacctggggtgcaggagagcctgcatgtggaggagaagagcctgcaggtggaggaggggagcctgcaggtggaggaggggagcctgcaggtggaggagaagagcctgcaggtggaggaggggagcctgcaggtggagaagaagagcctgcaggtggaggagaggagcctgcaggtggaggagaggagcctgcaggtggaggagaagagcctgcaggtggaggagaggagcctgcaggtggaggagaggagcctgcaggtggaggaggggagcctgcaggtggagaagagggacctgcaggtggaggaggggagcctgcaggtggaggaggggagcctgcaggtggaggaggggagcctgcaggtggaggaggggagcctgcaggtggaggagggggacctgcaggtggaggaggggggcctgcaggtggaggaggggagcctgcaggtggaggaggggagcctgcatgtggaggagggggacctgcatgtggaggaggggggcctccaggtggaggaggggaccctgcatgtggaggaggggggcctgcaggtggaggagggggcctgcaggtggaggaggggggctgcagatggaggagggtggcctgcaggtggaggagggggtcctgcaggtggaggaggggggctgcagatggaggaggggggctgcagatggaggagggtggcctgcaggtggaggaggggggcctgcaggtagagaaggggggcctgcaggtggagaaggggggcctgcaggtggaggagagggacctgcaggtggaggaggggagcctacaggtggaggagaggagcctgcaggtggaggagagagtccagtccgcaggcctgggatgagccaaagttcagttgtaagtctgcggagggctctgttttgtcatatatttctggttttaaaaacacaattgatgctaaacatactcgaaggtatatc

SEQ ID NO: 476191 - DNA, 508 bp, Homo sapiens
acatggtgaaatgctaaactcacttctactaaaactgggaaccagacagggatatttactgtcattaccattatttgatatttttaaaggaggaggcttggaacacagatatatggagaaagaaggccatgagaagatgaagatggaggcagaggttggagtgacggatctgcaaagaccgcctagggttgctggccaatgtcagaatctaaaagaaaggcatgggaacaaactttcctcagagctcccagaaggaaccaaccttaccaaaaccttgattccagacctctggccttcttcactgtgggccctaggtgagatggtcacactgcacttcctgccatttggagctcctctcttccctctgaacccaggactccctcatgaaacccagtgctccttgcttctcgcctgttaaataagtaggacagactctaaaccagggctctgaaatgcaaatgacccgcaaggtgatgggaacgggggtggatcgaagcaacatattacc

SEQ ID NO: 476192 - DNA, 2215 bp, Homo sapiens
cagtgggccgggtgccagtagcggaaccccgagcaacagctcacactgactgtgaaggactcaaagctggttcaaggttaagatggctcaacaagtgacgagccagaaatgtcatctggccactaggacgccgcattatgaaagtgtgatcatggttcaagaacgttgccatgaggaaaatctgtgcacggaattactattattaggatttgccaatttccatggtgtaaatgctcccacatggccaactgcaagccaccaatgtgaggtcactggatgcagagctgggaataaatatgttccaatgacacttgggagcaggtctatgcacagtacggggcacaaacagaggctccagaggcccagagaagaacccttctacagtaaaggacagggaggcactgtgctgaggactagatggggtgggggagggcagaagaacagcaggagcctccagaagctgtccttaacccctggcctgtgttctcaaaaccgatgcttgggtctaagccacctccatctgtttccatgggcttctatcctcttgtctcttagtgccatgtaaaaatgaaatttcttcttatgcccataagttataaagctcttatgtggccatatgaacttcaaagcatttaaatttcttatggatcttatgtgattaaatgtgtggcatcctgaataatgaatatgagggtaacaaaagtggtactgttgagaaagacatttataatggctctaagatacagtatcaaacacttagtctggaccaataagatcttgataatatgtttctttttttaagttttaaccaagggtcaccaatgacagaaaaatttataataaaccacttccaaacaatgaatatcttagatgaacaaagctgaaagaatttcagattcccaattcatctttttacgattcatgctgtttctcagtttattttatgacttcaaacagaggagtgaatggaaataattcggttatttttatctctgtgcctctgaggctgtcctgtactctcaaacacattttgtgcttcaaaaaaatctcaagagttgcaaatattccaaaggtgccaaagtgatacatttctttttcaacttgcagggtaaagatatagtccaatttggtgaatattaacattgtcatttagaataaaatataattgctataagagctaaaaaattttgcatgatcaatgtgctatactcaataaatgcaagaaaatgagaaattagtcatcaaaaagggcaaaaatgaactccataaaaacacaaaatgaagcatagaacaatctaagcaaaaaggaattagtaaaaataatgataaatcaaggatattttcaaaggaaatgaaacaaatcaagaactaaaaacctagacatgcttaaacaggaaagaggaacattacaattagataattggatgagtgtatttggaaaacaccattgtttccattatttattttaactaaaatgtgggacaacagtaaaaatacaaatgttattccgggcgaccaattgtcacaaatgaaacatggtacaagggaatcaaactaccacaacttagctacagcatctgtcaagagcctgaaaaaatattaaggaaaacaatacagaggaaacagcaagaaacaaatggttgccgcgtcgactcacttcagagcgacccacgatggaaaggttacctttggggagcgagaaatgctcaagatgagatcaagctggaaatggacttttctgacactgttcctttcagtatttacacagaaaaaaaattaacccaacacaaggagctttgcccacgtgcctcttctctccgtcttttttaagtacataaaacaaagagtacatctttaaagattcattatgagataaacagatcttcaagggaatatcactgaccacaggtctgtggaaaacaagctgcgggctggccgaagcggcttcctttttgttaaacatttctgaatgcctgacagttttatgtaaatgcaatttgttaaaaaatgattctgcagaaaaaaaaaaaaaaacaggttgtcaactaatggttgatgaggttttgttgtaagttttaatactacacgaccacaaaatcttgaaaattcaaataaatggaaaacaattaaaatatgatcaataataacatacacccgacgtgtgtgtggaagtggatgctcttgaggggtagtttctacagtcatggtgaccgcc

SEQ ID NO: 476193 - DNA, 645 bp, Homo sapiens
ggtgtattccacacatgccggagtttccaaggaggaaacgtgtttgaagtccaaagaacaaggacggcctctgcttgctaatcagatcttgtgagacttattcactaccatgagaacagtatgggggaaaatgcccccatgattcaattatctcccactgggaccctcccacaacccgtgggaattatgggagctacaattcaagacgagatttgggtggggacacagccaaaccaaatcagctgcccagactcttttgccactctcggtggtcatctgatgaagctctcgccagtgaatttgggtcttccaggaaggctgatggcagctgcctctgctgggaaggaagcgtttttcccacaacatattaaatgcggcactggaggatggctggctggtccaggggccggatctggctctgttgctcacaatgattctgtttggcaagcgtttttaaaaagccttgggtcagctatatgcaccagttatgtgcattgaaaacagttatatgcgttacagtcagctctgtgcatcaaagtcagctgtatgcatcagggtcaggtacatgcatcagggtcagctccatgcatcagggtcagctccatgcatcaaggtcagatatatgcatcagggttggctgtgtgc

SEQ ID NO: 476194 - DNA, 1657 bp, Homo sapiens
ttcccttgtggaggtggggtctcaagaagagagagaaccagctaactgtagcttcaggtgaacaaatccctgcaaccgcctcgggggctcacccgcctgggatgttagtgtcaggatgcacggccccaagcaaggattccctcatcggagctctggcacaaggacttggggctgacacccaggacaaaaggcaaatgatcccacagaatcctggggagagcactgtttctgcctgtggcttctgccaaggaggctcattaacaccggtgattcattttgacccgactttcactcaccaaggccatggcttctctaagctcccagaaaacagtcctgccagatggaggaagtggccgctctgcagcccccgcataaatattcacaggtgcaaggctggcactggattgttggactcgggatttaatggagggaatgtgagggagagtgacttaaactcccatttactcagttttctcatctgtaaaatgggagcttttaaaacatatgcaaggttgttaagtgaatcatccaaaatgcttatttgaaaatagtatcatgctatgtatttattctgacaaccaaatactgaatgtcatctgcaatgaagacatctggggactcctatgtattggtgtatctccaactcattcactatgaggcagctcaacacatggaataaaacactagacactagagctaccaaacaagtgacatatggtcttcacaaaacctccgaaagtccatttctctcattttactaacgaggaaactgagaggaaggaatggtaattgaccaaaccgacacattcagagtagggcaaagccaacaccagaactttagtctgttcctgcctaaagccttccattagctgaaagaaccccagtagatgatttagtcgcagttttatgatgaaatacactataatttctttataatgatgataacttatggtcagatataaatcaccttttttcaaaaaataaattataagcaaaaaatagcatgaaacctatataaacaattatatctgcaatggtttctacatgagcaataatctgtaaataaaaatttatttttattgaaattaaaatcaaataaaagtttaaaatccgctatatactattaccatagtttgggattacctggaagtacttctataccacaacctacttccatccttcagagcctaagaaagagaaaaaaatgcttccctatgaaatttaaatttagaatattcacatggaatgaaccaaaacagagagctgtgtaaaaaaatactagcaaatgaataagtagaagagaaagacagagatagaggaagaagaggagttgaagaaggaggagggagaaaggaaagaaggataaaagaaaggaagaaatatgggaaggaagagagggagaggaaggaaaggtcgagtagattgcaaactttttcccaactcttactaattatattaaaatatcaagtactaaaatatagactatattaaaatatctaaaaggttgaagataagcttcaagaacttgcagtccaacagcaagactttctataaccttagattttcttaggaggtatcaaaagcaaatgtatttattcaacttaccatctttaccttgaagtctacatattacaactgttttatttatctctgtggt

SEQ ID NO: 476195 - DNA, 1807 bp, Homo sapiens
accagatagaatgggtccaattctcctgccctcagatcaggaaaataaaaatcctaatgctattaatgaaacagtggccaaaagaagtcatggcatcagcacagggcatgcgtcgggacagggcctcaggcaacgctggcgatggtttccaacctcatgtgccgacatctcccatctgaggctggagcttggaagatgtggagagatcacaaggtttaagtctcttccttttgcagaggccacaagtccacaaacaaggcatcgccagggtcacgctccttccaaagcctgtgcaagaggacgcttcctgcctctaccaccttctacaggtggctggcaatccttggcttgcagctgcttcactgaaatctctgccttggtcatcacatggtgcccctgtgtctacaaatgttgcacaagagcagaactgtcatcatctgtgaacaaatcacattagtgtaaacactgactttcaaaaatcgtgatctaaatctacaaagaggatggggaaagggagagttggagagggtcaggagagctctgccagagctaaatgtttatctttcatttccataaagtcaaaatattatcatttaaaaaaaaataaaaagagttgtataatatttagaatgtggagatcatgctatgtatttattctgacaaccaaatactgaatgtcatctgcaatgaagacatctggggactcctatgtattggtgtatctccaactcattcactatgaggcagctcaacacatggaataaaacactagacactagagctaccaaacaagtgacatatggtcttcacaaaacctccgaaagtccatttctctcattttactaacgaggaaactgagaggaaggaatggtaattgaccaaaccgacacattcagagtagggcaaagccaacaccagaactttagtctgttcctgcctaaagccttccattagctgaaagaaccccagtagatgatttagtcgcagttttatgatgaaatacactataatttctttataatgatgataacttatggtcagatataaatcaccttttttcaaaaaataaattataagcaaaaaatagcatgaaacctatataaacaattatatctgcaatggtttctacatgagcaataatctgtaaataaaaatttatttttattgaaattaaaatcaaataaaagtttaaaatccgctatatactattaccatagtttgggattacctggaagtacttctataccacaacctacttccatccttcagagcctaagaaagagaaaaaaatgcttccctatgaaatttaaatttagaatattcacatggaatgaaccaaaacagagagctgtgtaaaaaaatactagcaaatgaataagtagaagagaaagacagagatagaggaagaagaggagttgaagaaggaggagggagaaaggaaagaaggataaaagaaaggaagaaatatgggaaggaagagagggagaggaaggaaaggtcgagtagattgcaaactttttcccaactcttactaattatattaaaatatcaagtactaaaatatagactatattaaaatatctaaaaggttgaagataagcttcaagaacttgcagtccaacagcaagactttctataaccttagattttcttaggaggtatcaaaagcaaatgtatttattcaacttaccatctttaccttgaagtctacatattacaactgttttatttatctctgtggtcaatcacaaagatatccaaatccttcactccttcttgtatctttccacttttaaaaaatgttttt

SEQ ID NO: 476196 - DNA, 1434 bp, Homo sapiens
caaattcatagaatcagagtggaatgggggtttccaggattggagaagggggaactgggagtatgatgaccctggagggtgtgatgaccccatctagtgtgatgactctggctggcataatgaccccagctggtatggtgactctggctggtgtaatgaccccagctggtgagatgactctggctggtgtaaggagcccagctggtgtgatgactctggctgatgtaatgaccccagcgataactctggctggtgtaatgaccccagatgctggtatgatgattctggcaggcatgatgactctagcaggtgtgatgaccctggagggtgtgatgaccccagctggtgtgatgactctggctggtgtaattatcccagctgttgtgatgactctggcaggtgtgacgaccctggctggtgtgatgactctaacaggtgtgatgactctggctggtgtgatgaccctggcaggtgtgatgaccctggctagtgttatttatgattctggcaagtgtgatgattccggcctgtttgatgactctggctggtgtaattaccccaactggtgtgagaaccctggctggtgtgatgaccctggctggtctgatgaccctggcaggtgtgatgactctggcaggtttgatgactctggctggtgtgatgagcctggcaggtgtgatgaccctggctagtgttatgattctggcaggtgtgatgattctggcctgtttgatcagactctggctggtgtgatgatcctggctggtgtgatggctgtttggccggtatccaactcccctcatgttcagtgcagcgggtgctcccttcacaaatgccactggctgggccaccagtgagcctgtgcacagtcagcctacatccaccccccgcattagtgttgttggttcatgtctcccatttgtttctaaccaaacattaagtgagggctatttgccagcaagaaaatgggttttctttttttctcttgctacttttgcccaccaaaagaggtattgagaactttaaagtgaccagaaagttctcagcaaaggaaaaactgaagagacttcaagctccacacagcaacagttagcattaatgattgggagctggtcattctcaccacctgagaacatgaaacagcttgattagtgactccctttggttgccagctgtggctgacatccttggttacctccaatcttgttttcattatttcagttcctcacaagatatagagctgtgagttcacaattccttacctgaattgtgttttatgctgttcaaaagttagtgaggttcaaaggatactcagcatcaagatgacaaggatgaacacttttataatgatccacttctacttaataaataataaatgtactttttctttgttatgattttcttaataacattttctttgcactagtttactct

SEQ ID NO: 476197 - DNA, 1087 bp, Homo sapiens
gctagccctgcacctgcagccatggcctcgcccgctgcttggaacagcacagaagcgcaaccttcctcctcgtcctgggctggaccacacgtccggggaatacctggtctgatcggaggcagtgcagccccagacgacgagacatcagcttacacctgccgggacatcaaacaagcaaaagacaaatgtgggagaggatggggagaaactgggtcccttgctgcactgttggtggaaatgtcagccattatggaaaacagtgtggagaatgccgagtccctttctgccctgtccaatcatgctctgatacccgaccagacatgcgtgtgcaaccctcactatcaggagaacgtgtctgtgaagctgaggaacgtgaggaagccagctcccgctaagagcatggttgtagcatgctgcttcaacctgaacgtgcttgcaaaccagcagcagacgaggtctagtttagtgcatctggttgggggcctgagggtctgcatgtctaacaagctctccagcaatgccatgactcatggttactggtccaccacccttgttgtggctggcacgtgtgatgactctagcacatgcgatgaccctggagggtgtgatgaccccagctggtatgatgattctggcaggcatgatgactctagcaggtgtgatgaccctggagggtgtgatgaccccagctggtgtgatgactctggctggtgtaattatcccagctgttgtgatgactctggcaggtgtgacgaccctggctggtgtgatgactctaacagtgttatttatgattctggcaagtgtgatgattccggcctgtttgatgactctggctggtgtaattaccccaactggtgtgagaaccctggctggtgtgatgaccctggctggtctgatgaccctggcaggtgtgatgactctggcaggtttgatgactctggctggtgtgatgagcctggcaggtgtgatgaccctggctagtgttatgattctggcagagctggaaatggtgttctgtgcagtgtgggttttcaaaatgtttactaactggattcatttgctccaccctttattatatcgtttc

SEQ ID NO: 476198 - DNA, 4034 bp, Homo sapiens
ccagtgatgagcttgggcagaaagatgaatccagacgccaagtggagaatagactggaggacagaagtgcagggccgcaccaacctcgagaaggaaaaacaagggacccaagagcaagagccatcgccgttctgggttcacagccaccaaggatggacttatagtgataatcaaaatgtccccactgcatcctgcagagccacttgtcattttatgagcacctgtgtagccaatgcctactctgtgcaagggcctgcagatacaaagataagagaaactgaaggagttttccagaaagaaataatcggttcaggtgtgcatcgttcaggtgtgctgacacttcgtctacagagggtcagacacaaagacactggtcaccattatggcatgttttttaaatatgatagaggcttttttaaatctgggaatggtcaagagatattatgaaatagctattcctagacttttattttgtaactacggtcagtgggtaatgtgcgcacctgcttcagaattctaaaagtacaagaaacaaatattttcttacacagatggtaacacactaatcatactgctttgttgcctttttcatataatatttcttggagatcattcgccatcagtacatacagagctgcttcattctttttagcagatgcttaattttctcttctgtggatatatcataatttatttaaccagtttcctattttcctattgatggacttctagtctaatgacactcttttgctaccataaaaaagtgctgcaataaatatctttgcacgtgtgttgttttgcataagtatgagaatgtgtgtgggtaaattcttggaacatgcaattgttgaactctcagttcctagaaaggtatgcatagtttgtaattttgacaaaatgttacctacttgttctctataaagattgaaaaatgtgtattcaccaaagcaattagtgcctgtctctctctacatcattgcaaaactcttgcaataccgaactttttgggcattgcagtttgtaggtaaaaaatgttatcttagatttaatttgactatgtcttactatgagggaggttggacatcttttcctgtggtgaagagccacatgatctttttctcactgtgatagatcatacctttggcccatttcccagtgcatcattggcaactttcttacagatttatagaagctctttatatgttaaagaaattaagctgtttgtgaaataagttgcaataattttttctttttcattttcctttaactccatttgctatacttttgccatgcaccattttctttagttttatgtaattaaactcatcagtccatttttttcatttccctgtcccaataatattttgtaaggattatcctatattttcttccaataattcttataattttattattacacatttagttttttaattaggaacttgtttgatataaaacgggaaatctaatttcttccagatattgggacacaattccttcaacatttccccctgattttactggatatcaacattttcctcctcatttgaaatcccacctttataatgtacaaaatgtatctgggcttatttttgtttcatttatctgtttataatgtggatcacattattttaaatttatggaacattccagctctttattttcctatttcaaaatgtcatggctaaaatttgtgcgtttatttttccacagaaaccttaaaatcagcttatctggctccaaaagaaaatactcatcagtaattttattgaaatctcattaagtttatagattgacctagagagaattagagctttatgataataagtcttcctatctaaaacagagtaaactttaatttgtacaaaactgattttgtgtcttttcgtacagtttaagggatccttcacatagaatattttaatcatgttggaatcatgtattccttaagtgtttgatagaatttccctatgaaataatcagggcctgattctttttctgaaaggtagcttttgatagctttccatatttcacctacaataactcaactcattaaaagtttcctttttatttggggtgaatattagtaaattgttctgttttagggtttcgaaatatttgtacagaaccaaaacgagtaatttgttacaattctttcatttcttccaacctgtaattattacctatttatgcatttgtattctcaatgtttatcttaactttgtcaacagttcatcttttttatttccttttttatatcaagatctagcttttaaatgtattactgctatcagattttgcttttaatgcagtatctgttcttatctttactaatttgtctcctcctttctttattttaatagtttttttacttcgagttggattcatcattgacctcttttcatctccctttgacattaacgcatgtatttaaaactattactattactcaagtctgcaatcttttgttcccaagtttctctgaagaatttcttattcttatttttcagatatccaccagtttcagtttttattttctctttcactcaatagtaccttacaagagatatactttgttattatcattattggttttattactgttttattcttcctttatgagagttagggatttcttgtttttaatttctagtttcagtgtgatcaaagaatactgcatactatttctactctggaaattagtatgatttctttggtgaatttttgtgactattttattgatacttgaaaataaatatatattctgttttaagggtacagtattgacatctcaattagatatgccttattaaatatggggttttctagtctagtggatctgtgatgcattaagaaaaataatcaaagttttcctttactcattaatgtgtctatttctccttgtatttctgtttacatgtatatataaaacatttgtttttgcttttaatattgatgctgtgttacttggtagacagaccttttgtgatatcttcattgctgattgtattctttgctattttaagtgcccatatttgtctaagtgttccatactctctgccttaaagcctgatataaaatgaggacctttggatttacttttgtttgcatttgctaggaatttacttattcttttgttttaaacctttctgattttcctcacctgaattttaacaaatccacagatgatcaaaattctgtcctggagccagcaatttactctggttggaaatgtaagccccaggcagcagctgtttttgaccctcaccctggcatggagtctttctcacaaatggccctcacagctgggagtttcaaacagtctattctttcaaagcagttgttccctaaagcatttgtcctgtctgcccaggattttccagagcccgggaccaacgttactggagtcagcctgttgttccacaccgaagcacaggccagctgcccacccagggctggcagtgaatctgaggccgagcccaaatggtatcaacttacttgcagctgtccttaccagaagcccaataggccctcagcataattcccctacgtgtttaaaaaaaaaaaatctttctatgctgtggtgagaagactcatagactctgctttcttctgcacagctctgacagcagggaggtaaactcgatgtccaaagagatgatgcaaaattgatttctcattaaagtagaaattttaaacttaaacagggaaatatcatccttttacaaaatactgcttatttagggatctggataacttgcatgtatcaagaattctcctacattggtatttccacagtggggacagtggttgaatcgctagaagttacaaatattcctctttcaaaagcaaagaaacagggtgattgattacctcaggtgggaaaagagcaacacaaggctattatgcaagtgtttttggtcaatcagctgtttcaacacaaagggagagagaagttcttgattaggtgagccctgataattaagggtgaccttcactgagggaaatttattcaatttatcaatagttaataa

SEQ ID NO: 476199 - DNA, 597 bp, Homo sapiens
tcaggctgtgatgtccgttggctgtagtgaggaccgagtctctgttcccaactccatcagtgtggtcacacagccggagtacacttatctgctctccttgcagttgggtattgtgatgttaccaagttctggtcgcctgaacacaaggaggtgtaatgtgccccttccaggcctgccccataaaatgtccccacaagtgatccttgaccatcctccctcctctgctggctggaccaggggactttggaaggcatgtgttgaagatggcagaagggaaggaggtgggccagcaggggaggagctgcctgtccactctgcatgcctgatgtcggtttctcccggcaagccaacagcaagcgaaagcgaacgtgtcctggagaaaaaaacggaccctccttggtctgagtcctggctctaccacattagccttgaggtcttcaggaagttactaaccaactacattgggaacagatggttggacatctcccagcaacagccataaatgagaggggaggagagtgggcaccacattctcaggtcttctaatagggtcagcccacaggagatgcccattatcttagtaagaaccacagccct

SEQ ID NO: 476200 - DNA, 457 bp, Homo sapiens
ccatttctacaccactgccaaagatctttggattcaagtacatgacagacatggcgtgcaggggagaaggtttagatagagtagcaaaagttgtttctccggtggaaaaagctgaatccaatcagataatttccaagtcccagcaagtggagagcctggttctggtctctccccaacgggtttcgaggctacactgtctctttagtatctctggggcagaaaaatcattgccagaagcgagattagacaagtgggacagggttcctcctcagacacatcctaacccagggcagggctgtgctcagatatctacctggtggatccgacagcagccacccgccctgcacacggagttccaggagcagctgggcaggttgcaacttctttttcaagaacagtgtgtgcagcctccccgtggttctgctgactccagcactctcattattttttaactttt

SEQ ID NO: 476201 - DNA, 558 bp, Homo sapiens
gggggtcccgggtggctagcagcacctccaggtgaacacctcactcccgtgtgctgagtgcattttcccggctgctgctctctctaccggcagcagtacaggccgcccgcccatccctgaaccagtggatgggacaatgcactgacatttcatctctttaccttttacaccaagagttggagctagtgttgcaatgggctgaacagatcgtcacagagcacccatctgacagctctcggaagatgctcacctggaagctagcaactcgcattcagtgcggttccctgcaagtcaaagaccttgggtaccaacaagagtgggctgggccattctcactctgggaacatccctactggagaggaaatacagatttcttgggactgcagatgaacaaatactcgagggctcgtggccacaaggtccaaatcttctgcatggtttctgagcgggatccatcgtggtgctggttgtgcccatggcccttctcaatgggacagccttgttttgcaccctgcggtgcaattctctctgacattcgatgactggaccaaggatggg

SEQ ID NO: 476202 - DNA, 571 bp, Homo sapiens
gacctgactgacagttctcctgtccttcccacttccgggatgagctgggacatccaggtccccagacctcgtggctccactgagctccatctgacaggggcagcccaggaagagtgtggctgtggcctagagcttagagctgagcaggttgtggagtgccaggcagtccagaggctccaggggttcggcttggacataaccggagctcctccgactccccaggcaagcactctgtcattgtcttccagactgttctcacagatgccccgcaaaagagcacaaaagcagccgccagaggcctggagccccgccaagaggacagggcccccgggacagagggacagaggggggctgtgcccaggtggccctgaggctgcccaggactcactggctcctgctgctccatccacacagcagacagagaagcttccagtcggcaaagggctgggaacgctgcagcgccggcgctcggaatatttggattttctgaatgttaacacactggaagctcctaaggcagccaagaggctatgagctcaaaagctttgtgagagcttttctcggagagctc

SEQ ID NO: 476203 - DNA, 1171 bp, Homo sapiens
tgatactacaaaagaatgacctttttgtggcttaaagcacaagtatcaggtgtgcatttgaaaataaaatctgcttcctcccatgagtttagtagggccacgtccactgcttcctctcgtgagtttagtagggccacgtccactgcttcccatgagtttagcagggccacatccactgcttcccatgagtttagtagggccacatccactgcttcccgtgagtttagtagggccacgtccgctgcttcccgtgagtttagtagggccacgtccgctgcttcccgtgagtttagtagggccacgtcagctgctgcccgtgagtttagtagggccacgtccgctgcttcccgtgagtttagtagggccacgtctgctgcttcccgtgagtttagtagggccacatccgctgcttcctgttggcttatcagggctgcatgtctcacagtcagccagcagtctagggaatgggccagtcatgagctgtgctcctaaatttggaaaaatcaggaccttgtggagacaaaaaggaagtaaacagagctaccatccttcagatgaccacgtctgggtgccatttgcagaagaagagccagtcttttccccattcagttaagcaccaacatattgaactatatctgaaggaaaacggaacgattaagtgtaagcttaagctataaattgtttgctcataaagtcctacgaccaagtatcttaatcagagatgtaagcagggtgcaaggtaccagtctagactaaaaaaactcataaagggacatcccaaagatgagggctccaagttcaaggttatttttaactaagacagttgtaaaaggcgtgatggatttaactccgtcactttcagagcagctaactgagttcagccagcagactgctttgatttgttcattaaatgtattatgtttgcattacttgagttcatttgatgagatattcccactctgtaaaatatccagctaaggatttggaaatctattcaaattttgcatccattaattcattttagaattttcaaagagtaggtactttaggcaagctaagatatatcccaaatattcggggaaacatccaatctacagaaatggtgtaacgtgttttttcatcgtaagcacgattggtgagtttatccatttaattatttttcttgctagaa

SEQ ID NO: 476204 - DNA, 524 bp, Homo sapiens
aggtttctgctccgcctctagatgacccctctgcccgccagagctggcctgcgggtcaccctgcaagatgaccctctgcctgcccgagctggcctgcgggtcaccctgcaagatgtcccctctgcccgccagagctggcctgcggagctggcctgcgggtcaccctgcaagatgaccctctgcccgccagagctggcctgcgggtcaccctgcaagatgacccctctgcccgccagagctggcctgcgggtcaccctgcaagatgaccctctgcctgcccgagctggcctgcgggtcaccctgcaagatgacccctctgcccgcccgagctggcctgcggggcatctgcagcccacggggccagagacccggatgcaactatgggcccgcccccagcaagtcaagtttctggaaaatcctatgaaccatcttgttctttggagagcttaacgacacctaggtcatcaacaacaatcaacaatgaactattgatttcagctgtaatgatcgaatagcagtgcctt

SEQ ID NO: 476205 - DNA, 663 bp, Homo sapiens
ctgagatgagcaagatgggtaggctttgtgcatccggagatggggggatgctccaggtgcagaagccagtgcaagcacaagtgggcaaacataaggcactagactctgggctggagcggtggagaggtggggccagctcaagagccacaactggggacctgtggtggtgcgagcttgggggtgcagagcaggacgttcagaggaggcagggctcaagaaacggcagcaaggctactgggaaaaacaccctcaggagtgaggaagagcagatcattgccattgaagaagcccttggctcctacataaaaaacaatgggaaacaacaatttctttctgcaaacacatggccccaaattgctcaatcatcaagcccttctacaaggaaagcctttgcacccattgctacaatgacctgccactggggcaaattttgtgtaaacatgtaaattttagtggttatcattttattaaaaaaagaagctcttgaatgttttttactactgattcttggcattctgtgtcttttgtgtatgtataatttaaaaatcactttgagcatttatgcacattactatatgacatgataattttcatgcaaaaaatcaaaatcaagttttagattaatttaaagggtatctgtaatatacactcagtttataaatg

SEQ ID NO: 476206 - DNA, 587 bp, Homo sapiens
gacactgtgtgcactcagcccatgcaaacagtaggtgccagccgaagtcgttcaagggcgacagagcggtcacagattacctctaggcttaggacggaggagttgctgccaacttttaaacacctgaaattgataagggagaagctgcctctgccaaaaccaatctggcaactgtgcacagaaaaacaggttaagaaacgagtctttcgcaagaagctgcctctcagtcggtcctggtgtgggtggctccatcacctgtgtgcaggccccttctggtccgcatccttttccctggatgaggagggcctgcaggctgacagtgacaggtgttcctccagtgcccgtcaggaatgcccgggctcccttcttctccagggaagggggtggggggcactcttcgggcccgtgggtatttgttttaatggaagaaatgtgggtaaatacagtcttcaagcacagaatgaaaacagataaaaatactgtaaaatcagaaaccggatttggattttaaagactatagacatcctcagggtagagaggatgagggacagaccagcttctaacccttcattcctacctggtgttga

SEQ ID NO: 476207 - DNA, 601 bp, Homo sapiens
cgggaagtccccgacgtgttctccatcactatcgaataactttgtgttgcttcattagctaccatttacaaaaatggtgcaactgttgtttcctgcaatggacaatgtgatgatcagaaaaatgtgtctatcaccttatgaccacttggaagaatgccaccaactattcacaagagtggcagtcctagaggatcattccagagagtttgccatggacattccctgcgtcaacttctgctgccaggaaaccacagaaacttcgctggttgctaagtcttcgtggcctggcatccgacacaatctccacagcacccggagaccactaggtcccatggaatctaataacttgctccaaaccaggaataaagaagcacatgtcattgcttactcaaggctatcagaaaacctaatagttgtcagatgtgaaatagagttttggattagatttgggctcctgttggaaattgggaattctgtggcttcatgggaaagcaattgccatgcagcacatcacccagagaaaccatcagacaacttagatccagaaaagtattctgcttctcggaatagtgtgtttgcattatgaggaaatatttctatt

SEQ ID NO: 476208 - DNA, 686 bp, Homo sapiens
atactacttggaaacttaaaaccgtgtgttgacagaatttcctccagttgaagagagcagcaggaaatgtggtgcgtctgaactgctcgagtcatgcccacaactcccattcagccggcttacgatggaagaggtgagccccttctcatttcaggcaaattcttccgctatgtcttcccacctcctcagggcccttgtacaatagattatagcctttcttttttgtaccttcagtttcatggagctcatatctttcttcatttaaacatagtcgtgtcttttcgtcttaaaactagcaagtctctgtctaacccaaaacgttaccaacatttggccccactttccttcgtcaaaatcaactttttaaaaagagttgcctgtacttgctctcttcctcaactctcatttatttttttacccattataatctggcttctgttttacctctatatgaaaactgctttacccaagacagcattgttgctcagttcaatggacatttttcagcctttattttactttgcctccaagagaaatttttgactctgctctctttgtttaaacacattcttcttttggtgcccatagaagtaaactcctgtggtttttgacctgcatctgtggctacatctgcttggtctcctttgggagccgtctgtcccttaaatgtaggtgttttagtctgt

SEQ ID NO: 476209 - DNA, 657 bp, Homo sapiens
ttaggaaagcagccttcgcagcagttgatttgagagttttgtatagaagagaggcacctatcatgttgcctctcgatccttctgtttggctgagcaaccctgggggcacgtccagctccgcagaggaggctgcaccagggctggccgttaagggcaccccaattctggtcatcctgatgccagaaggatcccagttctgagactgggacatccctcctggggaaaggagatgttaaaaccctctttccacagactcttaaatgctgcccttcccgcagagacatatgatcgctggtgcaaaatcaccgctgttcttcctcttagggcctctcagcttttggattctgaccattgctgggaatcactgctttcttctttccagactgttcaccccacagagccttacattgcagcaggagctggtggttttgagggagacggactcatgcattttacactcaatagcgatagtattgacatgtcacaaaatagttggctgttctttgagttgtactgttctcacttatcaaaacctcttcatctttttcccacactaaatttaattggtttctttcttagtttgtatttatgggattattgctgttcaagacactactttgcattgatctttattgacttccattgtatttaattgag

SEQ ID NO: 476210 - DNA, 615 bp, Homo sapiens
agtatggtcaatgcacacattatgttgggcatttacaagcgtcagccggcttgtcgagcgatgcacctcacacactgcctctgggcttgtagatcggagagccatttggccacatgtagaaaagcatccttcacagtggccaagatgtgcaagcaacccaattgtccactgatgaatgaaatgtggtatatgcatatagtagaatactatcctggctttaaaaagaaggaaatactaccatttgtgacaacacggacagatctggaagacattatgctaggtgaaatagtcagagaagaagaaatactgagtgattcctcttatatggagcatctaaaaatagtcagatgtacagaagtagacaatagaacgctggttactagcggatggagagggggcatatgcagagttgctgttcaatggattatcaaattacagttacacaagataagttccagagatctcctgtacaacacggtgcctagagttaacgataaggtattgtgcacttaaaattctgttaggagggtagtaatataggagttattaagaaataatttttaggcagctagaaagggtgagagttcttggtggaattttcctataataaaaagc

SEQ ID NO: 476211 - DNA, 554 bp, Homo sapiens
cgcctctctcgttaggtctatctttctttatttctgctttatatctggcccagaacttagcatggctcaggtggtggtgtctggtgacatctttctggtgaacatggaagggacgatgctgaggagatcccccaacccaaaggaaagagactatggcactgattggcggccttcaggtaagtggggtgcatatagccagggctttgactggaatagtttgcattcgtttaaggagtcaaacttgacttgtagagccaataaaagctgtttggaaaactggcctcataccttgcctattatacagtccctgtataaggtttctgacctgtggcattctaagtcacaggatgagataggaggtcagcacaagatacaagtcataaagaccttgctgataaaacaggttgcagtaaagaagctggctaaaacctaccaaaaccaagatggcgatgaaagtgacctctggtcgtcctcactgctacattcccaccagtgccacgacagtttacaaatgccatggcaacatcaggagttaccctatatggtctgaaagg

SEQ ID NO: 476212 - DNA, 551 bp, Homo sapiens
ctggcttgaaattctcgctgccagcacagaagcagtctgagatggacctgggatgctcgagcttggtggcgcttctgctggtgatacccagggaaacagggtctggagtggacctccagcaaactccagcagacgtgcagcagaggggcctgactattagaagaaaaactaacaaacagaaagaaatagcacatccactcagagaccccaaccaaaagtcaccaacatcaaagaccaaagcaagggaacaaaactggacggagaatgagtttgacgcactgacagaagtaggcttcagaaagtgggtaataacaaattcctctgagctaaaggagcatgttctaacccaatgcaaggaagctaagaaccttgaaaaaaggctagatgacttgctaactagaataaccagtttagagaggaacataaatgacctgatggagctgaaaaaccagcatgagaacttcgtcaagcatacacaagtatccatagctggattgatcaaatgaaagaaaggatatcagagattgaagatcaacttaataaaataaagc

SEQ ID NO: 476213 - DNA, 1288 bp, Homo sapiens
tcctggaaagttctgtctttaaactgatactatggctggaccaggagtactgcaagtggcttccactgcaggcaccaggcaattcaatggcacccaaaacctcagagacaccagggattgcagagccccaaagagggtgttacagcatgtcacactccagacatggggagccccgaggtctcggccccagagggctgaagctcttctctccttgctgccacagaatgatgagtggggtggcaggaaatgtgtgtttcggcccgtttctgttacactctttcagtcctgctgcctgactctggcccacggctcctgggctggcctggccctgacaacactaattcctgtcacatggggtggctgccaggcaccagcagaggatcaacatgtagtctgctgggccccggttgtccacgtgaaggggaacagccttcagccccctggcctgtcgctcatgctaatcagcacccaaagtccagagggcagtgagggtatgacatgtcagaactgtccccagcatgcacactggctgggctgccacagtgcctgggcttggtcacaatgttgttctgcatggagtgggcactgggagcagagagaggacagggaatggcaacaggcacttcttagcctgcgaaagcagggagcttcccgccccccacccccacctctgagagcaccaggatgtctggtctgggtccagaaccaggcagaagcagctgcgcccaggagcgcaggcttccaccccaacaatggggctccctctggaatcacctgttcctggctccctgtggctctgcagagagtacaagccccagccatgtctctcccactacagctggcgaccttgcagtggcccctccaggcaggctgctgctgccatcaacagcagttttctcatcagaaacaatgaaacaagactgataccagtagtgaaagaaataaaattgtcagcctataattctattaaaagtgaaatagcactaaaaatatatgtgaaataaagtcattttagacacaaaagcagaaaatattaatcaacaacagatctttactataagaaacataaggtcataaaggatgaccatggaaaagaaaaatgataccagagggaaatacagatatacataaggggctgaagaacacagaaataatgataaccttatagaaaaatatataggatttttattgcttaaattactttaaatgattgctgtttaaacaaaagcactaacaatttagaatatcagtaaggtataaaagacttaaacaaaactttcaattatgt

SEQ ID NO: 476214 - DNA, 1295 bp, Homo sapiens
caccagtaactcaagtggccagtgtccactctgtaaaatggaccaatcagcaggatgtgggcagggcccaataagggaataaaagctggccacagagccagcagcagcaacctgcttgggtccccttccaagctgtggaagctttgttctttggctgtttccaatgaatcttgctgctgctcactctttgggtctgcagcttcactcctgaaatcagctggaccacgaacccaccagaagaaagaaattccagacacatctgaacatctgaaggaacaaactttggacacaccgtctttaagaactgtaacactcaccgcaagggtccgcaacttcgttcttgaagtcagggagaccaagaacccacgggaaggaaccaattccggacacattttggcgacccagaggggacacaacactttggatggttccaggggcttaagcattcttgccaattcctccaaatgggccacctactgggagaatatcccaactgcacaaggctgtaagggtgacaagttctgccttgttccaggcaggtctggagataccatcgaggagtcagagcctcgagttggaaaccttaggaatcttcctagtgctgtggctgagctggtaccaaagccgcaagacaaattccttctcactctttcctccacaaacagaggagtctctccccatggccaccactacctcaggcctgtggctggctattgttgagagccaaattatatacctaatgctaaggtatatagcataaggtgtataagaatgcttgtgatttttgcacattgattctcagcaaactatcacaaggacaaaaaaaccaaacaccgcatgttctcactcataggtgggaattgaacaatgagaacacatggacacaggaaagggaacatcacacaccggggactgttgtggcgtcgggggaggggggagggatagcactgggagatacacctaatgctagatgacaagttagtgggtgcagcacaccaacatggcacatgtatacatatgtaacaaacctgcacattgtgcacatgtaccctaaaacttaaagtataataataataaaattaaaaaaattgagattatagtactattaattctcacaagatattgggggttcagttccagaccgtcacaataaaagtgaatataacaacaaagcatgtaaaacaatgttttagtttgccagtcatataaaagttatgcttacactatactgcagtgtattatgtgtgcgatagcattgtctacacaaatttgcatacctgcagaaatttaacttt

SEQ ID NO: 476215 - DNA, 3876 bp, Homo sapiens
tcctttcaggataaaactaccagggcaggtagagaaagatcatcaggtggaaacagggttagatgtgtctgagctcagattctccttgggtgaggcattctgtggctgctgtgatggatggacatttcagcctggctaagaaccattactggggaagtactatgggcatttggagtgtcatgcaaaaccaagtgaatacttgcatgcattgggaagctgtggagttttacggaagagatgaatatacctgtctcaccaactggctctatctggcaacaacgggcaatcagaagcccatctacggtttggtcaaggagagactctgtcacttgcaaaataattttgaaggagacttaattgctatcattcatttatataatgctgggtactcgaagcatgagaatgcaacagtccatgcctttttcatattcattttcatgaggtacatgaaatatataacacttttggatatttgttaccacactcaaaagttttgcatcttctatattctctactaatgaatttacatttatgcatggtatgcttgattagtatttgcattgtgctttgaatttctaaacatgttgaaataattgattagttatttctcccatagccccatatgagataagactaatgcttagttcttatgtaatgtttccaacatcagcgcttttaataaatatcacctagttagttttgatatcactcttgaaggctattatctccactttattttattaaaaaaaacagaaacaggatgaataaaccacttttctgaactgataaagggaataattatgaggaataggaaaattgggtctcaaatagaataaaaaataagggagaatctataagcactttaaagatcttatgagcttttttgtataatagccctcaatgcaatctaaatagaaaagaaataatttaggaatcatataacatcagctaacttttatgaaaatttaggatagtcacttcaacttactttgctacattttctttacctgtaaaattacaatgcttatgccttactgacctttttcaaaaaattgtaaagaaatatcaattaatgcatgtgaaaaaatcttcaaagaacagtatgattaacagtgtcacagttttagaatgcaaagttctgataagggaaacaaataaagccaaacctatagtttcaaaaggaaaatatcagtgtcacttctggattatgttcagcttaagattctcatgaaactttttaggaggatagaaaatcatgtaagatgatcttgtgctagtttgtctctgctctgaggcagaaaataagatcttcatagacaggtttgagagcttaaattcctacaaaatagttctaaaagtatgaggggctaaatcttgacactaattcacctagtgtggtattattttcctgaaataatcctccctggcaacttgtcatgaaaatctatcagacggacacatttcttcatctattgaattttttccgttgacatctccgttaagtgatattattaattctgttcaaaatgtaattctttttcagttgtactgtctactggggcctgaaatattcatactgactgttcctcacattttaatttattttttgctaactgtagaatatgatttccttgaaagcaaataagctttcttgtgcttattcctggtttcattggtttactaccctacagccacatctctagcaagaaattatttgactttgctgtgtctttggtcagatgaaggcccattcaaaccagtgctgttgatcatatagcaactaggtaataggaagagtattatgctgaattaaaatcttattaataactctgatatgtattatatatttgcctttggaatgccttttttcgtaatatttgaatcattattcatggaatgagagcaagagtataaatagtagatctgttatatcaaatggaataccagataagaatggctagcacactgacagaatcatgacaagtattcgaaaatggttattttcttccttcacttccaaacagaaaatggctacactttttctgacccagtagactactaataactgaaaagtgttcctcagctataaggtggatatgcattgcctaataaagactctaatctgctaataatccatatagagactacatgaaagcttatgcagaaatctaatggaaatttttcttctagcatcattcaaggctggacatgaatttgtctttgtctaccttatacctgcaaataattatattagatcagaagcatttaatttctccttatttgatatgtgatattgttgtcactttgtatttgaaactgaaatggtaagattaaagactgtgtcaaacagctagatacaactacagtatttagccagcatataaccatgaactaacacagtgcctagaatctattggatactcaataaatatatattggagaaataaaatatacaaatgaataaagttgtactatctactgggacctgagataaaatatgaatgatgaagatttttctgtgtttatatccatatatctaaacataatcttcgaaccttcctttagggaagctctcactgcccactacataccaataaatcatagacacttcaatccagctccttatgcccagaattagactgacagtactaagtactttgttcaataatgcctactgcttaataaaatatacaaatcatgccaagtaaatgtgacataatatgtgctaaacagtgctattcattttacccacagtgttaaagacagagtatacaactttagcattttaaaatattatatgttaaagcaaaaccagaagaaaataaatgggatcatttgatggtttgcagcaagctaattttgggagaaaagccctttgtaataaagctaatgtgatcttgggtaaaggaagctatctgcacctgcactgcagagataactgcgaaagaaagcaggcacaatgccagggagcacaaagaagagtgtgaaacccaaactggtggataagggcgttggaagatgaactgtctggttgaatattatagaacaggcaaactttaagttacatatgggaattttcacaggaaagattgggaaaaggcattccaggaagaagaagcaacatatattaagatacaaaataaaagataatatgtggtatataagaaatgtgaggtatgtggtttgagggcagctgaatgataagctagactcatgataggcctgattagtgtggctaagacatttgggttataaacaaagttaaagagaagacattgagaattttgagcaaacaataatgtatcaaatctatgtatacagttgtttctcttggtgtttgtgggggattgattccaggaccttttgggaataccaaaacctaagatgctcaagtaccttatataaaatggaacaatattttcatgctctgtatactttaaataatctctagattacttaataacacttaatgcaatgtgaacattatgtaaataattgttatactgtattgtttttgtgttttttcttatatttttattattttttaaaaaatatttttcatctgcacttggttgaatagaaactgcaaaaactgacaagattagaaatataactctgaacagaaatatagataacaaatttgttcatgagtggagagaggactggtcagactttaggtataaaaaaagcatgtagaatgttaaaaataatgcagtagtagagaagaagatctagtagatgagaaggattacagtgattttaaagaagccattatctggacatgaactggttgaattgaagaggaaatggagtatctttttcgcatggactaaatgaaatgaaggaatatcatagcaaacctgtttactttgttat

SEQ ID NO: 476216 - DNA, 726 bp, Homo sapiens
tggagagggtagagtcatagcttcctgcatgtgctataaatttccctctaaacactgcattagctgtgtcccagagattctggtatattgtgtctttgttctcctcagcttcaaagaacttatttatttatcctttaatttcattatttacccagtagtcattcaggagaaggttgttcagtttccatggagttgtaaggttttgagaggcactggggtcaggggcccacttgaggaggcagtgtgtctcttggcagacccggagcgctattctgggagatcaactgctctcttcagagctgacaggcaggaacgtttaagtctgctgaagctgtgcccacagctgtcctttccccccggtgctctgtcccagagagatgggagttttgtctataagctcctgactggggctgctgccttactttcagagatgccctgctaatagaggaggaatctagagaggcagtctggctacaacacctttgcggagctgcgggtggcctctacccagtccaaacttcctggtggctttgtttacacttgtgccctacttccttccagtaaaaaaataatgaagtcagtgctcatagaaattacttgtgtgcttctcatattatgtatggctttctgtcttagattttagttacaaatcaaactgactaaatttgtcaataagtgtataaactaattgaggacagaaaagacatcttaattctttgcaaataa

SEQ ID NO: 476217 - DNA, 479 bp, Homo sapiens
tgggaacctacgtcttgcatcagcatgacctggataatgaatcagtgcttgccaggtcctaaccttggtcccatcttgttttatggaagtgtggttactcctccgcaaagagataaaagaggagagaaggaaagaagatggcatccctgccttattcccttaaacctgtgcctatggcaaaccagagagagcaaggtgcccccatccattaattcttggagttctgaaatgaactgctgtttaccagggctgtggccagtgtttttcctgacagccggccaagagacagggaacgggctggagatcatctatcatccagattggagggctgaaatagagtgtaaatctctggggacacccataaatgtgcctgtctgttggctgccaagcagacacaacaagagcctgagtgttcaaacagcaaatggggagtgtatgtttcaagcaggaaaggaattcgtgtggcacacaaagtgaga

SEQ ID NO: 476218 - DNA, 843 bp, Homo sapiens
ttttattttctaatatgctaattagtatatgtggactcatgcagagtgtgcaaaatcctactggagctcaagaccagggaaggctgttttgagagtacagacccatgcccaggttgcagactcagtgatgatggtattagtttcagactcagaaatggcccaatccccagtggactcagctacagccccatttggtcttggtcatgctacaagaaccatctgccaaggccccagaccccaggctccagaggcagaccaggaaatgaccagaggagcagaagaatggcagaatggtgcagcagagaaggagagaagaggaatgtctgaactcagagagttcagctggggcaattggagaggagatcagacactggacggccaaattccaggggaagatcgtcttcccactccatcccacttccagctctccatccattctgttgagagccacctccaccacttaataaaaaccctgctttcatccttgaagtccatgtgcaacccgattcttcctggatgcaagacgaggatttgggtaccaagaggacactgagctggttaacacttaagccatctgcagatggcaaagctaaaagagtgcactgtaacgcacacccacttgggctttgtcctgcgaagggtcatgcaactctcatttcaatgctatctacagatgactagggagatgagaaaccagacaaccttagggaagttgggccacagtaaagaagatcattttcttagaatatttggtgtgaatacattctgaatactttctgaaagctttcatttaacatctttattgaatcaaccactgtttattaagtaaaagttagatgccca

SEQ ID NO: 476219 - DNA, 823 bp, Homo sapiens
tttatatcaataattacacatccatagacaccatctggaattgcaaaatgccagcatcgagttgctattttcagttagatattatgccttgtttggctattatgcattctctaggttatggtggcagagattatattactgactgtgtgctgaaacctggagatgtttccaaccttggatttcttaattcttttacaggattcaaacttaaagctgtatcaggttcagctctaacaacctgctcctggcccaagcctaggaatccaaaatacagtgcagtgacagaaaaaaggagtttacatggatgcatctgcctgttcacatactttttggtgttatatgtcgatggcaaagaaaagcatcagacctttctatacaacatccctgaagtgtttctgtgcaagcaattgagctatattaaggaagttgttattgaaaatctctatctttcctggaaaccactaagggcctcttagcttgcagtgggcattttgctaccagttggaggcatctgttagtctccaggtcattattattaagttaatcttcattaccctctttcaaatatcttatcagtaggggactattgaatgtttggaaagtggagacatgtagtcgcctgaacccatgctttagggttaataggctttaggcaatactgccaaatgtatctcagctctttcaaaataaatcgcataacctaaaatgctcaggagtaggagagatttttaagtaaatacagcacttaaaattattgggttactgtggaaccataaaaaaatgcaattgttgtaattatgtgaaaaaaaaacccttgcttgac

SEQ ID NO: 476220 - DNA, 762 bp, Homo sapiens
agaccatcacggatgccaagcttcaggtaactttcacagtggtaggccaatgaagttgtgttcccagccggattatggctgcctctgttgcatcatactgtcgctaggaaagtgtgggaaagctggcagtgacaagcctcaccctgctcccatgcagccagcaaaacctgtctcactcccaccatgcctccccagtagcaccaagtttacatccagacagctggtgagcagggctgagatcatgccccaggctacaagcctccctgctgagaaagcaagcagggctctcaggccctaccccttcctgcctgcctgcacttcctatttgcatgccgcccccctccccatcacctccaaccggccggcccgcaaacccccatgccaattctgccctggaaaatttgtgctgggtcgaaactattacaaagctcagatggaagctttcttttacctgtggtccttccactgataattccactgtcagtcctccccaaggatccctgtgagataaagtcagaaatggtttccctaggcatccctggggaccaggagtgcctacagggctcttcctgctgcttctacctttatattttgctcagctctctaaatttgtttcagtcctacatatggttaaatccttctcccatgatctgaattttcaggttccccagtgaggatatgtgttcagaagtgtgaaaactttccccccttttcacactttgagcacttacagtttttcagctgtcacacagagtttacagc

SEQ ID NO: 476221 - DNA, 579 bp, Homo sapiens
aagatattatgaaccgtatcacaggggggtgtacgcctaccacgatatggggagtaatatcaccctctctcccctgaaatattacgaatcatatacaaggggtttacgcccctcactatatggagagcaatatcaccctctcccacccggaatattacaaaccatatcacaggggatgtacactccatgcgatatgaggaccttctggatattacaaactgtatcacagggggtgtacactcccctcgatgtggggggtaatatcacccacttctcccttcctagctattatgaaccatatcccagggaggtgtacacgccccaggatattgaaaataatatcaccctcttctcccccctgggtgaattacgaactatatcacaggggtttttattcctcctagatataaaaagtaatatcaccttcctctcccatcctggatattacaaatcataccacaagggattgtacaactcccgtgatattgagagcaatatcaccctcctcttgccccctggatattataatccgtatcacaggaggtgtacaccccccatgatataaggagtcatatcaca

SEQ ID NO: 476222 - DNA, 605 bp, Homo sapiens
ttctaacaagcttcagtgtgtgttgttccccgccaagtgtccatgtgttctcatcgttcaactcccacctataacaaatggagtctctctctctctctgtgtcaagctgcctggaactggggatgtggtgatgctggcactcctgcgaccaccaccactaagactgtgctggatctttttagaagccagcacagcactgggtcttgctcaaagtctgctgtaactgctacttgcccatcacctatgttcactcatggccctagggttctacaattagcaggtggtaaaaccagccaggtttgtctccttcccttcagggcagcaagctcccctaggccttgggcagaggagcctctccttgtgggcaccaccaccaccagcccacagggcgtttctgccaggcaatggtctcccctgtggcccggggcaggtccagaaatgttgtccaagagcctaggcctcaatgtggggacctcaagagcctactttttgctctactccactgtagctgagctggtacctaaggtgtaagacaaagtcccctttacttttccctctgctttctcaaaagcgtacaccctcctgtgatatggtttttaatatcc

SEQ ID NO: 476223 - DNA, 450 bp, Homo sapiens
gcttttgcaacattttaacactatgaaaatcatgtcattctttgagctacactatgaagccatcatcattcatactgtgtcagaactcaaggacaaagtccttcccactcttctcttctttttgcacaagcaggggagtctctcctcatggccaccaccaccacaggcccatggggagtacttcgaggatactgtcgatgttcactcaaggcccaagggttcttctgccaggttgtggtgcacactgcccttcccgggactcatgcttcatggcaatgggtttccctctgacccagggctgatccagaaatgctgttcaagagccaaggcatggaatcgcccacttggtgctctactccactgtggccaagctgacatctatggtgcaagacaaagcaccatactcttccctctgcttttctcaagcagaaggagtctcttcccatagct

SEQ ID NO: 476224 - DNA, 3771 bp, Homo sapiens
gctaagctctggaatacaacaccatcccttctctacttattcggtatcacgagaacggcacaggaaaaaccttcccccgtaattcatttacctcccaccaggtcccacccatgacacatagggattattacaatttaaggcccacagcatgctatgtgggtattgctgttggttattcagggcccaaggctcttcagtcagcaggtgaacaattctgccaggactgggtccttctcttcaatgcagctggttccattctggtccaggatgtatctagaaatgccatctgggagatagggcctgcaatgtgggccttgactctgcccggtgcccttttctcagccactcagtcacctcatctgaaatctacagaaacacttagagcaaaatcagctctaaatattagatatacctctcttcttccaaatcttaaccttctcattcttcattgccttattgactttccatgccttcagtatatgaagacaaaatttccaccctgggttggctgtgacctggccatttaaccttagttgagtcacttattctttctctgggtctcgttgttaaaataaagtggtttctttttctaacaatgtaattaccactgtttaatgatttacctctaagttgttggaagttagttctatattctttttttcccacacaaagattttcaagcactggctctcagtgtactgacaaataaatactctgaaacattatatgtatttctagttactggctctatatagatttttatatctgaataacataatcttttacatcaactaagctgccaactgactaaactattggcagcttaaactatattttgaaaaaaaaacatgtactctgagaattattggatagaagaggaaaatagcctctatgttcatcagagtaaatgctgcctgtcctttcttaaaagattctgccacaactctcattacaaataaggctaatagagatgaatcatgatttacttgactataactcaaaatattcaaatggaaagattttaacaaaagtctaagctgctgtattatctggtaaattttaagtcaatagtattttaagggaaatatctgttgattagaataaattataacttggcttatttttccctttggttttgtcaagtgtaagatctgtgtgaaccgccatgaaataaggagtagacaagattagcagcagctgctattaaagggatgaatgagaatgtcagaagaatagctcaatgaattaccagggggagaatgggcaagttctgttcatagatggtaacatgaatagggacattcagaaagaaaacagagcattaatacggctataaggacaattacaataggatgtaaagcaataatagttaaaggattaatagaaatggcatccactagggttaaatttgaacaaaagcagaagttaggtggaaaacaggcagtttcatcagaacagggacacaatgggtgttctgatgccacacctaaccaaaaaattcttcaccttggctttggttttttcctgtgcacctgtgaattttcatccagtaacatcaatatttggtgagacttttaggtataatatgtaacatttatttgttatgtttattatttgtattttatatgcatcagtattatgcataattttatgtaagaatcctagcaagagattaggtcttccataaagcaagtactgcaaggaatcctgagaaaaaatattctggggcatgtgacactcagactaatggcctaaaactcatgtcaccgaagcccaaggtttatcagagcttctctggcatcaaaaggacctcctatcctgcttcaccaatagcaaatgcctttttattattttacattttggagttacatgagttctgctttttaaaatatttgatcattacaaaatgtatccatgcattgaaacatcacatcatatcctataaatatttacaattattaaattgccaattaaattaaaacaaaactttaaaaaataaaaataaaatcaaacataaaaatatttgtaaacaatgactccagagaccatatggtaccaaataaactataattctttcaaaaagttacaaactcttttgaaatattaccttttcaaatatactgcctgcttattactaaggtgttaatatcagagaatatacagaacacaatattttagttttgatactgcaagaatcagaggaaagaaatacaaatttttgtgataaaaaagagaaaaaaaagaagaaaaaaagaaattacaataaagttagaaaaacaagtcagaaatcctctccaagaaagaaatgtttaaacatgtgaacacatttgttcaaaatgcaaaacatgtacatcaaaagttgttctcttacatttcaataaaataggagaattacaagggcttcctattgtcttaaaggtaatttttcattatgggagaataactgtcagcagtattcttatgatgaatttcaatgtatatataaacaataagttcatctaatatgcattaccttgcagatcattcatacagagttaactgactttaagcttttaataatgtcatctggcaaactcagtccaagttatcatttagtggcataatatagctatattttcaagaactttattttgaaggtgaaataaagcaccaagcacaggaaatgcttatttgccaagaacagacataagtcattttatgtccaccacaagcacaccttactatattactcacaagtttcacattcagccaaagtcaagccgttcattcccacatcacctttggaaactttgtagcaaggcttggtataaatttacctttaaattatgaacaggtaatttatcattcctcttaggaaaaagaaaatggtttttggaggtttgattatatgctttgacacatttttaccctttactgagacctcagcaagcacagtaccattcgtgaagaaatatatgttcttgtaatttgtgtagcacagccctcatcaccaggccttaaattatcttacctaacatccatttccagttactaaaaaggaagcataaaaattgaagacaatttatagtacaaagaataaaaaagaaaagaagaaggagacagatggagagaaagaaggaaaagaaggagtcagaaaatagaacctaaactgatcaatgaggtgattaaaattgcctaggtattgtgggcttaattatgcccccctcccaaattcaaatgttgacatcccaactctcagaacctcagaatataacttcatttggagataagatctttaaagaggcaatgaagttaaaatgcagttattagggtggaccctaacccaatatgaccatgttcttgtaagaaggagattagggcacagacacgtggagaaaagaccatgtgaaacagggagaagacaggcatctttgtggcaagaaaggcctcaggagaaaccaaacctgcagacaccttgatctcagacttctagactccagaattgtgagaaaataaatttgttgtgtttaaaccacgcccagtctgtggcactgttacggcaggtcttaccaaactaatagactgggcaatggaaagaaaattgagtaaaaatttaatgtgtgtttaattatgagaaagcttattaaatgaagagtttttattaaatttattggcaatacataattagatgaaatgggaagagcaaataattgagctttccagttatttgctaagtcagttgtttgcgaagtataataaattagactaatatactcatcagaatttttcact

SEQ ID NO: 476225 - DNA, 5515 bp, Homo sapiens
tccacttccttcagaggacctgtgggtcctcttggaattgccggtttgttcttgaaaaaaaaaaaaaaagccatgaagccattgtgtccagagttggttccttctggtgggttcatggtctcgctgacttcaagaatggagctgcagaccttcatggtgagtgttacagctcttaaagatggcatggacctgaagatgtggaaggggacccaaccaggttgccgctgctggctggggtggccagcttttattcccttatttgtccctgcccatgtcctgctgattggtccattttacagagcactgattggtccattttacagtgtgctgattcgtccattttaccaacctctagctagccacagagcactgattggtgcatttttacagagtgctgattggtgcattttacaatcctcttgtaagacagaaaagttctccaagtccccacctgacccagaagtccagctggcttcacctctcaatcccccctctaaacaaacaggacaccccaactgctgttgggaattgggcaatgatcactcaagctacatcctgctggataggggtgaagaaggggccctgcagtggtagtgtcttccagaagggaattctctaggccagccaaaggaagcagaagggaaaaagataggacagaataagtttgcagtttgcatttcaagaactagaggcaacaaaatatcattaaaaataaacaagtaataagagttttagcaaattgataaataaatcaaggaataagagtattagcatatttaagagaaaaagtatatttaaggaaatgcatactgttgattaaaattgaatcatgaagaagaggagtggagaggtagagaacaatagaaaactttctaactataataagaaacacgagaacacatggacacatggaggggaataacacacactgggggctgttttggggtggagggctgggggaggaagagcatcaggaagaatagctaatggatgctgggcttaatacctgggtgatgggttgatctgtgcagcaaaccaccatggcacacatttacccatgtaacaaacctgcacatcttgtacatgtaccctggaacttaaaataaaagttgaagaaaaacaaaatcacaaaaacgaacaataaataaaaaccaaccatgaagaaaaaaaaaactttacaagccatctaaaaagaaaacatcacatatgacaaaattaaaacccatatatgtcatagcattaaatataaatgagtttgacctattaaagaaagaaatgttctgcttagattataatgcaaacaccaactttggatatttacaagagacacatgcaaaataaaatgattttctaagtctgaaaataaaagaagtgtcaactgtaaactaaaaaataatatcaatatcacaagctcaacataaaattacatggatttcgacctcaaattattaaaggagaccaaaagggcactttgtaacgctaaaagttgcaactcataatgaatatattacagttataaatatacaattatgtattgaataagcaaaaattatatgtcagaaatgataggagagacagtagcagtaagattttaatttactcttcattatattacatatgaaattagagaaaaataaacatagaatatgaataatgtaattactaagattactctgatgtatataagttttggtggcagaaaatagggaatacatcattttttttttcaaatacccatagaacagtaacattcaatgaccactgagaaggtgagaagactatagaatatgatcaataagatatctaaaagaaatttattttttactcttcatggaaaaagagttcagtaccaaattatgtttgcatgttggtcagtttgttcgtatggtgggttcattgcttcttcacttctatcagccttcatagaattaaagagataggaccttgctctaaattaggctttggcttaagggaatgtggtcactggtttgatcgtctacccaaactactcaaactttctccaaatcagcaataaggctgttttgttttatcatttgtgtattcactggagtgtagcaaaagtacaaaagtgtgtagcacttttaatttcctttaagaaatttccccttgaatttataacttgactaactttttgacacagggcctagatttcaacctttctcggttttcaacatgtcttcctcactaagcttaatcatttctagcctttgattttaagtgagagacatgcaactcttcatttcgcttgagcacttagaagtcattgtaagatttttgggtggcctaattttaacattgtgtctcagggaatagaaaggctccaagaagaaggagagagataggaaaatgactggacagtcgagcagtcagagcacacacaatatttcttaagtttgccatcttacatgtgcgtagttgtagcacctcaaaacaattgcaatagtaacatcaaaaatcactgatcacagatcactataacagatataataatgaaaaggttttaaatattataagaattactaaaatgtaacacagagacaaagtaaaaacatgcttttggaaaaatgggaccaatagatttggttgatgcagagttgccacaaactttcaatttgtaaagaattttatatctgctaagtgcaataaagtgaagcacaataaaacaaggtatgcatgtaaatattttgcatattgacccatgaggttattactcaggtgaatataaatataaataagtataaaatttatataactttacacatgatttatatacgttattgtatgtctgttgtccttcaataaaacatttttttaattttttttattatactttaagttttagggtataatgtaacaacgtgcagctccatcttctgtaaaaatgaataataataaccttccctacttcagagggctgtacattgtctgacacacccttgtcaagtggtcaataagtgttacctagcattattattactattttagcaaaaatttataatacagtgattgacagatatttgagatacacattccatagacatggactatgtgagactaaggtgagactatactactgccccccaaatatcatattctaggaatgctggtgacactttatgaagctcatcttcctccagatgaagaaaaggtttctatttgaccaatggtgataggcttcccctcaccaccagcatcagcatacaatattgaattttccaaaggttttctcacataggagttactcttggccttgtgaaaatcaagaaaaagcattggtaaaaccagataatttgtccaaagcttcaagtccagatataccttactgaaaatctggagcttttgacccttatgtagttgagaaacctgcactggggtccacactggccacactgttatcattttgacctggaatttgatttaactctggcttaaaattgattccagtatcactagatcttagctatttatgctttctgataaagcgttaagactgtccaccttttatataaataattgtatagctattacttttccccaaaaggttttattgtcaccaagtgttttttacccctgaaattattcaatttgttaaggagactgcctctacgaacaaagaatcatggcagtaaacaccttgtgcttgcatagacgttagtaacttctatgctaaaagtgtgattatccaaggccattatttaatagcatgtatttttctttgttatctcttctaagaaaactttgaataaaataaaatatcaggaaaccagtaagtgattcaacaaatgggagagaaccgatttctagtgggtgttctagagttcatttagattaagaatctcatttctaagaaactgatactaaaaatgataattctggtgtatgacagaatcttgatttatcaaataagatgcttacactcagaaattaccaaggcaggtatatatattaaaacttctagaagtattttcagctctgtacattgaaacaaaattttttttctggttaattatatgataatcagtaaatattatcaactaaaaatttcctgtccttaggagcactaaggtttacatttttttgtaaatcatttagaacaggcatgacaaatatgtggcatgcctgcaagtactctcctgtcttccatccacttcaggcatcactaatcaatcaacttcctgctgagcctagatgtagtctcagaaaacaatttttcagaaagtaccagagagcttcagccattgatgaaaacttacttgctattcctagtctggattgtcataattcaatattaagagtttatgtaacatccagtcagcttctgatcattaaagtatttctctgaacatattaaagaaggaaaaattatattactaatcaggggatctctaagcattttagtttttaaaaaataaagtatgtcaatacttaacagtatttaatgcacacaaaagttatttttaaaatataataattacatatcagaatatataaaagaaaaaactctaaaaatagcacagaaagaaaaacttgtcaataatgctagtaaaaaatagagctaaaatatgttataagaagtgagagtcaaaaacttagggcatctttgtgtaaaatacattatgttaacaaaataagcattttacatttagaaatgtactttttctatatgtaaacattattttcttattaaacatatgaatatttctttttatcatataatggcaaagaaaaatgtaactttattttttaatttataagttatcaattctcaataaactaattttttaaaatattttttacccatacaaaaaacgaattgcaattagaagctatatcattattttaatattctctattatattaagaggcttaaataacttccctaactttaataatcattttacttaaatgtcatcagaattttttgaatgaattgtcctgggtttttgaaatttatagataatctccattaggtagctattacatggaatcctccctcaattaagagtcagaagatctgggttctaaaccaagctctaccataaattacttatatgaacaaggagaggctagtcctctgtaaaatgtatgggttgggctagaaaatctctaagaccctttcaagttctaaaatgccattttattatacttaatttatctatacattttcagtattttaactatcaaggaaaactgacattttattctgtagtgtctgtatggacctagttgttttgggtttttaaaaataagacgtatttttatgtggtgatgtgtaaacaaaaaaatttaattgaaatgatttaatgcttctttaatttgtttaattattgaggatcatagcatagtattgttggactaaaagtcaatggtacacttcaggaacagcatgtgtgagtctgctgaaatcgttagcaaaattatttgcatgtttgttcacatagtgttcattaagtaattaacagggcccatgacccagaaaaagtataaatgctat

SEQ ID NO: 476226 - DNA, 550 bp, Homo sapiens
gggaggcctcaggaaacttataatcatggcagaaggtgaaggggaagcaagaaaaatagtaaatcaaaaacaatatcacatccctggagggattggagcgattactgccaccatcaaggacttaaaagatgcaggggtggtgattctcactacatccccattcaactctcccatttgctctgtgcaaaagacagatagatctcgaagaataacagtggattattgtcagcttaaccgagtggtgactccaattgcagttgctgtcccagatgtggttttattgcttgagcaaattaacacatcccctagtacctggtatgcagccattgacttagcaaatgcctttttctccgttcctgtccataaggcccaccagaagcaatttgccttcagctggtaaggccagcaatatacctttattgtcctacctcaggggtatatcaactttctggctttgtgtcataatcttattcggggagatcttgattacttttcatttctgtaagatatcacactggtccattacattgattacgttatgctgattgga

SEQ ID NO: 476227 - DNA, 727 bp, Homo sapiens
aatttaggtttgactaacgtttcctcatgaatagactcagattatgcattcccttttgaaatatagcaaaagggagggtggggtgggaatggtggaggcaaagcctctccccatccccacctcagttttaggtagggcttttaatttaacccaaggacatctctcaacttggagaataattcagtcctcaacagtgcctcaaatctgctatggttttgcagcgcagcagcaagaatgtaaacgcacataccaggagaaaggggaagaggaaacagaggtgtcggaagcaaagctgagtgacagaacacattcagttggggcagatgtctggctgcgcttcgggaaggtgcgccagtctcctggggagatggtttccacgtgcactcccatggcggcggccgacgccgagcgggcgggcagcgcgacgggcggcgtggaccgacagcgacctggcggcgggagggtatacagtgtggagatggtggacaatgggataattcacgtctcagtcaggtgagatattctattttgtcttaagttacagagatctgaatattcctacatttattttctgagcatataaggactctgccattcatgtgtccacctgtagatgcacaaggatttctgtgttgactccaggaaggtttaagaacatcttgtcaacttgttattttgcttttcaaatcgaatctgaaaatatacttttcattatttgatttcctta

SEQ ID NO: 476228 - DNA, 564 bp, Homo sapiens
ggcctggactgacagacctgcaagcaagcatcgggaaaatggtatgaagtcctctttggggtggggactcttagttttcttgtcagagaagctgcatgttttctgcagaacaccattggctagatatgtgatagcattaaatgttcacctaaatttaacctctgccgttctttcctgtcttcttactcctgctggaggcacgcgcaggaaactcagtgctgctcacccccagcaagttccacagcacctcccctggagaattaccaccaggagacagcccatgacccacccaactttccagcttctaggtgtcccagtgggcaaattcttagcaagttcagcagcaccttcaagtgtggctttctattttccttctaacagtcaggaccctcagctgcaggtctgttggagtttcctggaggtccactccagaccctgttttcctgggtatcaccagtggaggctgcagaacagcaaatattgtagaacggcagatgttgctgcctgatccttggtctggaagcttcgtttcagaggggcacctggctgtatgaggtgtcagtc

SEQ ID NO: 476229 - DNA, 545 bp, Homo sapiens
acgcatttggacttctgagagacctgactgtatttacaaaggccatggataaagacaagtgtagacacatggctgtgggagggaagcagaatacaagatgtgaacactggattattggctgtgcttataatgttaaacgtgagaacttcagtggaggaagtaattgcagatgtggtgaaaaagcaagagaactagaattagaattggagcctgaagatgtgactgaattgctgcaatctcatgatagaactttaatgaatgtgaagttgcttcttatgaatgagcaaagatgttggtcccttgagatggaatctactcctggtgaagttgatgatgtcagcacaacagctctttctgttactcactcactcactcacttctctgcatcatccatcgttgctacctatagcttcttcctcaaggtccttccctttgtttctaacattgtgctcttctgactcttctattttgaataacctcttccatcttttgttctttttgtaattgctctactactcattctgctcccttctgactctaggcaa

SEQ ID NO: 476230 - DNA, 1986 bp, Homo sapiens
aaacgtaaaacagaagaggccattatgatatgtgtttttggcaagaaaggagtaacttcacacatggatatccgctggccagaacgctccggtgaaggggagctggccaaagcactgcgtcggggtggcagcagcaggatctgtgctcagttgcacatgcctgcaccgtggcagagtactggcgagactggggatgcgagcagtcgtcaagggaacatacaaccagccatcacgagatactggagattttccaagaactgtgattttctttccgactacgctatccaattcacgtgcaatgggactcgcagcatattctctagatttcatggtctcctggtagcgcctctaaatgtggctgtgagagtggatttatttgggaacatctgtgatctacaattgtgggactctctgcatgctgggggtgggagatctgtgggtactgaagatgttcaagaagctgcattactacaatacgagatttcatttgtttccatggtctggtgaggtctcataaaaatcagagagaatcagagagagtgaatgattggagactcaggggaaacggtaatgtgaagatagcaacaaaacctggaatgatgcaaccacaagccaaggaacaccaaggaatgccctcagttggcagacgctggaagaggcagtaatggattttccctcaggacttctggagagagtgcagcctgcctacataacatcttgatttcagacttctggtttccagagctcattttcttaagccaggtactggattcaacgccacacatgatctatctcaaggcagtagtgctagactggggggagtttgcttcctggggtacatttgacaatgcctagatacatgtttctttatcacaacagggaatgaggatgctactgacatctagtaggcagaggtcagggatgctggcaaacttcctacaatgcacaggactgcctggaataataaagaaggatacagccctaaattgtcaacaatgcacatcttgagaaaaatgttccaaagtaaaagctgagtgattgttcatcagctaaataaatggtaagtcttgttataagtaggaggaacaatgggacatggtttttctacaatggatgaattgaaaagattatcatatgttgtaacatttttctatttgtagggaatacattcactacattcacatggtccaagattcaaaagatactcaagaagttgtagtccaagtctccctcccaccccatccctgtttcacccaagttccctccctggaggaaactgttagtaatctcttatttagttacctaaaagttctctaggcctctgtaagaaattatatacatgcacagaaacatactatacatattctttgcattgtgcttttgttacaattcattttggagattgttttctatcatgatacaaagcgtttccccattatttctttttaagatagcaaagtatttcattgtaggttgtatgcaagttttctattttatgtaaccattcccctctctatggatatttagattatttcctttttttctgttacagacactgatcaatgaatatctttatctgtgagtttaagtcctacaaacagaattgccaaataagcacatttgtgcttgtaatttttatcagatgttgtccaaattaccctccattctccattaaattgaatatgtttccattcacactggcaatacatatataaaggagtttggataactttataattttaaaagtttttctcattcttttcatcaaaacctgagaataaataagaggtggacacacaatataatattttctgtctaaaatgttctcagcactcaggtatccagaatctattcatgggagatattttttttctaatctgtttttagtgcgctaaaatatataacataaactttaccattttcacaattattgtgtacaattcattggcattaagtacttttataatgttatgcaaatatcattat

SEQ ID NO: 476231 - DNA, 1021 bp, Homo sapiens
tccaacaacaggattgagggtgcctggggcaagcgccagctcatgtcatcaccctcactgagccccgggcctgaagctcataaaggattacagaatattgttaaacatttgaaagctcaaggcttagtaaggaaatgcagcagtccctgcaacaccccaattctaggagtacaaaaaccaaacggtcattggagagtagtgcaagatcttagactcattaatgaggcagtaattcctctatatccagttgtacccaacccctatatcctgctctctcaaataccagaggaagcagaatggttcatagttctggacctcaaggatgccttcttctatattcccctgcactctgagtcccagttcctctttgcttttgaggatcccacagaccacatgtcccaacttacgtggatggtcttgccccaagggtttagggatagccctcatctgtttggtcaggcactggcccaagatctaggccacttctcaattccaggcactctggtccttcaatatgtggatgatttacttctggctaccagttcagaagcctcgtgccagcaggctactctagatcttttgaactttctagctaatcaagggtacaaggtgtctaggtcaaaggcccagctttgcctacagcatgtcaaatatctaggcctaatcttagccagagggaccagggccctcagcaaggaacgaatacagcctatactggcttatcctcaccctaagacattaaaacagttgagggggttccttggaattactggcttttgtggactatggatccccagatacagcgagatagccaggcccctctatacactaatcaaggaaacacagagggcaaatactcatctagtagaatgggaaccagaggcagaaacagccttcaaaaccttaaggcaggccctagtacaagctccaggtttaagccttcccacaggacacaacttctctttatatgtcacagagagagccgggatagctctttgagtccttactcagacttgtggga

SEQ ID NO: 476232 - DNA, 668 bp, Homo sapiens
aaacttattggtcttgtgaccctgcaggcatgctagggagagggagatctggatggataccacggcatctactgcacactccatatgtccattatggacatatttctactccaattcacagcatgtagttgtacagcattttatttggtttttcaatagaagctttgttttaaaaaaatctgatgcagaaatccaatatcgagagcatgtacaagtaaaattgttccttagtaacatgggagcagaagccctattcacagttgttctcctcctgctaaacgaagttctttcagaaaacatgcctgtaccagtcaagaattttactggctgcatagaagttatagaaataaataactggagatctttcattccatccaaggcagtgaaaaactatcacattaacaattgcagggtacatgtgcacaatgtgcaggttacaaccacagttgagtagttgtaacagaaatgcatgacccacaaagcctaaaatatttaccatttggctctttatggaaaaagtttgtcaatatcttgtgtaagaacgtagaacatagacctagttctcaccaatgaagtatgaagagaaataaattattgccacttacgactcgaacatatgatacatgattctttggactttgtcatctattctttctcccctcaccttc

SEQ ID NO: 476233 - DNA, 553 bp, Homo sapiens
acacggaattatgggagtacaattcaagatgagattcgggtggggactcacagacaaaccatatcaaccagtattatcagcagtaaccttattggaaatttggtttagcagaaaaaagaaaataatggcataccagatcaatctcttttgtttttctgtcactttgctggcccagaccaggaaaagttgttccagaccttatgtaaattctgcgctcctgacaaatttatcttcgtgtagttcactgttaattgtaaaaccaacactattagcattaatgccctcttttggactcttggaccttccaccagtggtttgtcaggggctttcgggccttcagccacagacggaaggctgcactgtcggcttccctacttttgaggttttgggactcggactggcttccttgctcctcaccttgcagacggcctattgtaggacttcaccttgtgatagtatgaagtagaaataagagaattcgtgctttaactcgtagtgaatatattgctatgagcagacttaacataaagcaaggactcatataaaatcaatg

SEQ ID NO: 476234 - DNA, 484 bp, Homo sapiens
tcctaactcctatcacaaccagataacagtgggaactgttatgaaaaagactaagagatgaaatgctaaagagactaaaacaagatactgacagtaaggatttccatactttaaaaagtatgcagtatgctccatacctgggctttgggcaccttcactggattccttcctccataagaagaaaaaacattaaagagcagatgctgactcagcaagatggcagaataggaatagctcaggtctgcagctcccagagagacgaacgcagaaggcaggtgatttctgcatttccaactgaggtacccagttcatctccctggtactgtgtgaacaaagccgccaggaagttcagactggtggaggggggggccaccacagtgcctcaaagctgccgtagacagaccgcctctctagatacctcctctctgggcagggcatctctgaaagaaaggcagcagccccactcaggggcttatagataaaa

SEQ ID NO: 476235 - DNA, 802 bp, Homo sapiens
tccaacattaccactttggaggtcccttcgtggtcgccaaaatgttaccgggtggtccttgctcacagaggtcccaagatggcggtgacccgcttccaagatggtggcaagccttgtgttctctgacctggggctcttggcctcacggattccgaggaatggaatcttgggccatgcgtaagatattctgtatcacaaaatgtgagtgtacatctggatggactggacagaactgtagtgaagaaataaatgaatgcgactctgatccatgcatgaatggaggtctttgtcatgaatctaccatccctggacaatttgtatgtctgtgcccacccctttatactggacaattttgccaccaacgctataacctttgtgacctacttcataacccttgcagaaacaactcaacatgcttagctttggtagacgcaaatcagcattgtatttgtagagaagaatttgaaggtaaaaactgtgaaattgatgtgaaagactgcctcttcctttcctgccaggattatggtgactgtgaagatatggtcaacaatttcaggtgtatttgcagacctgggttttctggatctctgtgtgaaattgaaattaatgaatgttcctctgaaccttgcaaaaataatggaacatgtgtggatctgacaaacagcagagatttgtagttccccttgaagaggttcatcaatcacttgagccgttgtaaggcaggcttggtggtgacaaaatcccccagcattttcttggctgtaatggattttatttctccttcacttgtgaatctcagttt

SEQ ID NO: 476236 - DNA, 564 bp, Homo sapiens
aaatatgacttgtaataagtccactgaatggcagttcagcagtatgtgcctgaaatttttcaaccgtatgtatgcattccagggtgcacaaaaaatccatgttggtttttgaagaatgtttacctaattcatcaacacctctgctactgtggagtcaccttccatggtatttgccaagataaaggtcctgctcaatttgaatatgtgtggcaattgggatttgcaggatctgaaggcgaaaagtgccaaggggttattgatgcctatttctttctggctgcaaactgcactgaagatgcaacctatgtgaacgatcctgaagataataattcttcatgttggttcccacatgaaggcacaaaagagatctgtcaaataaataatcttgttcatgtcaaaatttccccagggtggtcactgcaatttcacattgtcctttgagaaattatgccaattagagagatatgtatatggcttacaatatgaggggaggaatgtgtggtgtccaggtataaaagactgagaagaacccgtgaaaacttatgtcagcaagcatttgtacaa

SEQ ID NO: 476237 - DNA, 550 bp, Homo sapiens
ccagatataaatggatatgtgcatcatgatactatgttatgttcagcacataatacctcagtttggtcttcccacctctatacagtccagtaacagaccggcctttattaatcaaatcacccaagcagtttctcaggctcttggtattcagtggaactttcatgcaccttactgtcctcaatcttcaggaaacgtagaatggactaatggtcttttaaaaacacgcctcatcaagctcagcctccaacttaaaaaggagaactctgacaaggatagagcccaaaaacttacgctgaacccccttggccactctctaagtccaccaagcagaggtactgagctctgggctggtactggagagtcctctgatgtgattcatcttcaggtctttcagctgtggataccagtaacctgctctggtggagatagtaggggaaaccagtatgggtggacaaattagaacttgccagagatctcagaaaccaggcatggctgacttgcagaatgggaccattaaggagaactagtggagacatctgtgtcagggtat

SEQ ID NO: 476238 - DNA, 2223 bp, Homo sapiens
ttcagacggtcctctttcgacaacagctagtttgcaacctgttgcatggcggcagtgctcgcagggacaacagaagcaattttcactccaccggaaatagttcagacgttgattcaagaccacaagcatcatgacagatttaccaacacttatcaggccttcaaggcactgaaatgtcatggaattggagagtattatcgaggcttggtgcccattcttttccagaatggactcaaatggctaaaatccaaaacactgacaacaccaaatgctagtgaggatgtggagcaacaggaactctcttatattgttggtggaaatgcagaatgtataggcagtgaaactgttttacatgatactaatgtggagcatatatgtcattatacatttgtcaagacccaaagaatgtacaacacaaagaaggatccatcaggtaaactatggacttttgggtgataatgatgtgtcagggttggttaattttttgtaacaaatatccgtactggtgcaagacgtcaaatgggaaagctgtctctgtgggttgtggagcagggaagataggaagggagatgtggaaactctgtactaactttctgttcacttttgatctgaacttaaaactactctaaatgtaaactcaattaaaaaaaataagtatgtttataatttttgtttttattttacatcaaactgctgcattctatctagtgtttcaaacttgcattagatcaacacagaataataactttggtcttcatggacctctttgagtccatggccaggcaatccataaagaaaaattctgtgtgaaaagtgtatttttagatcttcaagaagatgaaaataagaaatgcacagctagaattatttaaattatagagctaaagctttggtttgtatacttacctgaatgagaaagcagtaaatcattttcatatttatctcttatacatctctataattctaagaagagtcaaactaaaatgtatattgaggtcatctaaaattgaattgttatacaaaaggaatatcttagcaccttatttgtaattattttactgttactgatattttgtgattttgcttattttatgcttatttctctggaaataaattattttctttttagcctgacttggttttgtttctacattattaacatttctttggacttttgaagactatgaattattatgaggttaataattttttttaaaaaatgataaatgaagaaatctcattgaggtattatttgtatttttgttatgttatgtcttgttattaaatgtcagatagagcatatacattgatccatagtgttattaatacaaaagcttggatcatcaagagatacatatgaattaataacaccgacaaagagtcaattcagaaaataattaaacacattgtctcctgtcctgtcttttgtgactgaagtgtttattattattttttttcttagttttcagtgatagcttttcagtcaagttcatcccttccttgaaatcaacagttctcatctgattttaagactttatattgacttcacattattatatgtcagtgaagtacctggggaatgtaacactcttccaatgatagtgtcctgtcaatttcttttcacattcttttctttccagggtataatattaggtatagactttattaaagaaaggattttataggtctcaaaatcctagtaaagtcatattttctgtgaatatggtatttcaaacactagtgtcagaacttttattattttcttcttcctcattatctgttcactttctctagtattttgttatcttcattcctttaaaacaaaatggtataacctagaagatacgaaaagctatgattccatgagtggggttcaaaggatgagctaatgtctaaaattgtacatgttattgtgtgtgaatatccggttatgaacagcattttttttggagaaggagcctataacttttattagttttcaaggagtacatggtcaaagacaatttttaaaactctatacatttaaaattatttcagaaatatttaaataatttacctcaaaatttaataatttaatagggtattattttaccatactgtctaaaatgtaatggaaattgaacttctaattttctcccattttacggggtttctttctttctttaagttttggagtacttaaaaatacctcaagccaaataaattaccactagtcatgtatac

SEQ ID NO: 476239 - DNA, 1650 bp, Homo sapiens
aggggcacacggattggtgtaatggacattgaagactcagaagagggtatgagagtgttcagctaaagacagggtccttgtcacacggccacgagaaattaggcttgcagacaatttgaaggaatcggtagacattgcgaaccaggttatgaagtgcaaggctgcagttgcttgggaggctggaaagcctctctccatagaggagatagaggtggcacccccaaaggctcatgaagttcgaatcaagatcattgccactgcggtttgccacaccgacgcctataccctgaggggagctgatcctgagggttgttttccagtgatcttgggacatgaaggtgccggaattgaggaaagtgttggcgagggagttactaagctgaaggcgggtgacactgtcatcccactttacatcccacagtgtggagaatgcaaattttgtctatatcctaaaactaacctttgccagaagataagagtcactcaagggaaaggattaatgccagatggtaccagcagatttacttgcaaaggaaagacaattttgcgttacatgggaaccagcacattttctgaatacacagttgtagctgatatctctgttgctaaaatagatcctttagcacctttggataaactctgccttctaggttgtggcatttcagctggtgatggtgctgctgtgaacactgccaaggtggaacctggctctgtttgtgccgtctttggtctgggaggagttggattggcagttatcaagggctgtaaagtggctggtgcatcccggatcattggtgtggacatcaataaagataaatttgcaagggccaaagagtttggagccactgaatgtattaaccctcagggttttagtaaacccatccaggaagggctcattgagacgactgatggaggagtggactattcctttgaatgtattggtaatgtgaaggtcatgagagcagcacttgaggcttatcacaagggctggggagtcagcgtggtggttggagtagctgcttcaggtgaagaaattgccactcgtccattccagctggtaacagtactgtgtagcagtattcaattacgcgaactatcttaattcatctgttctccagttgaaggcatgaagttgttgccagtttctgtattacaacactgtagtggaacattcttctgcattgggctcactacattagttacttaagatgtgtatcacagaataaacacatttagccttatagacattgccaaatttatcttcaaagtaaatgtgagtttttgtgaattacaattatttcaaaatatcatatctaataattgaaaagaagatttggaacctataaggagtagaatatagcattctgaaagaaaatatcaaatatttattttccttgaaagcttgataatgtctttgtgtttacaaactaaggtaagtttggggagaacagttgactgaggattatatcttactcatttcataatatcaagtacggtgaaaatttgaaatgaacgtgtatatcatttataacattgcagcctttaatgttttaaattagtgtcaaaattacagacaatgaacatgcatattgtctcttctaacaggttatctcttgaaaaggctttctaaagcttaaaatactttggact

SEQ ID NO: 476240 - DNA, 583 bp, Homo sapiens
tgcctctacgtaataaataagatcatggaagttcacatgattaagaaatatggtcttactaatgttgactatgctgtagatattttgaattctctgaatggtcacatatctcttgtttctctgggattggcacctggtatcttatttagttcaattgctgcctggaaccaggggtggggtgacacaagcgtccttgtggctgctaccactgggactgcactgagtcagacccaaagccagcacagtactgtgtgtgcctcacccaaggcctgctgtaaccactacctggctactgctgaaggccccatagctatacaatcagcatgtggtaaagcaagccaacctatttcctttctttcagatgaagtcacttcccaattatcagatcatgcaagttgtctcccaggagagcagtatacctgggcagaaagtaataccaagattttggactttgaacatgatgccatgcttacataagactttcagagttcttagggtcggtgagtatattttgcatgtagcattgatatgattaattgcagcaaactaagagctatcatgtattggttgtaccaatggctgt

SEQ ID NO: 476241 - DNA, 1362 bp, Homo sapiens
ctggcacatcccattacaccatctgaaaacaaaatgacacagtgctcaggaaggagaaaacatttatgtgacctcaactactgccattgcctgcattaccctagccaacaaggaggtgttgaagctggtgctggtacctgccactgggagactagagtacaggtgacatcaccggatcccttgcagacattccctaggaccatcataagtatggcagccccactgggtgaacagacccagagaagcagcaggattacagagcttggagtggataaacctgtagacagccctcctcgaacacttcagggtgacagcctccccacaggaggaatgccctccaggttcaggcttgcagaagaggtagcctcacaacccctcacaacatggaacaccagcattcctgcagctgaaaagaggtgcctgtctgatctgaatagctaaaacactgaaaaactttgcaaatagactttatgaacctaaaaatccataatgtattttgaattctgtagagaaaagcactgggtccatagtagaaatacaagtgttttattttttcaatatttctcaaaatatcccctgggttagtcaatcaaagatttggagtatagtgattggtaaagaaaaaattgagttacttaacaaaatgctgtgccctctccatgatatttattacctctctgatagaatttatttttcttcatttatattcacacagaatagtatacagttttattcagcttatgcattatattattgcatgtccttaagacatgatgatactgtaaatgagtattgctatctggttaaaaactaaattgaaacttatttttatttcctatgtagaaaataatgaaatgtcctcctttctcaaattcccgttgtggtcattatgcttttgaacagtcaataaatgacgtatatactattctgttgactatcatcgtcttcttatgtttcttaaaagactctcaacacagttatattgaaaatgtattcttcgtaagaacaaatttatttttatcaaataaatacaattttaataaatgtattctttaccatttattcaaggccttattagcattcctgtaaataacaacttttctatcttttcataaacatgcattatataaataaataaatgtattctgaataaaaattaatcagaatcctttgtagggttaggaaagcatcgttgcaagtgttaagtttgtttaccatattttctggaaggattcttgttaaactattattttgtattaataaatataatatgaataatcaactctaaaatatttctaatctcattaaaaactttttaaaattatgcttgtagcagagaagcggaggaaatgaggagatgtt

SEQ ID NO: 476242 - DNA, 847 bp, Homo sapiens
ccatgatgacgatggcggtttttgatttcgcgactcctatcgggtggcctgcatctcccgggctgactcccacgttagggcccctgaccgacactgccccgccgcgggacagctggatgttctgggcaattctgccgccaccgccaccaccgcttacgtcctcgcttcccgcagccgggtcaaagccttcctctgaacagagagcagtcactggatcaggcaatcacttgtgtgatttgaagccagaaggtccacctgaggcaaatgcagatcctcttggtgttttgataaacagtgattctgagtctgataaggaggcacaacattctgtgatacccaaggaagtgacaccagccctatgctcactaatgagtagctatggcagtctttcggggtcagagagtgagccagaagaaactcccatcaagactgaagcagacgttttggcagaaaaccaggttcttgatagcagtgcttctaagagtccaagtcaagatgttaaagcaactgttagaaatttttcagaagccaagagtgagaaccgaaagaaaagttttgaaaagacaaaccctaagaggaaaaaagattatcacaactatcaaacgttattcgaaccaagaacacaccatctatatctcttggaaatgcttctagctccggacattcgacatgaaagaaatgtgattttgcagtgtgttcggtacatcatcaaagaagacttttttggactggatactaattctgcgaaaactaaaagggactaaatttttaaaaaattagtctgttatagttgaagattaacttttcttaacattgtgattattgaagttcatgaatcttgctgtca

SEQ ID NO: 476243 - DNA, 583 bp, Homo sapiens
ggcactcaagtgctgagttaacaggaatgctgatgttccatgtagagagcgagtttgacgctacctcttatctgagcctgagcatggagggcactcctcttgaggtgatgcagcacaagtatcggctccaacggagatcagaaggcagttccctagcctttggagaaatgttccagggaggagcacagctgcccctgctgcacaaaataatccacacagagacgggggatggtagcaggcagcagccacacccctccacccctgcccatgaagctgaggtgtccaactcctgcacccatgtttataacacacttcttacttgccccttgattctgctcatcaaggttccttcccattcaatattcgactgcagatcttcattgggagcttatctcaacctgtgcccatcacctgagttagctggcagagttctgtgaggtcccctttttcaattcatataaacatataaatggacttttgccaccttatgtaaagaagagctaaaataaattttcaccaaaaataaagaaccatcaaaagggattgacagttgtccaagtttgagcctattccattctttatc

SEQ ID NO: 476244 - DNA, 654 bp, Homo sapiens
ctccaacagacctgcagctgagggacctgactgttagaaggaaaactaacaaacagaaaggaatagcatcaacatcgataaaaaggacatccacaccaaaacaccatctgtaggtcaccatcatcaaagaccaaaggtagataaaacaataaagatggggagaaagcagagcagaaaagctgaaaattctaaacaccagagcacccattctcctccaaaggattgcagctccttgccagaaatggaacaaagcaggaaggagaataactttgaggtgttgagagaagaagccttcagaaagtcagtaacaacaaacttctcagagctaaaggaggatgttcaaacccatcgcaaggaagctaaaaaccttgaaaaaagattagacaaatggctaactagaataaacagtgtagagaagaccttaaatgacctgatggagctgaaaaccatggcacgagaactacatgatgcatgcacaagcttcagaaatagagagagcaccacaaacatactcttcgagaagagcagccccaagacacataattatcagattcagcaaagttgaaatgaaggaaaaaatgctaagggcagccagagagaaaggttgggttacccacaaagggcagctcatcagactaacagctgatcactcag

SEQ ID NO: 476245 - DNA, 752 bp, Homo sapiens
ccagccagtgaaagcagctgcctaagggagtgggagcccaccttttgcatctcaaggcagtggagctgccaaaggcactcagcagttctctctccttctgccatgtgagaaggatgtgattgcttcccctttgcaccatgattgtaggtttcctgaggccttgcaagccatgcttaactgcgagtcaattaaatctctttccctttataaattacctagttctcgtatttcttcatagcagtgacctgttgaataactttgaccaaaatgctgatagtgataaggacattgaagtccaggctgaggtggtcttagatggagatgaggaacttgggaactggagcaaaggcgatgattgctgtgttttagcaaagagactgactccagaaggtagatccaccaacagcttgcatagtgtacctggaaaagccacagacactgaatgccagctggtgcagggagctgtaccttgcaaagccacagaggtgaaactgcccaaggccgtgggagctcacctcttgcatcagtgttacctggattgcccgtattctactgctgaagataaagaattaagagaattttttcagtgtcttccattggccaaatttatcaggaagccagtgatatggagctctgaagaagacagctttctccaaacccaagtagaacaaagataaaaggcaagggaggggccagagtacataagaacaaggattttagtaaaaattggaggacacagaaaaatagccagc

SEQ ID NO: 476246 - DNA, 839 bp, Homo sapiens
tgggccgaattaattgcagcgggaacgtggccttaagacacagatctctcaggcttttgtttgtggcttaagaatgcctttaagaggttttccgccctgggcgggccaggtgttccttgccctcattcccataaacccacaatcttccagcttgggctcaaagaacattatgccttctgacattgctgttgtctatattagcatgtttttcctgtgtgatgggacattatttctaggaaaaacatttttgccttcttcccaagccatagctataattcactttcatattaaggacaaagctaatagaaaagtaaaattgaatgatatttgcaatagtgatgaaataaatgagattctgttgtcctttatcatgctacttgtgaaggtacagcccaagccttttctcactcatagatgggaattgaacaatgagaacacatggacacaggaaggggaacatcacacaccaaggcctgttgttggggggtgggaagggatagcatttggagatatacctaacgttaaatgggttgacgagttgatgggtgcagcacaccaacatggcacatgtatacatatgtaactaacctgcatgttgtgctcatgtaccctaaaacttaaagtatatatataaaaaaaaagaacatgttctttgtctctagatcccagttcagtagttcaatgtgagtgtggtaggatcagtttatgaagctctataagcaatgatgtgacagtgaatatttagcaattagttcactggagagtgggccaaaagctcagttatgtactatttgctgatttctgtggtgttaatttccttagcatgaccaacttcaagt

SEQ ID NO: 476247 - DNA, 709 bp, Homo sapiens
taaaaagaaccattgtctgaggctccacttgcatgatcatttggagtctgacagcgtctagacaatggggaaaatgtctccaggtcatgtcagaaacttttgcagcagcctctctcatcacagacctggaggtctaagagggaaaaaatggccttgtggacacagcccggggtccttatgctgtgcgcagtctagggacttggtgccctgcatcacagatgctccagcttggctgaaaggggacaatgtagagctcaggctgtggcttcagaaagtgcaagccccatgccttggaagcttccatgtggtgttgagcctgcgggtgcacagaagtaaagaactggcattttggaatctccacctagatttcagatgtatagaaatacctggatgcccaggcagaagtttggcagtgcagaagggaaatatggggttgcagcccccacatagagtctctactggggcaccgcctagtagaactgatggcaggacagaacagtgggtgaagatctgtatgagtctcttggttatagattatttttccactggcttttccagatgctggtaccagtagttatgttcttggtacgtgggtgagttcaatgtctcatatggggttggaatggcagagatctcctgaagctcatctcatcctgtcatggttttcattttatctatttaatttttatatatttaatttttcctcgcg

SEQ ID NO: 476248 - DNA, 564 bp, Homo sapiens
tctgctgtgaatgcaggcctgggtccgttgtctctgctggagacctccactcggtctgagactgaggaggccattggcgggaacaaggggtctgtgccataaaaagggtgaagatgccccagacacaagtgtggctgagactgccttcctggaagccaaatgggctattcagcaggcacaagccctacaggtagttgaccaggggcacccgtttgagctggacttgcatgtgaccacagatggtttcagctggggcctgtggcagcacacagagggcttaagaacaccagtagccttttggtcccaactatggaatggagctaagctgaggataactagtagtggaatagagaagcaggactgggaaggaaaggacatagagggatggtgcaccaagcaaagtctcctggaagcaatgactaatagcgttcttgtaaatctgaagatatgtttgaacattgtgtgtgaaaggcgattatgaaaatgtcaacttaaatttgccagtttttaggagctcaaagatagtctgaagaaggggtactggatttagcaacgtaaagtata

SEQ ID NO: 476249 - DNA, 706 bp, Homo sapiens
aactcagttggtaatgaagaaatcacccgtcttctgcattgatcacactgggagactgttgccccgaatcccacataagcctttacactgccatgctctcatgaactgctcaacactaatgatttctccagggcttggggtgaatcctgatgttactgatttgatagctttcttattttctggtaaagatattaagtggtataaacattccctaccacaagaggtatctcacttggctcttcaacataagaaactgaatgaagtgacaacttccatgaaggcacaaaccagctacatggagttcttacatacgattgcacatgcactcacatgctccctcagaatagataatcgaaatcgattgcatagcacctctgacgctcaattcttccttgaaaggagaaggactctatccttagcttcagtcagttgttcttacctgatgcagtgaactgtagactaggttctgtagtataacaggacttctgaggcttcccattttggaaggagtgggtatggagataggagaaatacatttctcagggggagaaaaagtcatccttttctggggaaacattcaaaaataagcctctaatagcccaatatgtcagaagtagaatatcattttatttaaacaagcacaaaatattgtatctattacattaaatattaactattttccaggccaaacacaaaattatatacc

SEQ ID NO: 476250 - DNA, 1937 bp, Homo sapiens
tgaatagtgttgcaataaacataggagaacagctccagtctacagctcccagcatgagcgctgcggaagacgggtgatttctgcatttccatctgaggtaccaggttcatctcactagggagtgtgagacagtgggcgcaggacagtgggtgcactgcaccatgcatgagccaaagcagggcgaggcattgcctcactccagaagtgcaaggggtcagggatttccctttcctagtcaaagaaaggggtgacagatgggacctggaaaatcgggtcactcccaccccaatactgtgcttttctgacgggcttaaaaacggcacaccaggagattataccccccaactggctcggagggtcctacgcccacagagtctcgctgattgctagcacagcaatctgagatcaaactgcaaggcagcagtgaggctgggggaggggcgcccaccattgcccaggcttgcttaggtaaacaaagcagccaggaagctcgaaatgggtggagcccaccacagctcaaggaggcctgcctgcctctgtaggctccacctctgggggcagggcacagacaaacaaaaatacagcagtaacctctgcagacttaaatgtccctgtctgacagctttgaagagagcagtggatctcccagcacgcagctggagatctgagaacgggcagactgcctcctcaagtgggtccctgacccctgacccccgagcagcctaactgggaggcaccccccagtaggggcagactgacaactcacatggccgggtactcctctgagacaaaacttccagaggaacaatcagacagtagcattcgcggttaatgaaaatctgctgttctacagccaccgctgctgttacccaggcaaacagtgtctggagtggacctctagcaaactccaacaggcctgcagctgagggtcctctctgttagaaggaaaactaacaaacagaaacgacatccacaccaaaaacccatctgtacatcaccatcatcaaagaccaaaagttgataaaaccacaaagatggggaaaaaacagagcagaaaaactggaaactctacaaagcagagtgcctctcctcttccaaaggaacgcagttcctcaccagcaatggaacaaagctggacggagaatgactttgacgagttgagagaagaaggcttcagacaatcaaactactacaagctacaggaggaaattcaaaccaaaggcaaagaagttaaaaactttgaaaaaaatttaggcaaatgtataattagaataaccaatacagagaagtgcttaaaggagctgatggagctgaaaaccaaggctcgagaactacaaatatgggactatgtgaaaagaccaaatctacgtctgattggtgtacctgaaaatgatggggagaatggaaccaagttggaaaacactctgcagtatattatccaggagaacttccccaatctagcaaggaaatacagagaatgccacaaagatactcctcgagaagagtaactccaagacacataattgtcagattcaccaaagttgaaatgaaggaaaaaatgttaagggctgccagagagaaaggtcgggttacccacaaagggaagcccatcagactaacagtggatctctcagcagaaactctacaagccagaagagagtgggggccaatattcaacattcttaaagaaaagaattttcaacccagaatttcatatccagccaaactaagcttcataagtgaaggagaaataaaatactttacagacaagcaaatgctgagagatttttgtcaccaccaggcctgccctaaaagagctcctgaaggaagcactaaacatggaaaggaacaaccagtaccagccactgcaaaatcatgccaaattgtaaagaccgtcaaggctaggaagaaactgcgtcaactaacgagcaaaataa

SEQ ID NO: 476251 - DNA, 681 bp, Homo sapiens
cagacagcgtcctgaaatgaagaattagagcaaaagattaagaccacgttattcatgtctgtagcaggccgtggacctgtgctggtccttggcatgttaggaacctggatgcacagcagtagcactggggagcagctgcaaatacagattaacatttgcagagaggcctggctgcaccgagaccataataaatcaattgcttgcagactcatatcaaaactctatcagcgagtggcaggtgacaagctgcatctagtgacaggttttagagtggcaagtgagttgatatacttcaattatgcagctgcatctggttggcaggctttaagtcagaagctgacagttattttagtccacacacgacctgctcattattttcttcactgcttccatgggcacccctttttcacactacacacttgtctcagtcacagttttgcattactgcttaaccacagaagactcctgaactgggaagaaagggatcgtgacccatttgtgaataagccaggtcaaaaggatataaaatttgttccttttgatggctatatttcaaggtcaaatggagaacactaaacgtactttgagaaaatgaagccaacacagaaaagaaagcaaagctgagagaggggaaaaaggaggagaggattgattctgaaaaggctaaattatgtatggatt

SEQ ID NO: 476252 - DNA, 1051 bp, Homo sapiens
cctcctacacatcaggagctagacacagtgggaaaatccagatggaaacttcaattatcaccagctgtttcagcactgcccctgttctcttgtcgtgggccacccctgagacagcaagaccaacccttcctcttcctcctcctcctcagcctcctcaaagtgaagatgaggaggatgaagacattcgagaaaagacccacgggaagataaaagaaggctacgtttccaaatccaccactgacttccatgacagaaagtgcatccactttgttcaagaacttttcttgaaaggacaagaaagcttggatcaaagtgaaataaacatcttcctacagataggaccatttcagaaatgcagtgccaggcatttgaagatttcaataattttaaaagataatgagtctgtggaaaatggaaaattattagctgttaggtataaattaagaaattataatgtcacaaaagatgagttttcagaagtggaatttcctaaaatcatgaaatttattcctcatcagtcctctctctttttcctaccctgtcctatagcaccaagtcaccagaacttagaatgtggaaaaagaagactgtctttggggcagagtcggtcttgttcacctttctcctatatggaacagtggtgattcatgccttcctctgctgtcacactgtcagcatccactaatcatagccccatgatcacaggacttgtgcacataaacagtttccaggaggtacagaacagcccagggacctctcaggcgtaaacactagttattctgtaattcattctactcccttctctatccttttgtcatgtgcttgaaataatagctttccttaaaacgtttgaacatgtcagcggacgtaggcccttttgctgtctttggtacatacatgtttgtttcactatatcccctttcttcaaaatgataatctttggctgttctggtgaagctctgtggatttgcgtcttaaagaatatcaagaggattcagtgatggcgtttcagacacatgctagatcctcttgtccttcgcatttatgtttc

SEQ ID NO: 476253 - DNA, 527 bp, Homo sapiens
tccctgactgacacctctcttatatcctagcggaatacagagcacctattaagtgcttcaaaacacttagggttgccctcctcgtgaaacgtgatgccaacacagcaggacctgactgtgaaaccagttcccatggcagacagccactgtagagcacaggtcgctttcactgggagccactcctggtggcctgtgtttgtgagacccttggattcaattgatcaattgactgtcacctacaggaagcacaggaagcctgcctccagaagtagcaatttcacagacatgagaaaccctttgagagtgaagggcttttggtaccacttcatcatgttcctttcctgcttggtgaccgatggcagggccaccatgcttctgagtgaggctttgagcaatgtgtccaagagatcaggacaccgggcaagtggttctcagtgctggctgcccattccaacctgctgggtttggtttgcaaaattccaagactttggcccctatcaatgaagtgagaactggggaaggggata

SEQ ID NO: 476254 - DNA, 1134 bp, Homo sapiens
atagatttaggagatatacctaatgctaaatgacgacttaatgggtgcagcacaccagcatggcacatgtatacatatgtgaatctcttgaagacaacagatacttggttggtggacgtttatccattctgccattctgcagaatgccccatcttttaagtggggcatttaggcagtttacattcaatgttcatatggagatgacacggaagatgagcgatgggccttttaagatccttcccggagaaaacgtaagtgatgttcattacattttcaccggattccacacatctggctggtgtgaggagcaaagatccattgggagtgaaactcagtctatggaagaacaacttcatgctgtcatcatgaaacatgcgatcctgacaacggagtccatgcctgcagacatcagtctgtgcgtcctcccggccatcccatgctggaagtccaggctgtacacaggctctttgtcatgccaggctacttcacaagtgataactttcatcctcctgagtcttgaaggtgcaaaacgtttctccggcaccgttctgcagggaccaggatggtcagcggtgctgtcacctcccttgcagggctgtgctgcttcctgcgcactgcaggccccgacccctcgggctaatgaagctagtgactttaagttgaacccaatgcccatataccattcaaaaaatcctagggctcttaagcattatgctaaatctactctgcttctgttccgtaaatggaacaacaaagcttggctgacagcacatctgttagcaccatggtttactggatattttaagcccactgttaagacctactgctcagaaaaaaagattactttccatagattactactcattgacagtgtatctagtcatctgagagctctgatggagatgtacaaggatattaatgtgtttttcatcacagccttcattctccagtgcatgaatccaggagaaatttcaacttccaagtcttgttctttaaggaatacatttcctaaggctatagctgccatagacagtgattcctctgatgcatctggggaaagtaaattgaaaccattctggaaggaattcaccattctagatgtcattaagaacattcgtgattcatgagagaagg

SEQ ID NO: 476255 - DNA, 498 bp, Homo sapiens
ttctttaatgatgatgttagaaaaatgcaactgttggatttcaaagtctcagaccatctgcatgctggtacacagacacgacacagacacagtaaacacagtcaactggcagagctacaggcagctataggaaaatgggaatacttttacatgacaaagttacaagtgtgtggctgtgaaattagggaccaagatgactggaagcacaacttgttgaacattttgcaattcaaagttaccttttggtcagccatagacaatccactaaatgaatctggaaagagtttagtactgattaaacttggcgagtccatgattacaggaccatttgtacctgtgttgcatgactcaggcacaagcagatggtctgcaggtaaaaccacaaaccctctggtgatcagtgaaatcacatctttgttgtctttgcctggtgaatgaggtagctatgagattgctgttcttttgtaaatagaatactaaatgaacatgctgtcacgc

SEQ ID NO: 476256 - DNA, 646 bp, Homo sapiens
gacatcaagcaacttaaattttttcctgcctccttctgttaatgtccaaattcaccagttatattttaaactttctgctttatttttgtgtcacaaattttttctattcaaaatatgtgggaggattagggcagtcgcagcaggaatacaaggagaaagattcgagtctaggattcagtcttagacttctagaggaggacttccgggtctgcagaaaagcgctagttttgaaaggcaagctttgtggagagagaatttctttagcatctattgagagctgtcctggtggactagattataataaacagcagggacagagagaagtagccaatgacaggggaggaggaacgtgtgagagaggatggaagatagacggaggggaagcaggcagtaagacatgtcctgaccactcctttacgggctgatggctggggagaggagccatggcaaatcagtggacacaaaagcaaaggggttcgtgtcctgccccactctggatcccctgggaggatggcattgggagatatacctaatgctagatgacgagttagtgggtgcagtgcaccagcatggcacatgtatacatatgtaactaacctgcacaatgtgcacatgtaccctaaaacttaaagtataataaaaaaaa

SEQ ID NO: 476257 - DNA, 582 bp, Homo sapiens
ttgcagaggggcatggtgggagtgagaccagccctgtggtttgcatgggagctgacacgcttagccctgccctcacctgatggtccttccctacccaccttgatagtggaagacaatggacacatagtcttcggagttctagagccccacccagcactgatccctctccacactacttcagctgatgctttttggaaaaccttccctctgacagagcctacccaaatgagaaggaaccagaaaaccaaccctggtaatatgacagaacaaggctcatcaacaccctccaaaaatcacactagtttaccagcaatggatccaaaccaagaagaaatccctgatttacctgaaaaagtattcaagagaactgcagaatggataagaactcaccaaccaactatctgctaccttctggagactcacctaacacataagggcttacataaacttaaaggggtagaaaaagacatttcatgaaaatggacaccaaaactgagcagaagtagctattcttatgtcagaaaaaaaaaactttaaagcaacagtggttagaagaggcaaagagggacattgtataatggt

SEQ ID NO: 476258 - DNA, 979 bp, Homo sapiens
cccccgaatactctgtctatagtgacacactcttgttcgaatgtcatgcccaaaggccaaggttgtggggatgggcctggtgcaggccattgtattctgagcagaccagcaggggcggtgcttgtggacagacatggctacagcccaccagaagataaagctgacaggacttggctatttgtgggagcagaactggtggtgagtgagaggagcataattgaaaaccttctgatggagcttcctttcctgcagagaaaaggccgcactctctgcacggccaccaaggcccttcccatacccagtcacccgcacccagccaagacagtgacttctccatcccctgaactcatcacacgtgagcccacctctgcccaaaatgcccgcacttctccatccagcggtacccccagggtaaactcccacacctctgtggatctgctcttccctcctttgctgccctctgtggccaagaatttatgcacacaatatggctggttgtatggcagccaaggcagggacgtttgcttaggtctcaatgtctcttcagatcatcgttgaatctagcaatgctctttcacttatctatttgaaccgtcaacagtactgtcaatgtgggagggcaggccctgtgtcccctttttagaagggagagaaggtgggtacagagacgttatgtctttctgattttcttcgtctattcgctcgtcccagctgcctgttaaatgccatggtgcttatcattgctgggccagtgcacagggcctgctcccaggaggacaacttgattcaggattttaccctctgactccttgattggcaggccaacagaaccaaaagtggtttgaactgagctaaattatgtcacatctgagtcaatggaggtcccacgactgtaaaacagctcttataaaagggaccttggacagggaggtgatggtagccatttaattcttgatatttatctgcaaataatgaaagc

SEQ ID NO: 476259 - DNA, 653 bp, Homo sapiens
tcccttcgtaagaagctgagataacagaatgaggaaactggtcctaggccagaaaagaggaataggccatggactgaaaatgctaactgtgcactgtgatggctcagttagtgatgaggtcacctgtggctcaaggctcagggaagacccccgacggctttcagctaggtcggtgaccagctgtcagtgggaagagtcccctgtcagtgccaggttgggggagactcggagctctgacctggaggggaaaagacaggaacacacagctggctggtccagtcaaggtgaacatccattccgggaagcatctgagaccagtggaaatataagatcatgccagacatatgatgatgctaagaggaggtactgttgcatgtatgcaaaatgtcaagccctaagctgccaggtttgcatcttgtttgcaaatgatatagagccaaaatgctgagtgtgctattgtaggcctgaacttgctctagctaaaataaacagataaaataagtggtagcctggaatatagggaacgtttaatataactgccaacagaaatattcaatgctataaaactacaatgtgaaggcaaacatatttataatggacattatttggataatttttttgtgtttcttgctctaattttggagactcagagc

SEQ ID NO: 476260 - DNA, 612 bp, Homo sapiens
acccatcaactaaaggattgggtaacttgtgagacgtattcactgtcacaagaacagcatgaggaagacctgccaccatgattccatcacctcccactgggtccctcccacgacacatgggaattatgggagctacagttcaagacgagatttgagtggggacacaaccaagccatattacggggcccaacctagtgaattgaagtgccaggcccattcccatgtgccagacttaccccaggggatcctggcaccaggcccacccctgcagatccaagctccaggaccacctccatggactcatgtttcagggaacccaaaaggaaccaatgccaggcattcacattcatggaccccagcagcaggcctgcccttccagtcagtaaagaatggaaaaggtgactactttttcaaatatacacacatcaaagctacaaaaataatgaagaatcagaaacatgacaccactcaagggataaaagaaacttctagtaatgaaccctaaaaattagaaatctatgaacttcttgacaaaaaactcaaaatgatagaagtatacagtttttgtatgccattaaagttgttaccagctcaaactatacttttataaca

SEQ ID NO: 476261 - DNA, 1618 bp, Homo sapiens
aggagggaggccagaggagcagacgaaactctgcattatgcctcaaggtgctcttattaggaagctatccatcgcctatccacccactccccttagacctcagctggggctcaaacctgaccctgggtatgacatttggtgtagtggtgaacctgacaatagccatggagtaaaatttatagatcttagagaagatgccattaggaacatttttgttacatggaaggaggtcaaaacagcaacattaacaggaatttggaagaagttaattctaaccctcatggatgactttaaggcttcagtagaggaagttactgtaattatgatagaagtagcaagagaactagaactggaaaagaagcctgaagatgtgactgaattgatgaaatttcatgataaatctttaatgaatgaggacttgctttttatggatgagaaagcaaacttcattgttgctttatttccggaaattgccacagccattcccgctttcagcaaccaccaccctgatcagtcagcagctacaagcatcaaggcaagttcttccaccagcaaaaatacattacaactcaatgaagtctcagatgattgttagcatctttgaccaataaaatatttttaattaagaactatgaaatggattttctttggaaactttttccccactattttaactttgaaagagattctagcatcccatcatatttttccccatcaaaactgcctgaattaaaattggcaacctaaaattagttttctaactataattttgactttttgtttaaatagtaattttcatacatttgtaaaatttaaaatcaattatgtgtttaactatgtgagggggaagaaaattaaagtcacattctaaatgtgattagacatctctagtattgcaatctgatgaccctaattctactttttgatggcaacactgaaaacaaaatgcatttaaagcagtgtaaaccactgatttccaaacgggttagagctgtttttctactttaacttacctttcaaaactgaattaaataaaaaaaaatatatctggggggaaatgttttaataaacagctcagaattcagtaactaacggtttcaacttcagttcctttgtgacttaaaaatcaagtatttatttagaaaatgccttcagcaagagtacagtttgggatttatttcatgtcacagattaaattattgcttgcttccttaacttgaaatgcataattaatatttcacagcaagtttagattagtagttacattttctttacttaattttcaaagtcacttaaagccatctgagccctagtatttttatatcacaaacaataaatcaagttaaatgttagagtcagagagctctaatgctacatttaaatccaaagcactggtaacactgcagtttatctagctgtgttatagactgtcaccaatcataacctccaatgtttcataaatttttgataggacagccccaattcaagagttggaaagtactacaacaaattaataataagattataaagaatatgagaatgtgagagctctactgttacttccatgacaaaatgttgtagtttgaggctttatagtagaattttaagaccgtaattt

SEQ ID NO: 476262 - DNA, 1125 bp, Homo sapiens
aaaccacacatcaacttccagtggtgttctggtatggttaagagccttaacggtgttctatagtgagcttcaaagcacccctctgttaatgagtctgattgggcataggtcttcatttctctggctgctctgtgtaaagcaacctaaaggtacccagaatgctgcagtagtaatagaagtgggaggagtaggagatggagaaaattcaggtggacaaaaagcagcaagtgataaagacaagaaactcctggatgtgggagacacttacttgtgggagaagactgttcctcacctcttccactgctgcctgcacacctgcgttgtccagaccttttcacttgatgtgaactggatccctagtcttcaaggtgactgcccagcacctggaagggcccatgggttagttgcttcagatgcacccattcttgtcccttcgttcatatgccatacaaatattagctttttctctttgtgtcaatacataaatggtgtcggggtaatatatttctctgactgattcatttattgaagcaactaaatgtattcgtctttattcagtgctgtgtactgaggactgtgtgtgttgcaaaagctcttgggtttctctttagatcacagttaggatttaattgccacaggatcatttctccccaggttaggtttgatccttctattttagttattttgcgtatgcataacttttcatttccaaactcatgttatttgcaattttacatttgtttacatgcatacatactaataattactctacaaatagactgccacttccaccaaaacagatggtattagtttttgattatcattaaatatctagcatagaacaatgatacttatatgttaaatgaataaaggatatgcatcttaaaacttttctgtagtcatagaatacaattatttgtagaaaaacatgattttaacaatagtcatattttataagtagtccatatcacttagatatgaatattttgctctttaatacattggtaataacctgatatagtttatactgaaactaatgtttactcaaaatgtgtgcatttttctttagagttgcaattatttttgtaacattttattctgttgttggttatcacataagtactt

SEQ ID NO: 476263 - DNA, 1170 bp, Homo sapiens
ctcacactacctgcttaagagtgagacttaatcagaaagtcagagaatatcaacagtcttcccctacaaccatgctaaataaggataagatgttcaaatgcgtccggagtttcttccttctggtgggtttgtagcctcactgacttcaggagtgaagctgcagaccttcaaggtgagtgttacagctcttaaaggtggtgtgtgtggagttgttcattccttcatggtctcgctggcctcaggagtgaagctgcagaccttcgtgctagacagaaaagttctccaagtccccacccaacccagaagcccagctggcttcacctctcaatggcactcaccatgggactttgcagcacctagcctgagcactccagcagcccaaagggaactcattccccgatcaagcccagcaggcaccagccagctgcaccgagtgtggggcccaccgagtgtggggtccaccgagcccacacccacccggatcctgcaccagcccatgagcgccacacacagccccagctcctgcccgcacctctccctccacatctccctacaagcagagggagccggctccagcctcagccagctccagagaggggcccccacagtgcagcagcgggctgaagggctccttgagcgtggccagagtggatgccaaggccaaggaggctccgagagcaagcaagggctgctagcacgttgtcacccctcaatcccccctctatacaggacaccccaactgctctttggaatttggctgatgaccactctagctacttcctgctggatagaggcgaagaaggggccctgcagttgtagtgtcctccagagcggaactctttaggccaggggaactctttagtcctctcaaaaagtggtctggtgcaattaccaagtaaaacacaagacagccccttgtggaaatttagcaagacaaagatgccaaggactcaatagtaaataaaacataaaagcccttgctctcttaaagctttcattctaataaggataaactaaatttaagcaaaatatacataacgagccaagtgctatggtggaaaataaagggtgattgaaggaaagtgggtgacagcttggagatatactgctattttaagtcaggcagtcaggaagagtctttttgatgaggtgacaattgagcagagactt

SEQ ID NO: 476264 - DNA, 1198 bp, Homo sapiens
gaaggggtccagcggattctccggtctcatcgcctctttaccttgcttcttgcctccaagcctgtgatcgggggggctgctgtgaagatctctgatatgctctggagacattttccccattgtcctggtcctggacagctctgcccctgtggctctgcagggtacagccaccgtgcgggctttcactggctggtgttgaatgcctgcagcttttccaggtgcacggtgcaagctgttgatgttctaccattctggagtccagaggacggtggtcctttttccacagctccattaagcagtgccctaaatgattgggtgggccagcagcagctatgctacagccctgctactggggagggcagggttgctttcaatgctagtagcagtaggcaagtggccaaggagagtacacttttgcaccagatggcagctgtgggcaggatagcctgtcctgagggcactcataaatgggtggcaactcactttggccctggtggcagctgccagtcatggcagtggctctgggtggaggatgtcaatgggctccaggaatgtggagatacaagagttgtgggactccaggggtggatggagtctgtttactgctatgaaagagcttctggccatgctgcagagtgtgggaaaataggcaaagcccatggaaaccctgagcagaggagaagcagtggagtcaatgctaagaggtgcctggagctcacacggaaagtactagaaattaggaagctgaacagaggaaactctggccatgaaaaagtcaaagatcgtccatacaggaatcagtcatactggcatcaggcttctcatccccaatactaaaatcttgtggcaaaatagaaataccctcaaaacgctggtgacaaataaaaacagtaacaaataaagggcaaaaacaaaaaaacttagaaaaactaaatacgtgaacagtgtgcatgtaaacaataaagtataatttagagaaaatcaaattaaatgttaataaaataattacattcaaagtttaactcagcaatcactggtcttttttttttcctgctaaatccatagctttatcttttccagaatgtcatatggttggaatgatatagtaggtagcttttttggattggcattggctttgtttttacttagtaatatgcaattaagttttctccatgtctttatatggctagatggctaa

SEQ ID NO: 476265 - DNA, 1434 bp, Homo sapiens
ggcgagggtccgcggcttcattcatgagatcaggggtacatatgcggaatgtgcaggtttgttacatagaagaagaagaagaagaagaagaaggagaaggagaaggagaaggagaaggagaagaagaagaagaagaagaagaagaagaagaagaagaagaagaagaagaagaagaagaagaagaagaagaagaagaagaagaagaagaagaagaagaagaggaagaagaagaagaagaagaagaagaagaagaagaagaagaggaggaggaggaggaggaggaggaggaggagggggagaaggagaaggaaaagaaggagaagaaggagaaggaggagaaggaggagaaggagaagaaggagaagaaggagaaggagaagaggaagaagaggaagaaagaagaagaagaaagaagaagaaggaggagaaggaggagaaggaggagaaggagaagaaggagaagaaggagaaggagaggaagaggaagaggaagaagaggaagaagaggaagaagaagaaagaagaagaagaaagaagaacaaggaggagaaggaggagaaggaggagaacgagaagaaggagaagaaggagaaggagaggaagaggaagaggaagaagaggaagaagaggaagaagaagaaagaagaagaagaagaacaagaagaagaagaagaagaagaaagaagaagaggaagaagaggaagaagaaggaagaagaagaagtagaaagaagtaggagaagaagaagcagaagacgtagaagacgcagaagacagaagaagaagaagaagaagaagaagaagaagacgaagaagaagaagaagaagaagaagaagaagaagaagaagaagaagaggaagaaaaaatcttcctgggtcacagagttggcatatgattggctacagtaggtcatgccagtgttccaaaatgattgcttaaatttacattctctctgaaatgttcattttccagttgttgaacatgctcactagcacatggtattggccaacgtttatagcttttagctaaactgagtaggtacatgtgcacaatgtgcagcaaagtatgtgtattatacacctatgaattggtcccacagttttggaatgtttgattcccttttttaaactatattttattctttactttttaatttgggaagagtatattgatttattttagcttctatagacctttaaactcacagtttaatttcttcgctgtattctgcctactgattagcctaagacagttgttatttatattgcaatgttttctattatttacttttgattcttagcatttccttctctattcttgaaacatgttaattttttctcttataattattaacattttaaccatagttactttaaatttattatctgataactccaaaatatgaatcttatctgaatctggttgtaattctca

SEQ ID NO: 476266 - DNA, 614 bp, Homo sapiens
cgtggcacaggggtttgtggtacatattatttcatcacccaggtgcagtctcagagttgtgcaccttctcccaatcctgcagtcgagccagctgctgatgtctacattggctgctgagatatatatgctgtctgtgtgggcacatgcgtactgtctgtgggggcgtgcactcacaggtgggtgcccagaaagcattcattgctggtgagcatggggcactgactatggggctgcatagggttccagctgtgggtgctggcagtagaagtttgcatgggccagctgttgaggtccacagtttggctgcttggctgatggttcttggtcagcctggctggttgacagggttagcagacaggttgttgaaagccaggcaccaggtgttgttagctcccacaaattcattgcacccaggtgatctagctatgccagtttcctcagtgttcttgagctataatagtccctgcatggcccaggattccatttcttggaatccgtgggccaagaaccccagatcagagaacacgagccttgccaccatcttggaagcggcccatcaccatcttgggagctctgagatcaaggaccccctggtaacactagtgtagtttcta

SEQ ID NO: 476267 - DNA, 767 bp, Homo sapiens
tgcctttctaaagggtctgggaaccacctctttgaaatgtaaacattaaggaagatggtgcctgataacgtggaattcagtccatggggtcagaggagagtgcagccgctgggcggccctactccaggggaagaccaccttctctctccatcccgctactggcctgcccatccatctcaccgacagcttcttccgccactccatgaaaccttgcacccatcctccaagtccatgtgtagagcttggaacagtttggagagctcagaagaagataggaagatatgtgaaagtgtggaacttcctagagacttgttgaatggttttgatgaaaatgctgatagtcatatggacaatgaagtccaggctgaggtggtctcagatggagatgaagaacttcttgggaactggagcaaaggtgactgttgctgtgctttagcaaagagactggtggcattttactcctgttctagagatctgtggaactttcaacttgtgagaaatgatttagggtatctggagaaagaaatttctaagcagcaaagcattcaagaggtgatagattacaaaagtttggaaaatttgcagcctgaccacggaatagaaaataaaaattcattttctgtggagaaattcaagccggttgcagaaatttaaataaataatgaggaaccaaatgttaatcgccaagacaatggagaaaatgtttccagggcatatcagaaacctttactgcagcccttcccatcacaagcctagaggcttaggac

SEQ ID NO: 476268 - DNA, 986 bp, Homo sapiens
ggcaccgccggaaagtggacagctgcagcactacagctcgtttctaggacatccctgaaggacaatggtgaagggaagtcttcccatgatgaaaactgtgaagatgtttgtatcccacgtgagtgcttaccaacgggtcacctcagcagaggagtttaataatcaagtggataggatgacctgctctgtggacaacactcagcctcttttcccagtcatccctgtcatcacccaatggactcagcaacatggacttccactcaccaagagtgacctggctccagccactgctaaaaaagtgcgacagtgggctcatgatcatgaaattcactggtcttacgatgtttcccatcatcctaaagcagctggattgacagaatggtggaatggctttttgaagccacaattacaatgccaactaggtgacaatactttgcaggactcaggcaaagttctccagaaggctgtgtatgctctgaatcagcatccaatatatggtattgtatctcctatagctaggattcacaggtccaggaatcaaggggtggaaggggaagtttcactactcaccaacatccctagtgatccactggcaaaatctttgcttcctgttcctgtgacgttacattcagctggcctagaggtcttagtttcagagggacgaatgctgccagcaggagacacaacaattactccattaaactggaagttaagattgacacctggacactttgggtttctcctacctcgaagtcaacaggctaacaagggagttacagaattggctggagtgactgacctggagcatcaaggtgaaatcagtctagtactccacaatagagtaactggagctcaatgtgagggtaatataatatgcaaatctgagcaaatttgctgaattcatgagttactcatataaggcttctcaagccgtgatgaataaatcaaggattggtccaagaatacaattttctaacaattatttc

SEQ ID NO: 476269 - DNA, 1469 bp, Homo sapiens
aggagtgcgtcccagccccgcgcctgccaggccgtctgtttcgtcccatcccatcctgccgcagcgcgcgccagccatgagctccacgcagttcaacaaggacccctcgtacgggctgtcagccgagatcaagaaccggctcctgtgcaaatatgacccccagaaggaggtagagctccgcagctggatcgagggactcaccagcctctccatcggccccgacttccagaagggcctgaaggacgggattagtttatggacactcatgaacaagctacagccgggctcagtcctcaagatcaaccgttccatgcagaactggcaccaactagaaaacctctccaatttcatcaaggccatggtcagctacggcatgaacaccgtggacctgttcgatgccaacgacctgtttgagagtgggaacatgacgcagctgcaggtgtctcttctcgccctggtgagtaaggccaggactaaggggctgcagagcggggtggacatcggccttaagtactcggagaagcaggagccgaacttcgacgacgccaccatgaaggctggccagtgcaccatcgggctgcagatgggcaccaacaaatgcaccagccagtcgggcatgaccgcgtacagcacaaggaggcatctctacgaccccaagaaccacatcctgccccccatggacaacttaaccatcagcctccagatgggtacaaacaagtgtgccagccagatgggctacacgcagggcgccaagcaaagcggccaggtctttggcctgggccggcagatacatgaccccaagttctgcccagaaggcacagtggccgacagggctccctcgggcgcgcaggctcgggggaggtccctgaatatcccccttactaccaggaggaggctggctactgaggctcccagcacgctctctccccatatcatctccccgtctgagtttctgggtttttctgtgttttcatctttttttttcttaacctgttcagtgctgccaatcaacccagggtctgacaatgcaggaaagagtggaatcattgatgattttgagtttaagcaactgctgtataacgaggtgatttgttgtgtaaagggtggaccataaagagggagttttgctgttaagggaagcagagaaattcggtgataactgaaggtagaagtggggtcaagtaaggatttttttaaaatttgagtaagatcttaataggaatgattactaaagagaataaagggaagatgtacaatcagaggtatcttaagaaggcctagtgaatgggagtcctttaagtgttttatgtgcaaagtgctatagccaatgaggcatttttaaaaaactggaaatctgggggaaagatggtcactcttgatagaaatggggctgagaagggaaatcattttagaaataatggtaaatgtattttggacatattgagttcaggaaaatatttaagcaaaga

SEQ ID NO: 476270 - DNA, 574 bp, Homo sapiens
agttcctcttattatgatgccccggtattttctagctacctctctcttctccccgaatccctgcaaagaaagttctaaggaaggaacttgtggaccccacaactgcattctggagcagaggtttcctagagctgacagttgtgaggacagcttcatgggacataatgatgggtgctgtggtgagccccacccagacggaccggagtcggttcattctcctttaacctcatcatggtcagatcctattcaatggccatcaggactgccattgcctgagcaattggtcttgagaaaagaacttcagctccctggacttcgtttcctcctcaataaaatgccatcactacccagttcagaggctctgacaacagcatccacagcagatacttccccaaagttcctgaaggagaagctctttctttgcaggtgtttcagattctctctctctctgtggtgaagcccaaggttttgcgcaccctcccctctggactcgaagtatatcgctatcttctgctgacactgaacatctcttcaaaaggatcaatgggcaaagtaattgttcagaataaagacc

SEQ ID NO: 476271 - DNA, 674 bp, Homo sapiens
tgatttccttcctgagagagctgacacagggaaacaggatggtatcgtcagcttcacggtttactgcgtctgagcttccagccatgcttctatctctcctctgcacgatggtctgccccggggtcctcatagagagggacaccaggagaggaaagggtaggagcaggaaaggtcctaccttgactggcagcagtgtgacccagcactggtttcctaccagtggaacaagtttaaagctgatatttctctgggagtgtatttgtgggtccatggaggccccgcctggaagaaatacctgcatttcccctgatgcagagaatgcgttttgctctgttcagtgtcatctccactctggggctttgggggaacctactcctgtcagggtcacagcccactccaggcaaggctcttgggcaggcctgctctctctccacctctggcctgtggaaaaagcactcaagcatccttagttccccaaacctccattccttatgtaattgtccagttacagactcttgattttagaattttctagtcatgcatccagcagcagcctcttgtccccacaaaatcccatgggcacaggtccacctctctggggggtgtactcaagcccatttcagttggcttgaggtgaaaggaaaatacctccaaaggggaggagggaaactgcc

SEQ ID NO: 476272 - DNA, 940 bp, Homo sapiens
gaaaaagaagaacaaggaaccggaaggttatgccatatttcagttcgactgtggcaccctcgccataagcatctgctgtgagagctgattgtccacagtgggcctgataaagtgacagtggaatatccataagaatggtccaggaggctgttcaagctaaggaatcagaacctgcagccatttctggggatcatacagtccttgaagggaatatagcactaccagacatatgtcactacccagtgacggacaagtggcagaataaagaaaatgaaggagatgctcagttggaggaggtcaagagatacatctgccctctggatcctggagactgcaatgctaagcgcttcttaaaatgtctaacagtaacaagcaaaagccaattcaaagatagatctttggggcaccctctggtggctgaaaagagtcatgaaatcagtgcccatgtgtatcaaaaggccaggccatcaccaacttttccatacaacattgaaaatgtagccagatcaggaatgtgggaaggactgaaaagaatttggaaccacaagaactggacttgagtcagagctctcatctattagctatgtgaacctgcatttggttggcaggtcagtttccacagagctgacgccgaatctggaatttctcactggagataagaggcagtgtcaaaactagaggagtatatgattccatttatctgatatgcccagaaaaggggcatttctgacggagtaagactattaaagcagccaactagatgcaattccatcaaaatgaccattttgaaatgtaaaaccaatgttttatttattacttttctcagtaacaggtaactcagtgtggtttgagaactagatgagattaagaagtgcactgatgagagaatgtctattttttacactgtttactaacagaaaatgtgaaagtgaggatttat

SEQ ID NO: 476273 - DNA, 1899 bp, Homo sapiens
ggtatctcagagactaaagaaatgaataggttagcacaaattctcttcccttcaagacatgttttatttatttgtctttgctacaggttacagaatcagagtgtgcaccaatcccaaccacgggtattggaggtagagactactccaggatccttgagaaatggtccaggggaagaatcaaacttcagaacttcatcacagcaggaaatcaactatagcacacatatcttctctcctggaggcagccccgagggaagcccagttctagatcccccaccgcatctggagcctaatagatcaacaagtaggaaacattcagctcagcacaaaaataacagagatgacagtttagattggtttgatttcatggcaactcatcagagtgaacctaaaaacactgttgttgtgtctcctcatcccaaaacatctggagaaaatatggcttcgaagatctctaacagcacatctcagggtaaggagaagagtgagccaggccaaaggagcaaagtggacattgggttgcttccatcaccaggagagacaggtgttccatggagggcagacaatgtggaaagtaacaagaaaaaaaggctagcactagattctgaagcagcagtctctgctgataaaccagactcagtactgactcatcatgtccccaggaacctgcagaagctgtgcaaagagagggcccagaagttgtgcagaaatagcaccagggtgcctgcacagtgcacagtcccttcccatcctcagtccactcctgtacatagcccagacagaaggctggactcacccaaaagaaagagaccgaaatcccttgcgcaagtggaagagcctgcaattgaaaatgttaagcctccaggttcccctgtggccaaactggcaaaatttactttcaagcagaagtcaaaactgatccactcctttgaagatcacagccatgtgtcacctggtgcaactaaaatagcagttcatagtcctaaaatttcccagcgtagaacaagaagagacgcagccttgccggtgaagcgtccaggaaagttaacatctaccccaggaaaccagatctccagtcagccacagggtgagacaaaggaggtgtcgcagcagccaccagagaaacacggaccaagagagaaggtgatgtgtgcccctgagaagaggattattcagcctgaattagagcttgggaacgagactgggtgtgctcatcttacttgtgagggagacaaaaaggaagaggtttcaggcagtaataaaagcggcaaggttcatgcctgcacattagccagattggcaaacttctgctttactcccccatcggaatccaaatcaaaatcccctcctcctgaaaggaagaaccgagctgtgggctgccctggggaagggggcatggctttgggctgggactgtctgcagctgaaggcagtctctggagggggcttcagctgtgagctgtcagctgccaacactctcagcagctggaaaaagtgggctcatcaatcttcaactggaaatgtgggcagtgcacctcagcatctactcccgtctgtctcaggccaagactgggtagatagagcatcttccggggtagctggcagcattttggcacatgatgctggaagaggatgtggccggagctgccaggcactgaatccaggcagccctttcctgatgtgtactaagctacagcacctgtgtcgagatgagagtgagccaaagggcactggttggtaggatgaggtggaggagtattttaatttttggaatttgggaagcagacagctttactttgtaaggttggaacagcagcaacatccattacatataaaccaaaaatctttactatttctaaatttcctagattgctattatttggtcctaagttgagtattc

SEQ ID NO: 476274 - DNA, 721 bp, Homo sapiens
tctttttttttttcctagcagctgccactcggctggatattgcctaagattacgagttcccgaagtggggggaagtgtggccatcattactgcggctgcctgctgctaaagatgactgagctcttgtgggtgaagggtggctgtcatcactgcagctccagcccgctattttcccctgtgggcgactggacggatttgacccaggaggaatttcccacagtgcagcatagcggctgtggcagatcctactccagccaggaatttagggacagaccactgatatccttgggactgagcccctggaggcagaggtggccgcagtcaccgcagatcagcagacttagtctccccctgctggctctgaggaatccaggcaggccggaggagtgggattttccaccagtgcaacgcaccgcctctgccaaggtgcagccacagtgcttcattaagcaggtcctggatcctgtacctcctgactgggtgagacccctcccaacaggggttgccagacaccttacacaggagagttcccgctggcatcaggtcggtgcctctccgggacagagatcccagaggaaggagcaggcagccatgtttgctgttctgcagcctccactggtgacatctccaggtgcaggagggtcccaggtgactaagttctgtagtgaatccccagcaaacttcagcagccctatggaagaggggcctgagttttaaaaga

SEQ ID NO: 476275 - DNA, 900 bp, Homo sapiens
caggcctgcatctgaaggtgccagtctggagcctggggttgtgggggccagtctggaaccaggtttcaaagggtaaagaagaggaaaaaggcatacctaaaaacaaggtaaaagcatacgaagccaataagaaatggcaaaccttggcctattcagaaagaaactagtattctggtgggtccaaacatgtcctgctaaagaacttagaatttatgctgatgatggggctgtgggtctaagaccagcagctgacactacagcttatctcaaatacacatgggatctccagcagaggttagaacttgtgtatgtttgcgctgtgcgttctggtgggttcgtggtctcgctggcctcaggagtgaagctgcagacattcccagtggatgttacagctcataaacgcagtgcaggcccaaagagtgagcagcagcaagatttattgcaaagagcaaaagaacagagcttccacagtgtagaagacctgaccaggttgccactgctggctcgggcagcctgcttttattcccttatctggccccacccacatcctgctcattggtccattttacagagagccgattgattggattaatttgaaagccttatcattgagctctgaagtcttttcttctacttaacttcaacttgattctattgctgagactttccagtgcattttgcaattctctaagtgtgtacttgatttccagaagttgtcattgtttttattgatggtatctatttcactggagatttttccattcatatcctgtgtcatttctttgatttctttaagttggacttcacctttctctggtacctccttgattggcttaataattgaccttctaaattctttttctggcaattcagagatttttttcttcgtttggatccatc

SEQ ID NO: 476276 - DNA, 525 bp, Homo sapiens
tctaagtctttttgtagtttctatgcacgacagtctgctggagtttgccgaaggtccactccagacctcgtttgcctgggtatcaccgcagaaactgcaaaacagcaaagactgctgcctcttccttcctctggaagctttgtcccagaggggcacccaccagataccagctgaagctctcctgtatgaggtgagagctcgagtgctgtgcttggagagccgctgctctcttcagagcctgcaggcaggaacgtttaagtctgccgaagctgtgcccacagagataccctgcccagagaggaggaatctagagaggcagtctggctacagtggttctgtggagctgtggtgggctccacccagtctgaacttcctggaggctttgtttatattgttaattgttttaaccagaatacccaattttaggtcagaaaaaatggtcgaacaatagattttaaaacagtgtagctctattttaatcaatagcttattgcaactgcctgactggagacctaggtcatattt

SEQ ID NO: 476277 - DNA, 677 bp, Homo sapiens
tggatgagtgtgcaggtaggtgtatatgaatatactttatgtcagtagttcctgtgtaagacaagatgtgagtgataggcactcattggagatttggtatatggtgctacaaccatttgagatagagaatacagaaaaaggagctggctggggaggaaaatttattattttagtattatatttattggacttgatgtgcttgacttgcgttctcaggttaagatgtgtagtaggcagttgcaggtattggctgggaactcagaagtggcttgtgagaagcagatgcagatctgggagtgaaggcctgacctacagcagcaaaagcccttatggaaagattgctgcgagtgagctgctgaaatgtcactctagcctcactccctgcttcatcgctgtccagttatttcccaaatggctttctttggtggttggtttcagattgaatattcaggcccaatagacaaagtggaaacctaaaatttgtgattgaaatgcattgttggaattttagcctgaagatgtcacagttttcatttttaaaatatgcataacatagaaaggatcatagagaggatgaacattaacaacctgccattccagtttaactcttatcaaaggataatagaggatgacacattaaaactcttctcacttaactgggcagcagcagtgcactg

SEQ ID NO: 476278 - DNA, 513 bp, Homo sapiens
ttaagattctgattattaatctcaactatacgaacctctatgattgggactggacatgcctggccatccttaatatgaggagaagagaacgcggaaccccagttttgccattgatagccatctgtgaccctgggaaggagggcaatgctgatggcagagggaggcttggaaaggacatgggtcttcctctgaagagagtagtggatttcccagcacagtgctcgagctctggtaagagtcagactgcctcctcaagtgggtccctgaccctcgtttatcctgattgggagatatctcccagtaggggccaacagacacctcatacaggagagctctggctggcatccagtgggtgcccctctgggacgaagcttccagaggaaagaacaggcagcaatctttgctgttctgcagcctccactcgtgacaccaaggcaaacagcatctggagtggacctccagcaaactccagcagacctgcagcagagggcactaactcttagaaggaaaact

SEQ ID NO: 476279 - DNA, 484 bp, Homo sapiens
aaaccatccctgcatccctggcatgaaacccactgaatcatggtggattatctttcggatatgctgttggattcgacactggacagcaggaagtagagggcagcaattcttgagagatgagaaacaaactagatatcctacaataatccaacttaatgcctggagagttttcaggccaccttgtggaggaacccaggcaagttctgatagttttccagagtcaaacagatacagctgggagctcaaggataccaagaagaaatgcatcattaggcaatttcatcattttgcaaacatcatagaatgcactaatgcaaacctagatactatagcctactacacaccgaggctacatagcatgttgctcctaggctacaaatctgtacagcatgttactgtaccaaatactgtagacaagtgtaacacaatgggaagtatttgtgtacctaaacataactaaacatagaaaagatcttccctgcct

SEQ ID NO: 476280 - DNA, 1289 bp, Homo sapiens
accatctcctttttatagatgaggaaactgaggtgcagaaatattaggtaatttgcccataatgctagtggttgccttggacaacccattcaaggaagatcacttagtccaacttaatgaaatctatatcttttgtatactgacggaaacactggcagcacatattgaggccatgtttttggatcacaacaatgcaagtttgagtagatgtgataagagtgagaactctgaccaaatcttcacagatggctccagtagagctgctggtgacccaccttgctttcagggactgggaagtccaagatcaaggtgcttgctgatcctgggtctagtgaggggccacttcctggtttacagagggcctgtcttcttgtatcctcataaggcagagagcagagatagaagctcttatcaaccataccaccctaaatgcagccgatttcttctgatctcagaagctaagcagggtctctgggaagtaggtgtggcatggacaatggcaggacaaccctctggttcccatgtggtccatggtggtgttggcagtggctgtgatggactgagcatttgtactcttttgtcttgtgttggtatcagtgtgatagtggccctttgtgctgccttgtcaggtcctagggttctatcgactataatttccagaaaagcagagttttggtatcctgcttactgtgccaaaactgtgacggccaaaggaaaacttccccttcgtcctctgaaggagataagagcagccccagctgacagccagcaagcaaacgagaacctcagtcttacaaccacaaatacagttcaccctcgaataacacagcttgaactggccaatgaggaagaggacatagaagcagtagtgccagaaagcaaattgacattagaaaatccatcagaagggttctgattattcaggactgcttttgacttcttttatgacatggacctttctatgatatgggcactgaaacgaaagcaagctgtagaaggattggtactacatagaaactcagagaaataaggcaaaaaattcagacagaaattaccatgtattccccctactcaacatgatgatgatgaggatgaagacctttatgacagtccattctcacttaattaatagtaaatatattttctcttccttataattttcttaatatcattttcttttctttagcttaccttattttaagaaaactgtatataatacatataatatacaaattccatattaatcagctatctatgttatcagtaaggctttcagtcaagagtagtct

SEQ ID NO: 476281 - DNA, 706 bp, Homo sapiens
aagcagagggtccagacaggaaactgccacagtagtccaggtgggaggagaatataccatgacaaaaagctagttatgactcaaaacaggattaaaagtttgaccaactactggcaaggaagaaacgtggagaggatggacatccttttacagatgggactattggcagccttcccaaggtgtagcctggaagatggtcaatttcagggagaagcttttcatccaacacagcccctgagcagtggatatcagggaataaagccaggttctatgtggatgagcctgagaggagcctcagtgtcctctgcatccccgggaggtgtgggggagcatcagaaagagagggttgtgggcaggggtgctgtgatagaaatctgcatgaatgggaaagacccagagcagggaatactcatgagtagaggccacagtgagacctgcaacctcagcagtgccacgcaattggtagaaatttgttacagcagccttaggaaacaaataagctaagtttttggctatttgaataaagctgttctaatattcatgcagacatttgtgtgggcataaaagtcctttgttgaaacctatatcgcaaatgtattctttaatcccgtaactagactttttattttttattcatgtattttcaagagaaaaatttctaaatcttggtgaggcccaacttatcaatatttattttgtgttttcc

SEQ ID NO: 476282 - DNA, 576 bp, Homo sapiens
accacaggtagcagtagggaaatgggctcccctgtggccccgggcaggtccaaaaatgccatccacgagccaaggtctggagcaccagaagcttgcttgcagaaggggtctctccacatagttgtcacagctggaaatgatgtgctgggccatacctggagacagcacagctctgagcctcacccacagcctgtggactgggtccttcccttcaaggcagcagattcttccctggcccagagtgtgtttagagatgtcatctgggagataggtcctggaatgggagcctcaggactctgcctgctgccttcttctactgtgtctgagctggtatccaagtttcaagacaaagtcctcttcactctcctctctcctcttctcaagcagagggaagcagtctctcctagagttgtgatggtggtagaaggggagttaagtcagggcaggaagtttgaataagacaggatataaaggtgaggggttaggaggaggaggagttggagatggaagggagaagacctccatagtctttttaaattcagaaatagtgtcagatatccttttgtttacctcctg

SEQ ID NO: 476283 - DNA, 1298 bp, Homo sapiens
ttgtgatcgattgagcaagcagcggaggcttgttgaatggctttgacccaaatgctgacagtgacatggataataaagtccaggctgaggtggtctcaaatggagatgaggagtttgttgggagctggacatgtggcattttgcccctgccctagagatctgtggaactatgaacttgggaaacacgatttagggtatctggtagaagaaatttctaagtggcaaagtgttcaagaggaagctgagcctgaaagttcgaaacgtttgcagcccgacaatgcagtagaaaagaaaaacccattttctggggagaaattcaagctggctgcagaaatttgcataagtaacgagaagccaaatgctaatgacccagacaagtcctggtccaggtccagggcccctctgctgtgtgcaacctctggacttggtgctccatgtcccagccattccagcccatggctaaaaggggccaagggcagtgtgaaagggaaatgtggggttggagcccccatacagagttcccactgggcactgcctggtggatatgtgagaagagggccattgtcctccagaccacagaatggtagatccactgacagcttgcaccaggcatctggaaaagctgcagatactcaacaccagtccatgaaagcagccaggagcaggcctgtaccctgcaaagccacagaggcggagctgcccaaggccatgggagccaacctcttgcatcagtatggcctggatatgaaacatggagagtcagccatgcctggccttctccttggtacttatccaaataagttgaaaacctatatctacacaaaacctgcacattgatatttatagcagttttatttataattgctaaaacttggaagccaccaagttgtccttcagtaggtgaacagataaattctgtggtacatcagcaatggaatgtggtacatccagcaatgggatattattcagcactaaaaagaaatgaggtatgaaatcatgaaaagacatggacaagcttaaatgcatattagtaagtgacataaggcaataagaaaaggctacatactgtgtgattccaactgtgtaacattctggaaaaggtaaaactatggagacagtaaaagtagcagtggtcgtaaggattaagataatgtaaagcattttgtaaactgaaaagtaaatgaaataccatccccatagtgttttgggcttaagagtctgaggctggataactctttctgtattttcctgtgcttcataaaattttggggtggaaggttaaatggtatttaagaaat

SEQ ID NO: 476284 - DNA, 708 bp, Homo sapiens
tatcatgacccaagagtcacacagatctgtgggagaaacatggggcggctgctgggcagaggcgctcctcacatcccagatggggcggcggggcagaggcgctccccacatctcagacgatgggcggccgggcagagaccctcctcacttcctagacaggatggcggccggaaagaggcccttttggcattggtttttccttatcttcgtggtcttatctacctatggtctttgatgttggtaaccttcggatggggtttctgtgtgcacatcctttttgttggtattgatgctactccttcctatctgttacttttccttcaaaaagtcaggctcctctgctgcaggagtttcctggaggtccactccagaccctgtttgcctgggtatcaccagcagaggctgcagaacagcaaagattgctgcctgtaccttcctctggaagctttgtccctgaggggcacttgccagatgccagccagagctctcctgtatgaggtgtctctcgacccctgctgggaggtgtttcccagtcaggaggcatggcagcgagaattttaagccagtggatcttagcttgctgggctctttgggggtggggtccactgaactagaccacttggctccctggctttagccctctttccaggggaatttaattgactggctgtggtaagaaaagatgtttatcagtggggtgagggggcc

SEQ ID NO: 476285 - DNA, 1097 bp, Homo sapiens
aaaactggaagcgttccctttgaaaacgggcacaagacagggatgacctctctcaccactcctattcatattcctggcctggaagttctggccagggcaatcaggcaggagaaggaaataaagggtattcaattaggaaaagaggaagtcaaattgtccctgtttgcagatgacatgattgtatatctagaaaaccccattgtctcagtccaaaatctccttaatctgataggcaacttcagcaaagtctcaggatacaaaatcaatgtgcaaaaatcacaagcattcctatacaccaataacagacaaacagacagccaaatcatgagtgaactcccattcacagttgcttcaaagagaataaaatacctaggaatccaacttacaagggatgtgaaggacctcttcaaggagaactacaaaccactgctcaatgaaataaaagaggagacaacaaatggaagaacattccatgctcatgggtaggaagaatcaatattgtaaaaatgtccatactgcccaaggtaatttatagattcaatgccatccccatcaagctaccaatgactttcttcacacaattggaaaaagctactttaaagttcatatggaagtaaaaaagagcccacattgccaagtcaatcctaagccaaaagaacaaagctggaggcatcacgctacctgacttcaaactatactacaaggctacagtaaccaaaacagcatggtactgataaccaaaacagagatataaaccaatggaacagaacagagccctgagaaataatgccacatatctacaactatctgatctttgacaaacctgacaaaaacaagaaatgagagtcttaagatttttcttttgatctattgacagcttttcacaatttagtacaattgaagaaactggttattttaccaaggctttgactggaatggtgggctttcctttgaagattcaaacttgacttattgggccaataaagcccttggaaaaactggcctacatattttgcgtacagggtccctgtacttactacaggtcagtccctatacagggtttctgacctgtgattgaattcccttcagcatttctt

SEQ ID NO: 476286 - DNA, 483 bp, Homo sapiens
acagcatcatagcgcctctccccacctcccaacaggccccggagtgtgatgttcccctccctgtgtccatgtgttttcattgttcagctcccacttatgagaagttcattttgccaagatttaggatgtgcccatgacacagactcaggaggtcctgaagacatgtgcccaagttggttggggcacagcttggttttacacattttagggagacatgagacatcaatcaatacatgtagatgtacattggttcagtctggaaaggagataaagaaaaagattaaaagaatgatacggggaaagcatatggccactggtcatttgcagcagcacaagcaattccagatagttgttcagcaatttggggaggatcatcagttacctctggtgcatgactgtgaagcttttttctcaataacgtgcacaggtgcagtctatgctaaacagattagtcagtgcctggtgactctgacataggccaaa

SEQ ID NO: 476287 - DNA, 696 bp, Homo sapiens
tgcctaaaaccatttggtagtaaacaccatctgtaaacaactcaccatgttgaaacatgacttgagagtaggtgatattgcccagggagagtcagagggaaaagagaaaaggttgcagaacataccacaagaaagccccatacataaggtgtggataaaggaagaaccacaaaatagaagtgaagagcacatcaccagaaaggagataaatttccaggactcctttcatggctgcaaatctgtttatttcaccctgacaatggatgattttggctctacactgtattatatgggtctcctctactactcctccacaccaagatggtgtcaaggtgcagaaagaagcttgggtaccctttcagcattggtgcagcttggtggggagacatctgatgttcctctgttcctggtgctggcatttgagtccctgctggcctctatggaaatgtcactcagcctgcctgaacacagggcatcctgagtcatggctgtttaagactggctttttggaatgccttatttagaatagcaatcaaagcaataaacacttaaattgcattttatagttacacatattcttagaagtactccatgacaaatcattgatatggttaatataatcactgagttactttaatagttacttttaatggttactttaatagttacttaaagtatttaccataattaaactgc

SEQ ID NO: 476288 - DNA, 657 bp, Homo sapiens
cagtgtgcttgagtcaccatgtttacagaatctgaaagacaaagtttgcctgctagcagtcaggcccctctgctgcaagtgtgctgaagtttgctggaggtccactccagcccctgtttgcctgtgtatcaccagcagaagctgcagaacagcaaagattgctgccggtttgttcttctcctctgctgggaggggtctcccagtcaagaggcatgggggtcagggacccacttgaggaggcagtctgtcctttagcagaactcaagcattgtgctgggagatcctctgctgtcttcagagctggcaggcaagaacgttgtagtctgctgaagctgcactcacagctgccccttcccccaggtgctctgtcccagggagatgggagttttatctataagcctctgactggggctgctgcctttctttcagagatgccctgcccagagatgaggaatctagagagttttgtccttgaaacccagggccccggtggtgtagctactggagggaatctcctggtctgcagttgtggagatcatgggaaaagcgtagtatctgggccggaatgcaccattcctcacggcacagttcctcacagcttcccttggctaagggagggagtttcctgaccccttgcacttcccaggtgaggtgaca

SEQ ID NO: 476289 - DNA, 592 bp, Homo sapiens
ctcctggggtgaactgagagttcctcttattatgatgccccggtattttctagctacctctctcttctccccgaatccctgcaaagaaagttctaaggaaggaacttgtggaccccacaactgcattctggagcagaggtttcctagagctgacagttgtgaggacagcttcatgggacataatgatgggtgctgtggtgagccccacccagacggaccggagtcggttcattctcctttaacctcatcatggtcagatcctattcaatggccatcaggactgccattgcctgagcaattggtcttgagaaaagaacttcagctccctggacttcgtttcctcctcaataaaatgccatcactacccagttcagaggctctgacaacagcatccacagcagatacttccccaaagttcctgaaggagaagctctttctttgcaggtgtttcagattctctctctctctgtggtgaagcccaaggttttgcgcaccctcccctctggactcgaagtatatcgctatcttctgctgacactgaacatctcttcaaaaggatcaatgggcaaagtaattgttcagaataaagacc

SEQ ID NO: 476290 - DNA, 801 bp, Homo sapiens
ctgcagtcacaggccaagcacatcacttccttgccagcctcagctcccctccccgcactgtgcaggctgccctctttttttctgaatggattgagccttctcacctatcatctcctctgagcagtgcttccagcctgctcaagccaatgtggagttgctccctccttcctctatgctccagtgcactccaaatctactcgtattggaggataatgattcattgttggctgcctcctcaactgggctacagaacttacagcaaagactgagtctttctcctatttgtgtctcggacgtcagaccggtgcctgccatgtgtgtgcagcaggtagctgaagggaactgctgtgatgattgtagaagaaaccgtgagggaactgctgcgtcaaggctgtggtttggacaattcaagccaaaggccagatgcagaacttggctaggacttcgaggggttcacagctccagtaagagcaggggccctgtgtacaagggaggaccaagagaacaggtctcaaaccaccagcctcaggcttcagttgcagatactggcagagtccccccaggtagccactatacagacttctgaactaatcatccttttgcttttcaatataaatttttcatatatacagatacacacataagtgtgtcctggaagcatggattggggcatctggcaggacagtggttgggggtggtcagctcttctacgctcactgaagctcatctccacattagcctgcctgaatctcttatcatgtcactgtcttcacagcatcttcagtttctcctgtggccccc

SEQ ID NO: 476291 - DNA, 1393 bp, Homo sapiens
gaaaaagaagaacaaggaaccggaaggttatgccatatttcagttcgactgtggcaccctcgccataagcatctgctgtgagagctgattgtccacagtgggcctgataaagtgacagtggaatatccataagaatggtccaggaggctgttcaagctaaggaatcagaaccattctgctcttcccatttggaaaagagctttcaggcaaatgctttgaagttccacctgcattgtaaagtaagacagggatcagcacagtcaaatggagcagaaatgccaaagagaaagaatgcgcaaatgaatcttgattatctgatttgtgtcaagtaccattcaagagacttgcaaggaggggtaaagaacatgtgcaaagatttatcagaccttggagccttcctaggagtaaaagcttggcagggggtatccgacggcccgagtcttgatcacttgccatttggaatggaagcccataataaaaatgctgccttccagagactgcagggaccttacccatgtgaccagaatgctgtgcttcctcattagcctattaattaattgcatagaatttgatgcttggacagtacttgaaggtttgctatttttggaagctctacacatcttcctttcagtgtcatctacccttttcaacagcatccatgtctaacagtaacaagcaaaagccaattcaaagatagatctttggggcaccctctggtggctgaaaagagtcatgaaatcagtgcccatgtgtatcaaaaggccagtaatctttgcgacttattttaaagggccatcaccaacttttccatacaacattgaaaatgtagccagatcaggaatgtgggaaggactgaaaagaatttggaaccacaagaactggacttgagtcagagctctcatctattagctatgtgaacctgcatttggttggcaggtcagtttccacagagctgacgccgaatctggaatttctcactggagataagaggcagtgtcaaaactagaggagtatatgattccatttatctgatatgcccagaaaaggggcatttctgacggagtaagactattaaagcagccaactagatgcaattccatcaaaatgaccattttgaaatgtaaaaccaatgttttatttattacttttctcagtaacaggtaactcagtgtggtttgagaactagatgagattaagaagtgcactgatgagagaatgtctattttttacactgtttactaacagaaaatgtgaaagtgaggatttataaaagtaccagaagaaaactcagatgaatatctctataaactaagggtagagagaaactggtaaggagtaacatctaaaccagaatctctaaaagagacaagagatggatttaatggattttttt

SEQ ID NO: 476292 - DNA, 661 bp, Homo sapiens
cacacgcattaggtatttgtcctaatgctctccctccccttgtaccccaccccccaaaaggccccagcccctcttccacaagtctgctgcagtttgctagaggtccactccagaccctgtttgcctggggtatcaccagtggagggtgcagaacagcaaagattgctgcctgctccttcctctggaagctttgtcccagaggggcaccagcctgatgccagcagagctctcctacatgaagtgtctgctgaaccctgctgggtggtctctctcagtcaggaggcacagggagatgccctgcccagtgaagaggaatctagagaaggtatctggccacagccaattcgccacactgtggtggattccacccagtccaaacctcctggcctccttagcactgtcagaggaaaaccgcctactcaagcctcagtaacgggggacactcctccccctacaagctcgatcatcccaagtcgacttcagaatggtgtgctggcagcaagaatttcaagccagtggttcttggcttgctagactccatgggagaacagagaactctttccaaaacagtaaaaactcatatgctggttgggttttttctcacttgataagattagcattagattgtgccttggaggagggtcattttaaatttgggaag

SEQ ID NO: 476293 - DNA, 643 bp, Homo sapiens
gagttcttggtgatggttccactctgctccagacaggtgctccaatctcattcaacaaaaattattcggtttaatggactcacagttccacgtggctgggaaggcctcacaatcatggtggaaggcgaaaggcatgtcttacctggtggcagccaagagagaatgagagccaagcaaaaggggtttccccttataaaaccatcagatctcatgagacttactcactaccacgagtacagtatgggggaaaccactcccatgattcaattatctctcaccgggtccctcccacaacacatgggaattatgggagctacaattcaagatgagactggggtgtggacacagccaaaccatatcaccctccctcctcctgatgcaaaacctcggtgtggttctccaagacagaaaggtgaggaaagattagagtatatttttagtttctatggcctgcctcgaggagaaaaaggagcaggtgaaaggaaggcaggacaggaaggaggaagaggaaaagaggtggagaactgaaagctgagctctttttcttaagtgaaaaaacatgttttgaaaaaggaagtattcctttttaagtgtgaatacaaccagtcatgaggcagaggtgagagagaactgcatgaactgc

SEQ ID NO: 476294 - DNA, 603 bp, Homo sapiens
ctcgctgacaccttaattttattcctgtgagaccctgaacaaggaacctagctgtgtcatgtctggacttctaacctgcgggaatttcctcatcctaataagcctgggggcgctatgggagactggggcttatttcatccctacagtttcgaccatagaagacagccgcacccaagggggccgtttcagaggcctacccttagggatgcattctctttctcagggatgttccttgctgagaaaaagaattcagcgatatttctcccatttgcttttgaaagaagagaaatatggctctgttctgcccagctcactggcggtaactgaaaccttggaaagcaaaaccacagataaggggggactgagaactatagttgtatggtatgagcttcaaagaagcatgattaggggtgtcagtggctgcagccatactggggcggtgtggacccagagaacagcaaggggactggcagccaactacactcccctctgccagagagacaggaagtaaaaccttcccctcccttctgcagctccacttagcatttaggcaaggaaaaatgtactgatacggagcaggaccccttttgaaatgggggtctt

SEQ ID NO: 476295 - DNA, 607 bp, Homo sapiens
gtcttttctctctgatttaggcttgaccaaagctaacgccagacttctatgctaaaagcaatatgagctacacactgagaatacaaattattgtaattctttcaactagatgttcaaacacagattttttgatgactaaaatctgttttttaggtgcatatattttatttttcagcgtaattttacttcttagttcaaaacagcttgaacacacttactatatggattcccctaatatgttcacctatcatggaagcctgtctatatacagtaattggaaagagagagaaattcatgcatttgccttttttgctaccctttttatttactttttaaatttcaacttaattttagatgccaggtgtatatatgcaggtttattagatgggtgtattgcaaccagatgtacagatgaatctaacattgtagcatgtttaatgcagctgaccagcgcctctcactgtgtgacattacagaaggagtgacataccctattctctctgattgtgctctaggtttaacacagctgttatttcctgctagacagatttcctatttcttaatagcacattgtgcctttctttctagaatttttaccttataatac

SEQ ID NO: 476296 - DNA, 896 bp, Homo sapiens
gcatgactataccatagtgaaatttaggggacacattcaacccatagcagtatgtataccagttgcttttgtgcctactaccaggcagttaggaagatgggcttgtattgtgggagaaggaggacaaacttggaaactatgagggctaccttggaacccacaagtgcaaactggaagcaacattgcctctcattacctccaagcatcaaatgtgatgaaatagataaatcagtggaatacgcagccactacacaagaggagtttatttctttacccattcaatctgggctgtgtggtgtaaggcctgaaagtaacatgcaattaattaagtggtttcttgatatctttgagtctcacatggacccagcaccctaccacgagttccccaatctttgccagatataccttccaccaaataggcaagcctctcatctaaacagttcctttatcagccagaccaggttcactctacctggttctcaacctaatgggcttcaccttccttctaacttacaaaattactcaaacaagccagttacattctcccatgggaaccagaagctttgctggctgatctgggccatggctgctactctttacaacaccttccttggtgtccgtgaggggcccggaccctaagccggactgacaagcagaatatctgtgtcaatattattttgcccaaatataggctaatgtaagtgctctgagcacatttaagctagactaggctaagctataaagttcagtaggttaggtatattaaattcatttttgacttatgatattttccatttacagtgagttgatgaggacataatgataagtcaaggagcatctgcagttggagaaatgttatcctgtatttgaaagaatagaatgtatgcttggaaaat

SEQ ID NO: 476297 - DNA, 3052 bp, Homo sapiens
cttccaacactgtgttgaataggagtggtgggtttttggtgtggatgtcctttctgtttgttagttttccttctaacagacaagaccctcagttgcaggtctgttggagtttgctagaggtccactccagaccctgtttgcctgggtatcaacagcggtggctgcagaagagtggtggctgtagaacagcggatattggtgaactgcaaatgctgctgcctgatcgttcctctggaagttttgtctcagaggagtacctggctgtatctccagctgcctgctgggagaaccactactctcttcaaagctgtcagacagggacatttaagtctgcagaggttactgctgtctttttttgtttgtctgtgccctgccccaagaggtggagcctacagaggcaggaaggcctccttgagctgtggtgggctccacccagtttgagcttcccggctgctttgtttacctaatcaagcctgggcgatgcattattcatataacattgacacaagataatttttaattcatttctacggatttcatcacaccttatctcatgaatgaatcatttttaatgtaccaatttccaaatcgttggctatttttccttcaatgttgtgttacatgaaatgtggtaatgaacatcaccatccatcaattttttgtgctagattatttctttagacatatttttataggtaaaactacagggccaaaaactttaaatgctttgaacttcttgaaacacaatacaaatttaatttatataaaattatatattcatattgtaagggttaatatctgagatgtatcacttcatattttctacaactttgattattacaatttttaaaacttctaaaatacttcactgatcttttcaataatattttgtcaactactagtgacatttcacatgctttctggtgttgctggtgatcttttatctccttacgtaaatccttatgcattttctgccattttcatttgagtttcactcttatgcttttttatttaaaaaaatttatatattagtgaaaataatcttctttcttatctactacaaatatttccaagtctgtgatttatatcaaaatgtatactttatttttggtgcaacaatgtttacatatttaaatatattagttatatttattctgttttcagctcaacaatttcctctgccttgaagcctttttccagcatacctcagcttacaatgatttttcatatgtgattgaattcactataagcattttcccttattcaatggttaattgcagactgcttttaaatgtttcacattttatacatattcacatttgtcattttatttatactttgattttaccactaaatattgaattttatttagtatataaattatttatattttattttattattatgtttcacccctttcacagtgaatagcacacgaccttgcccatgcagttatttagtaggaatttcttacagatttcttaattttttgcatatagtgaataaaggcaagcctacttcccaatattctgagtgtttttttcaataactggaaactaatttgttgtcttattgaacatacagattttcattttaatttgaacagttggctttgtatgtactatgttctcttctacaactttttgtttcttctggagatgcctatgttttttcttttttaaaaaatattttccttctttataaaatgtataagttttctcagtctctcccttgtatttgccattccacagaaaagcctttatttcctagaaaacttttcttttggatttttcttactttcttttccaaagtaaaataagtgtaattttttgttccttttacatggctactgtcctgggactttcctttgacattcacctaggttgaatccattaattatctgattacaaatctaaatcaggggtttccccatataaattattaataaaggttaaataggaagtacactttcaagtacttgtgtgcctgaaaattatctttatcttaatgcttgatggaaagtttgcctgaatatgaaattttaggtttaaattatgctccttataaatttcaaagtaataaaggaacagagaaataaaattatgcagctacttttttgtggggaatttggcagttatgataatggtgcaagacacagatcaatcagttaatgaccatgtagagggcaagtacaaagattcagagaaagaagcagacatttgacagccccatagagctcaagagaccaaaatgataaacttcagggattaggattctgatgagaagactgtaacagagaaatgagtacatcaatctgttaattttattcccaaaacattggctaaattcttaaggattatgaatccttattattgattttctcagcagctccataatgccttcaaacaaatgcatttttatctggattgtctacttctattttgatctggatttttttaaaaacttgttttggcagcagcattgattttttgcaaactactctgtcatacttgaaagtggtaccattgagatcatagacttttttatattggttacagatctactagattctcatgttgtttacagagatttttttacattgattcttggtagttatccaaacatataataataactcataatcatgcctctctcttaacaactgtaatgcatctaatcctttctgttgtccaatttcattggctaagccttttagccttatataaaatagcaatagtgatgataatcattcttgtttttttttttctgacaatagcaggaaagcctctagtgtatccctattaagtaaggtgcaaatttataggggatgaggaatacatacatacacatatgtgtacatgatgatatcatgcttaggaaacacttatcaaattctaatttattgactacttacaacatgaatatgttttgagtcctataacataatccttttgcatcaatgaagttaatgacatgacttctctacatagattaattaagatggtgctatagattgaattgtgttccccttgaatttatatattgaagttct

SEQ ID NO: 476298 - DNA, 1071 bp, Homo sapiens
aagaactaatgagagtttgtctatttctttctcccctcaagccacaagtaggagaaatggacccgaccaaaccccatggcttatggtccaaatattcctggaaatctctttcaggggtttggttttccagatgaaaatgtgccagcattacactatattctaaaacaactcacccttcacaaaaactgctcacgaatagctgcaaattctcaggcgggtttgtttggatatgtacaagctattattgatgtatctaaacttttgaaaagtcaacaaattgagctgaaagttggttacttcctgaagacttgctcacagttagccaaattgagaggtggagagtacagtcctccagattgtcaagtctgtccaggtcttccaatcctgactacaaagagttgggatccagctacaaagttagaggaaagagtttacaaaaggcaattctcacttctggcagaaaatccaagtttggcagtttaccaaaactactctaaccctaaaaagacttgcaggactccgtgaaacatattatactcatggttttgtttattgcagtaaactatcgcaagaacaaaaaaccaaacaccgcatattctcacttataggtgggaatggaacaatgagaacacatggacacaggaaggggaacatgacactctggggactgttgtggggttcggggggggggagggatagcactgggagatatacctaatgctagatgacgagttagtgggtgcagcgcaccagcatgtcacatgtatacatatgtaactaacctgcacattgtgcacatgtaccctaaaacttaaagtataataataataaaaaagacaggattgaatcacaaatccaaattctttcagaaaacttatcatcagttaaattactaataggaacaaaattacataatgtttaaagtggggaaaatgaaactttacttcggagaaacagggctgacaacagcttaactgtgcaatacatctcaatggatcactaagtgtcagacaaccagacattatgtggcccctactgacacagtgtcacttatgaagtagaattctctcc

SEQ ID NO: 476299 - DNA, 1699 bp, Homo sapiens
gccccgtgggctcaaggaaaactcagataaacaaaagtatatgcctattgttcatggtgattttgtggccggaattggttccttccagtgggttcttggtcttgccgacttcaagaatgaagccgcggaccctcgcagtgaatgttcggatgtgtccagagtttcctccttctggtgggttcgtggtcttgctgacttcaggagtgaagccacagaccttcgcaaagtgaaggtgcagaccttcgcggtgagtgttacagctcacaaaggtagtgtgggcctgaagagtgagcagcagcaagatttattgcaaagagtgaaagaacaaagcttccacagtgtggaagtggaccccagtgggttgccgctgctggcttgggtggccagcttttatttgcttatttggccccacccacatcctgctgattggtccattttacagagcactgataggtccatttttacagagtgctgattggtgcatttacaaacctttagctagacacagagtgctgatttgtgcgtttacaatcctttagctagacagaaaagttctccaagtccccacccaacccagaagcccagctggcttcacctctcaatttagttgactgttataatagtgttatcgtacaaatgttgatatatacccaatgtgaaaaaaggcccatagtgtgtgtttgtcttcaagacttaaaataattagtcatataaacactggaaattcaatttgtaacttttaatgaaggcctcataatcaaactttgctactagatgatggctattattttttcctagtgtgaaacacatggaaaagttaataggatacatagggcatcctactggaaagatagaataattactaaagggcctaaatgcttatataaatgtgatggtacttatgtgagtgacttaaaactgaggataaatgtatttgacttgcaaagaaaactcaaataaaaatttagattatcaggctttagagttaagctactccttaggtttgcattgcataaggctttaaaagggacaaacaaataatacttaaatagttaagaacttgaaaatgtaaaccataaagacataacaacaatttgtaaaaataatgtaagagtaaggaaaagttgaagtattgctaatcaagaatctgattcaactattcaccattggcataatataatcaaaggttatttattacccccaaggcaaataaagtactgacttaaaaaaatataattatgttattctgcagtaattctaaaaattgtttagctatgaagtttgctttgctatggacttcctggatatttagacagctgcaacttgcccagagaagggtagaaccagcaatagaaaaaattagaaaatagtattttctaaatactataaaatagtataagatagtattttctaaatactattttatagtaatgcatggaagagattgtaagaataaatacaaattgaaaataagaggcttaatcctccgttttgaaaataggaaagagactctccctcacccctcccttttcttaaaatgttacctttagaaaattcataagttctttttctttctcttagaaatgtatgtaaatcttttttaaaaccaaagaagcctctccacagtccaaaaatgtagtagtgatcactttgaaatatattcatcaagaaagataagcacccttattttccagttcct

SEQ ID NO: 476300 - DNA, 597 bp, Homo sapiens
gtttctgcagagcatgcagccccggctatgcctctcccactgcagctgggatcctctcagcggctgctccagacgcaccaccgctgccatcattttcttatgtttatatgcccattcatctgccaattgacacttaggttattttctatcttagctattgtgaacagcgctgcaacaaatatgggggagtgcagatatctctttgatacactgatttccttcattttagatatatacccagtagtgggattgcaggttcatatacttgactatcttgttgccttggtcagcacgtgggcagaactggcaccagggtccacaagggttgtctgggaacttgagttcattaaggctagtctgggacttgggtccactggggtgggcctggatcctaggtttatgaggacagacctggtgctggggtccactggagggggcctgtcaactgggttcctggtattgaggctggagcctgtgtcgatggggatgggcctggagcctgtttctacagggaaattcaaagaagggccattgtttaattgagaggtatactcaaaggatgctatctgactgaaagtctccatgaggcatcatttt

SEQ ID NO: 476301 - DNA, 611 bp, Homo sapiens
agagatcaacacattctgttttctttgcaacaggatagcccacaggctggaccagctgactagcccaaatgaccgaggtcgtggcctgctccatccctcaggcactctgtcccagggagaaattggaactctgtcaaccccctggaacacaggcagtgaaattgggggaaatttccagcagtaaagaaaacaagagaggatatatttcacttgcaaaaatattaaggaattcctgtgagatacaggacacaagagacctgaatgaaggaaggactcattcaaaactctcatcctgtgagagagtatctttgctggaaaaatggaaacaagtcaccatacttacaaaagataagcactgtggttctaaagaggacctgtttggaaaactctgtctctctgaaataaatggtaaaaaagaagagaagggagaaacacatagaaaatttctatttggtgttttcaaaaatagtcaaagcagcattgcatctgagaaattagggcagcaattataaagagagaataaatttagatcagtaaatatagtatgagtatgattaaatgacaactaatttaaaaatattatgagagacaatagcagaatattgaataat

SEQ ID NO: 476302 - DNA, 823 bp, Homo sapiens
ttctccagcatgtggatggcagattatgggacttcttgtatgtggtggaagtacagccgtgtgctgcttgcaatccatattattgcctctgccacttttccaaacattaataagcattttaatattttataagccaagttctgaattatggaaaataaatctgaacactattaatacccaatgcggcacattaaaaaagggggacagcatgatctattgtgcagaagcccttcttgatctccacactggaggaagcgaggtgggctctatgactgacttttcaagattgctcatgtccatggctgacaagtgggtattggctgttagctatggtccaggggcattcgttcttctccacgtatgtctcttcactggctgcttgggcttccttaaatcaagatatctgaaattcaagagtgagggtctggatagacaggaattggaagctcccagttccttaaactttgggccttaaagctagcatactgtcacttttgccagattattctgtaagaggtcttatagcaccatgaatctttccttcatagcccctttcacagctcatcattacacagatatttgcatgagttttttgtttattttctgtctccccatttgattatgtgaggaggtttggaatcttctttaatttttctcactgctatgtctcaaacatttagtgactaaaatataaagttgatcaataattttttataaataagtgaaatgcattcaacattttgctcatttacttgagagagaagccacatttgcatggtatttaattcatgttaggttctgactttggactgaattgagcagt

SEQ ID NO: 476303 - DNA, 569 bp, Homo sapiens
agcagtctcttcaggactgatgggaaaaccccagggagggctcacagtatgcttgatgtaatctcatttgtctacgtttgcattgtcgcctttgcttttgaaggcttacccaaaaaatctttccctggatcagtgtcctgtagtgtttccccagcgttttctcctagtagtttcatagtttcaggttttacatttaggtctttaagcctttacttttcatatggtgaaagatctagtttcattcttctacatatgaatattcagttttcccagcaccatttattagagagtgtttcttccccactgtatgttcttggaaactttgtcaaaaaggagttggctcccactgactcaaatgttaatctcatttggcaacaccctcacagacccacccagaaacaatattttgcatccttcaatacaatcaagttaacactcaatattaaccatcacaagtccacccttcgtcagttacactgatttcatcttgatagtccaggtcagtcaccccagccaacattgtaactccttagcctgttgacttaaagctgctattgtaagatgaccca

SEQ ID NO: 476304 - DNA, 669 bp, Homo sapiens
tctttggctgtttgtatgttggaatggtattgcctatactgtctttcagggtttttatagttttgggttttacatttaagtctttaatccatcttgagctaatttttgtatatgatataaggaaaaggggtccagtttcaattttctgcttatggctagccagttatctcagcacgtttatcaaacagggagttctttcctcattgcttgtttttgtcaactttgttgatgatcagatagttgatattattgatagacttataattttgaattctgaagctaagattcgttctttattcaactatgaacaatcacatatctttggtctaagcaaagtaacttttttagacttgagggagatcaatgataattcgccacctaagaaaggaagcaattatttttctaaagttagaattctctgatgatagtatatttttaacttttaaccgtatattaatagatgagcttcgtgtttggactttatagtacaaagaagaaacgcctcaatcctgaacccaaatactattacatgaagttaacaatacttaaatgctgatatgaagtcaataaatcttatgtcacatgataaaggaaaaggaaataaaatgaagataatgtcttagtacaagtgtatacaatcacaaacatgtttttaacaaaaggaggagg

SEQ ID NO: 476305 - DNA, 544 bp, Homo sapiens
tcgcctctaggtcctacctttcaatactgccacatccacattggaggatctttcgaagatggtttggctgccttggagatttggagatctgatgccacgatgaggactcacacacggggggctcccagtgtgtttttcatatatttgctttgctttgtgtcagcctacatcaccgacgagaacccagaagttatgattcccttcaccaatgccaactacgacagccatcccatgctgtacttctccagggcagaagtggcggagctgcagctcagggctgccagctcgcacgagcacattgcagcccgcctcacggaggctgtgcacacgatgctgtccagccccagaaacccctcccccatgcggatccaaagcagtccaggccccagaggaatgctccttgcgcaacccactctggagtgcagtggcgtgatcatagctcactgcagccttgatctccctggctcaggtgatcctcccagttcagcctccagacaccaccatgcctgactaatttttctattgttagtacagccaaagtctc

SEQ ID NO: 476306 - DNA, 522 bp, Homo sapiens
ctgagtgcagggccctgtgtgggaatgagatctcgaaaccaaggtggtgaaagtgcatctgatgggcatatctcctgtcccaagccctccatcatcggcaatgctggtgaaaaaagtctctcagaagatgcaaaaaagaagaagaaatcaaataggaaggaggatgatgtcatggcctcaggaactgtcaaacgacacctaaaaacatctggagaatgtgaacgaaaaactaagaaatccctggagttatccaaagaagacctcatccaactactcagtataatggaaggggagttgcaggctcttgggaagtccgtggctcttgcaaactctaatttctgcgtaatgctattacatcatggtgaactctggaaagtatttaagattcatgtggtttttatgtttatagtggtgctagataaggtttcagatcctagatatgcaaaatataaactcacacttctgaaatattaaagaaattagtcagatggctccaaagaaatgcattttgctttccattaa

SEQ ID NO: 476307 - DNA, 646 bp, Homo sapiens
cgccacactgacatccacaatggttgaactagtttacagtcccaccaacagttcaggaccctcagctgcaggtctgttggagtttactggaggtccactccagatcctgtttgcctgggtatcagcagcggtggctgcagaacagcggatattggtgaaccacaaatgctgctgcctgatcctctggaagttttgtctcagaggagtacccagctgtgaaagggaattccctgaccccttgcacttcctgggccaagtgacttttctaccaccacagttggagacaatggagcccaaatctctaaacattatccttcatcagtttcatttctttattgcctctatgacttatagcaggctgattcctaatgacgtccattacatagtcggaaaaaattcctctaaatacctgatcagtgctgtcattgctttcagataaaaaggatgtaaatccatttcaattaacaatccttaaaacaaagatcaaagcaaaccactgatttcagtggtttatgtgttcatcttctccactaaaatgtgagactcagaaacaagaactatttaattttgaaaatatttttacttagaaataaaaagtaaactctagttattgtttttaataaaatgattacttcttaacattctc

SEQ ID NO: 476308 - DNA, 955 bp, Homo sapiens
gagggagagtatgctctggtctttctcttcttttttttttttattatatttaagttctagggtacatgtgcacgacgtgcaggtttgttacatagctggggcagggcattggcaggagtggggcaatggtatttctacccatgcttgtactgatattggtgaaggtggagtactggtgggcacaggaataccagtatcggtgcatgcatttgccctagtggtggtggtgcagcaggatgtctgtgagtcagtgagcagctctccttgcccactcaagtgtccatggcagttgtggaatctcctgctactacaattctgcaggtctgtggcaagagcgggccagtccttacctgttcaactcaccccttctccactagtgtctgggagtcaagaatcaagtcctggttctcagcaaaaccagggttccatgcttccttccacttcacctcagtgtctgcatcctcccccattcactctcaatgccttccctctgaagatttgccgaaaatgtggcagtctacccaaaatcccggtctctcagtgggagatgttcctcctagtttgttgtgagcccttaaatgggacagaaactgtgcactcagggagcttggattttaaggcagtagcttgccgatgctaccagctgaataaagcccttccttctacaactcgatgtctgagaagttttgtctgcagctcgtcctgctacatttcttggttccctgaccgggaagtgagagaacagcagcataagtggctggcagaggcaaggaaagaccagcagagagaaaaagaggccatctataccaattctaagttagtttagactaaacaaggtcttattaatagcaaaggataattgacatctcaaacttacaaggttttcaacaaaagtgaagattgctaaaagttaacagtgtaacatgtattatggtaacttctaatcttgtggcct

SEQ ID NO: 476309 - DNA, 1523 bp, Homo sapiens
cagtgaacagcgactagggaagtaggctctgctctggcccagggaaggttacaaaatggtttccaagaggctaggcctggacttaggaatccgaagagcctgcttgttgccctaccccactgtggctgaacagttacctaaagtacaagacaaaatgtcctttacatttcctactgcttttctcaaacagaaggagtctttcaccataggcatgacagctgggaatgtgctgggtcacacctatagtcagcatgtctcagagcccaaagtccatggtatcctatctgggcatcacttctggttaatcagtgctgaagggctttttagtcaacaggtgataaatcctgcaaggactgggtcctttaaggcaccaggttcctttttggcccatggtatgtctagaaatgtcatccagaaactagggcctagcatgggggcctcacaaatcggcctggtgccttatcctgctgaggctgagctggtatccaagatgccaaaaaatggactaccaaaaaataccatttaaacatttagtgaattgcatttattgaaaatcaagcttgcaatggtgaaaacatcaaaatttaatccaataaaaacacaagagaaattgtatcaattaaatgacaacaactcaaaagtgcatgaaatttaaatttaaatttaaatttatgcacttttcaaattttacaatttctccttgtagcatattggcataagagaggaatctttttaatacagtttctatattcaactggataaatgtatactcatgattttttagcatctaaatttgacaaaagttaaaaggggcgtaaatagaaccaactaacttaactttgttttgttgaaaatatttgttgaataaaggggtaaaattaaaaacaatatctgttaaaatgtttagactaaagtatttaaatatttcaatttaaaaacctttgaaatgagtatactctctatttagtaagaattttctcagaactttccaggtaactaagaacctgcagagaaaaaattttctcaataaaaataatttccagagaagattcaaatataagaaaatgttcacatgttttaaccacagaatttaactttgaacacaatttcacacaattttattaaaaatagcaataaagccatactgtcataaaaactgcattctttggaaaaatacccatgacatgatatgatgaaaaaagactaatgccaattccatgctgttctggttactgcagctttgtagtaatatattgaagtctgattctatgatgcctccatcttcattgttttttgcacgggattgttttggctattcagggtcttttatggtttcacacaaattttaagggttttttgtttatttatgtgaaaaatatcattgttattttgataaggattgcattgaatctgtagattgttttggctagtatggtcatctttaacagtattaattattttgatccatgcatataggagatagaaaacctgaaaattaacatatctatagccaacttactttc

SEQ ID NO: 476310 - DNA, 639 bp, Homo sapiens
ctgtgtgtcatccagccgcctatatgaacctagtattctttcgggagaatattttaaccaagatcttaaaaggtacacataaattaagcttatgtgcaaaacaaagacagaaaaactgtggaaataaatatttaaaggaagaacttgacttcttctgtttgaaaaggagattaaaactatccacacaaagcatccgggagatctggcaaacatgccctggcactttccctacacaaaagacagagtcttacacaattcttccattcactcatgggctcatttctgttggccacccatgctccccgaagacagcttatggaactggattgcatcagcaaggcgtgatggatgagcagggacatcaccagggagggagtactctgcctttggcttggtttagtgtcagatgtgaaggaaagaggagcagtaaatttggaaactatgttggaagaaactaaaatttatttttaatctctcattttgttgaaaactggataatgctggttgggagacaaatacttttggtaaatgtttagacatcctgaaaagtggaggagcatctatttacttaccccttttcagaaaatgcctgtgaagtttaaaataataaatatgattttaaaatcttagtaaaagtaa

SEQ ID NO: 476311 - DNA, 1234 bp, Homo sapiens
ctaatactggaaatgacaccccatcaactttgtcatattttatttaacttgaagatggacagaaaatacaggaaggaagggaagggaaggatgaaaaatttcaaagctggtaaactgcagggtagggcatgtgctggagtgtcagctattcgctcaagatcaagctgccctgaaagagccactgcatcaatcctggcaatgtggatcaggggtgactgttctgtccactttcacataggtctggctaatgcttatggacataacaccctgatcaaggcagttgtaaaaactgggcaaaacagattggagataatggattttttgacagagttagatggtttcatacagatttttcaccaccagaatggtgaaatcagctgtgcatgtagaaactgtcatgtttacagtccactggatgaaaaacagtagcatataccacgtaaattatgagaaaacatctgaacttcatatttgcctaaaggtcggtggttggcacagtcaggaaaaagtttctcaattttttgctagtgttcacagtttgaactgcctctatggaaaataaattcagtccgcttagcctcataaatgcgttactgcttccatgttttctcctaaaatcgccacttccacaagtaaagaggaatttgaaaaacatatatatcagattatatcactccccttcttaaaacttccaatgacttcctatgtcaggtagatccaagtctacactgatgaccagacccaaggccctgtgtgacggggctcccctcttctgccaccatcctccccactgattgttgtgctccagttacactggtcttatttttattcagaccatgtcagcttattctcccatggctttgcctttcgcatcacttctgattagtgttggttccccaaagcattatgtagctggcaccttctagtcacttaaatttcagctcaaatgccatctccccagagatatccctgattgtccaatctaagctagagttctgtgtacttctgttctattttcctattttatgttctttgcagaacttactaccatatgacattcttttttttggtttacttactgattgtctgcctctacccactggattgtaagccccatgagcagcggagccccctctagcctgtttgacttcttcacagtgatatcccagtacctggaacagggttgggctgcagtaggtgtggtttgtcaaagatcagatggttgtagatatgc

SEQ ID NO: 476312 - DNA, 601 bp, Homo sapiens
tgaggagaaccagtagatagtcaggacctggaaaatattttagataaagctgttgtaagttaatacacaatatgcctggagcatttccttcaagggagacagggagccctcacagcttgtgctggactcatcaccttgtttggaagtatctttccctgttgtttcttgatgtgtgctttgtttggcttgagtgtgttcatctcatggctcctggccaacccttagagggttgcatgcagactatctacctgcattggctgtcgggtgagacgagctggctgtgggggaccagtgctcacttattaaagctgatcttgctctgtgtcttctctggcctcagaatctctaatgctaattctctgacaaacctccttttcgaaaagagtacaaagagtcaacagagcctcatagtgctagtcccacacccaacaactttaaagccactctcttagacctgcgaaagccaaagccaagtttgatcaaaggctctttcaaagttcagctccttaccaggcacttgtaaacatgtttaaacgccccgcttaaagtgtgtggtttgcatttggactgttagaatccagagctcttgacttcttccagc

SEQ ID NO: 476313 - DNA, 534 bp, Homo sapiens
aagaaacaaccttcgatagaaggacatttttatctaactggaagaacagaggccaaagacaggtctctggtgtacggtggcacactaatggaggcgaccagatcatggttggtcaggggctggctccggacacgctccagcatcttgaggcctgcagaagaagtgcccagggctggtgaagtagagcccattactggggcccttggcaggcctggactccaccagggacatcgcagggaggatgtcaccccagccaggccttccaacctgaataagggtgtggctgtgcacctcaatgcagtgaaggtatgtgtcaccatgccctgtgagcataagaggcgagaggagggtctatcaagcaccagcccttggggagtggggagaagaggggcaagtccaagcaactggttggtaaaggacttgaaaaaagtgaggaaggacctaggctctgtccttaaaataagtacccaaaacaacccgccccttgaaccaccttaggctgagtttgagaccaccctgggtagcatggcaaaa

SEQ ID NO: 476314 - DNA, 672 bp, Homo sapiens
actgctgggaattaggaatgattaataccattttacagtcttttgccaaccagttgcttggacttggccctattctgtatcaggtcggagcagagcatggacatgggaacgagtgctctcagcaagaagccgtggtggaccctgcctcaaaactttcatgcaccaatggtgtttcacatggaagaggaccaggaggagctcatcttcgcctccctgatggagtccaggcctgccaatgggccccagttatgggccctggttcattagccctgggcacttattttgcaggcctggagatgctggaacgtgtccgaagccagcctctgaccaacgatgacctggtcacctccattagtgtgccaccatacactggagacctgtctttggctcccaggataagtggaaccgtgtgtcttagcgttcctcagccttccccttaccaagtgattggttgttcgggtttccatttgagttcactgtatccgtaattaaggactgatctcccctgggaagtggggatgagaggagaaatcttggcttcacttttgggtcaatatttattttcccatagagaatgtcctctgaagccttaagatatgttctgtatgtggaactactctttattgtactgaaccaataattgaatatcagctatgtcattttcatttaaac

SEQ ID NO: 476315 - DNA, 560 bp, Homo sapiens
gaaagccgcctcgagcgcgctccgcggctgctggtcccagtatggtcgatgatgctggtgccgctgagtcccagcggggcaaacagactccggcccactccctggagcagctgcgtaggttaccacttccgccgccacagattcgcatccggccctggtggtttccggtgcaggaactgagagaccctttggtgttctacctagaggcatggctggcagacgagctctttggcccagaccgagccataattccagaaatggagtggacgagccaggccctgctgacagtggacatagttgactcagggaacctagtcgaaatcaccgttttcgggcggccccgtgtacagaatcgggtgaagagcatgctcctgtgcctggcatggtttcaccgagaacatcgtgcccgagtgttctaaagttcttctaaaattagtcaactattttaataaaatgattagcggttaaaagttgctaataagttattgtaaattcagctttatgtggtaattcccttattgtaagatacatgattattttaaactggagtgataattagc

SEQ ID NO: 476316 - DNA, 556 bp, Homo sapiens
tgatggtcaaaaaaatcatgaaagctatactcgactttcccctgaatttccaggagaagtatgaagtgggtaatgtgaactgtcagacccaaagagagggagttcttccagggatctatgtgactgaagtattaggtgtttcaaagaagaggtgcctgactcatctgaatttccatgaagaaggatatttctcagtatctgcctttatcttcgcgcagtacactggagggagcattcctaaaaaaatcggtccctgttctatggactatgatcccaatctcttagaagaagacgatgaactacactctcagggagatagcctgacggatcattctgtgaaaggaaaatcaactgtttggagaattggagaagctgaagattattcacaggacatatcttacttggaggaactggaggaacaccgattttctgtttggctatagaatgtgtactctgacttcagaaagttcatagtccaatgaggaatattaatgtttaaaaacatcaatgtgatctgatgatggtatttttaaaaattgctcgaagtgcaacatgc

SEQ ID NO: 476317 - DNA, 1316 bp, Homo sapiens
ggccgaataggaacagctccagtctacagctcccagagtgaatgacgcagaagacgggtgatttctgcatttccaactgaggtaccaggttcatctcactggggcttgttggacagtgggtgcaggacaatgggtgcagcccaccgagcgtgagccgaagcagggcaaggcatcgcctcacccaggaaatgcaaggggtcagggaattccctttcctaaccaagggaagctgtgacagacggcacctggaaaatcgggtcactcccaccctaacactgtgcttttccaatggtctcagcaaacggcacaccaggagattatatcctgcgcctggcttggagagtcccatgcccacggagcctcgctcattgctagcacagcagtctgagatagaactgcaaggaggcaccgagactggggcaggggtgcccgccattgctacggcttgagtaggtacacaaagcagcctggaagctcaaactgggtggagaccaccgcagctcaaggaggcctgcctgcctatgtagactccacctctgggggcagggcatagccgaacaaaaggcagcagaaacctctgtagacttaaatgtccctgtctgacagccttgaagagagtactggttctcccagcatggagtttgagatctgagaatggacagactgcctccccaagtgggtccctgacccctgagtagcctaactgggaggcaccccctagtaggggcagactgacacctcacacggccgggtacccctctgagacgaagcatccagaggaatgatcaggcagcaacatttgctgttcagcaatgttcgctgttctgcagcctccgctgctgatacccaggcaaacagggtctggagtggacctctagcaaactccaacagacctgcagctgaggatcctgactataaaaccacaaagatggggaaaaaccagagcagaaaagctgaaaattctaaaaatcagagtgcctctccctctccaaaggaatgcagctccttggcagcaacggaacaaagctggacggagaatgactttgacgagttgagagaagaaggcttcagattattaaacttctccgagctaaaggaggaagttcgaacccatggcaaaggagctaaaaaccatgaaaaaagattagacaaatggctaactggaataaccagtgtagagaagtccttaaatgacctgatggagctgaaaaccatggcacaagaactacgtgatgaatacacaagcttcagtagccaattcgatcaactggaagaaagggtataagtgattgaagatcaaattaatgaaatgaagc

SEQ ID NO: 476318 - DNA, 707 bp, Homo sapiens
actgattttccttgactcaggatgggccatttgcttttcatcacccgtgttctgctggttgtcccccatttgagtaacagacgtgagccaccatgcctggccagtaacagtcatttttgcaaggtgcaaatggaaaacaatagaacagaactgaactctcagtccttccttctcactgttgccgtatcccctcctggcctgctctgcctttgctcccccacttctgatgaaagtccgcgaggctctgcatcagacttttgtttcagttcccactggcctttcgtttgtaagcagacaattagcaaaaacgttaaacaccccatgctgtacattcccagaggaatttgcatatatgtaattttttttaagtatgaatgcaaagatttattagaaggatttttaaaagtcatacaactttttaacacttattttaggtttgtgggtacatgcgaaggtttgttacatagctaaacatacatcacaggagtttgttgtacagattatttcattacccagatattaattcatcacccaggtattaagcccagtatccaatagttaccttttttgctcctctccctcctcccaccctcctccctcaaatagacagcagtgtctgttgttttcttctttgtgtttgccaattaagtgattttcacatacttgaaattatagtagaatatggaccaacatattttatgaggcaa

SEQ ID NO: 476319 - DNA, 855 bp, Homo sapiens
agctccagtgagtttcaaggatgctcaatgcgatggcaggataccatgagggggttgctaaggaacacacaaatgataagcaaaggagccttaatgctcatgtggagaaagttttagtggtgtggatagaagatgaagccagccacaacattcccttaagccaaagcctaatccagagcaaggccctaagtcttcaattacatatacaggctcagagaggtgaggaagctgcagaagaaaattggaagctagcagagtttggtccagaggttttaaggaaagaagctgtctccataacagaaaagtgcaagaaagaagttctactgtgggtaaaatgctatcaaacagcactgcatgctacagagaaacctttagtgaaagagtcaatcaatgaggcaatgagattgccacagccatttcaaccttcagcaaccaccatcctgatcaatcagcagccatcaacatcaagaatggttttaagaagtttggtcaaacttgtcaagcctttgaaatggttctaaaactgtttttatggttgtaaaattatatttagtccaaataaaaccatatttatttaattttggagctgaaataatgagctttcaaaatgcaagccatccagaaatattccatcaagttttcaaaatttatactttgctcttctaattttattgtggttattttctgttcctttcttgcaccctttccatataatgagaatgtgaaaacacaagcaattctctatggaaaacagatccatcatcctgagctggaagtcttcatgaaagcaaaatttaaaaaaataggagttgtgttggtaggatttccccttaggctgtttcttttatctgtatt

SEQ ID NO: 476320 - DNA, 517 bp, Homo sapiens
aggccgaggaggcgcagagagcgagcgagtgctgctggggctgccagcatgctgtcacctctcaaaaggatccaaccgattaatatgcgggcatttgaggggcataatctccagagtcctgagtgcactgaaagggcctccagatgcctgggctatgcccttcggcaattatttaatagttgtgtgtctcagctgaactttcaatatgaggacagcagctctggatctgggagccactatatcaaggcggctactgagaggagcccatttcagctctctgagccccaagactctcctgggcatcatttgaaatctttttggaggcagccacactcccatggcccatgcactctgcaaaccagtgaagatgtgaagatggcaccatgcaaatgccaccaagatttactgcctgtgctctctggaggagtagccaccactgtaccacggcttgctcgaaccaaacctagggcagccgaggactactgctgacaagtagggagcagagctttaaggtggc

SEQ ID NO: 476321 - DNA, 754 bp, Homo sapiens
gagcgcagccctcagaggtttatgcaatttcaaaaaggtaaaatacctagtttggggaacactgctctctccttggagacctgctgggatactaaaatttcaggtgcttcaaaaatgcaggacacagagaggaatttgaaatgcatccagaaggaagcaatttatatttttctgcaacacttttataacagaaaggcaaagatgagaaggaacctctttgcagtaatcatctcagtcattaaaaaccttttatccaaagaagcagggacttattcaagaaatttacagcaatgtaacaactgtgggaatctccttggtcataaaaacctggatgaggaacttggtttttctgctatgacaccagtggacgtctcaacagccgttgaactgtggagttggagtgtggagaggggacctgttttgctggtacagattatagcagccttcttgattgggatgatgttgctgagccaagatcccaaaggcgaggaaaagacctgtacctttttagtgagagtaactgaaaagttgcatgaagaagagcatggatacaagggtgcagaattgggccattaacacaatttgtcacatttgccaaacacagaatgcattctgcagatataacttgatagattctctgctcattcccatattctgtgtttttcatgactctgttctaactggctcaaggaatttcccactgccagtccacgcacctgttcctttagttttaagtaagatgagataaatgaac

SEQ ID NO: 476322 - DNA, 791 bp, Homo sapiens
tcctggataagtccaggtatgatatgtttactacgtttgtgttttctcagagtacttttatttatagtacctcattttacaacagttttgtgagcatcttgaaggacttagaagcaagtcagcctctccagatcttggatctgatgacttcgttacatcttccagtgtcacatggggctcccgtacacaacttcccagcaaacctgggatgcaggagcccttgggctctggtgccaatggatttccagtactctctagggaaaatttatgaacggaattatcctcccctccaatttaccttttatctttggaatgccctcactattgatcaagtcctcaagatcattgtggaggtattcattcagcatgatgttttaagccctggaaaggtgtttgctcaaatgtcaccatcttcgtaagctctgatcagaccactgcatttaagattattacctctccctccacattccctattcccctccttactttatcactctccatagcacttatcttctaacatattcaatttgtttagtatttggtgctcttattagcttcttcagattttttaaacattccttgtcatgtgacaattatggattatttatatattttcctgttaccacaatgtagcataaatatcattttcactgtccacaaacttgagtgcacaaaaaacgtgactttaaaaacataagaaaagttactccatttcatttctaacttaagcccttattccactggcgacaggcactaaaacttagtcaatgagggataacttctccctgggg

SEQ ID NO: 476323 - DNA, 1190 bp, Homo sapiens
agtcatgaaggtgcacacatgcctatgttttggggaatttgtgcatacatgtaacaagaatgttatctgccaactacagcgcagaggagcgctttctcctgctgggtttctccgactggccttccctgcagccggtcctcttcgcccttgtcctcctgtgctacctcctgaccttgacgggcaactcggcgctggtgctgctggcggtgcgcgacccgcgcctgcacacgcccatgtactacttcctctgccacctggccttggtagacgcgggcttcactactagcgtggtgccgccgctgctggccaacctgcgcggaccagcgctctggctgccgcgcagccactgcacggcccagctgtgcgcatcgctggctctgggttcggccgaatgcgtcctcctggcggtgatggctctggaccgcgcggccgcagtgtgccgcccgctgcgctatgcggggctcgtctccccgcgcctatgtcgcacgctggccagcgcctcctggctaagcggcctcaccaactcggttgcgcaaaccgcgctcctggctgagcggccgctgtgcgcgccccgcctgctggaccacttcatctgtgagctgccggcgttgctcaagctggcctgcggaggcgacggagacactaccgagaaccagatgttcgccgcccgcgtggtcatcctgctgctgccgtttgccgtcatcctggcctcctacggtgccgtggcccgagctgtctgttgcatgcggttcagcggaggccggaggagggcggtgggcacgtgtgggtcccacctgacagccgtctgcctgttctacggctcggccatctacacctacctgcagcccgcgcagcgctacaaccaggcacggggcaagttcgtatcgctcttctacaccgtggtcacacctgctctcaacccgctcatctacaccctcaggaataagaaagtgaagggggcagcgaggaggctgctgcggagtctggggagaggccaggctgggcagtgagtagttggggaggggagaaagtattaagccagaacccaaggatggaaataccccttagtgagtcagtttagacttcaggctgttcatttttgtatgataatctgcaagatttgtcctaaggagtccaatgggggatatgttttcctcccgtgaggaaatgtttagttcttgagggaaaaa

SEQ ID NO: 476324 - DNA, 976 bp, Homo sapiens
gaaagtctgatgagttatgcccagtctccttcctcctcccgccggcatgaggtttggggccctgtggatgaaggaagttcatgggaggcaaacgtgcctgggcaagcaacagccgcagagattcagtccccacgggggccaggagtggataaagctagaaagagacaccacagaagagaagatgtttgaacagctgaagccaatcgaacctgtacagaagacgctcccatgggtgggcgaggtagctgccaccctgcaggaagccatgaagagagattgctggagggaggcacgggtgaagaagaagccagtcacctttgaggatgtggcagtgaatttcacccaggaagagtgggactgtctagatgccagccagagggtcctttaccaggatgttatgtcggaaacctttaagaatctaacatctgtggccagaatctttctgcataagccagagctaatcaccaagcttgagcaagaagaggaacagtggagagagtttgtccatctcccaaacacagaaggcctttcagcctgggtccgaaaaaaagaagaagaagaagaagaagaagaagaagaagaagaagaagaagaagaagaagaagaggaagaggaagaagaagaggaagaggaagaggaagaggaagaggaagagggagaggaagaagaagaagaagaagaagaaggagagaacaaaagtcgtatacagctgacccttgaacaatgcatgggttagaggtgctgaccccctcatacatttggaaatccatgaataacttttgactcccctaaaccttaactactaataaactactgttaaccagaagccttactgatcatatatacagttgactgacacatattttgtatgttgtatgtattatatactgtattcttacaataacatgagccagagaaaagaaaatgttattaagaaaattataaggaagagaaaatacactgacagtacaatacc

SEQ ID NO: 476325 - DNA, 2298 bp, Homo sapiens
cctgatttggaaggagaggttcccatgaggggatctatccgagtctgtgaaaggggatgcgaggatgatgtggaagaagcaacaccaaatctgatctgctcacaaggtgcacagaagaagctcctctttggagagagcagcctggggaacacaggtggactctacctagatatcacggagaggggcacatttcaaaaagactcacccccacaccctccaggcaggcccgttcgggccatcttcatggtcaggtcccgctggaggaggaggcacttggagactgtgatcatccaagccatgttcaaggattcctgccagaggacccaaaagcctcctgcaaacaccccaatcccccacagtgagaccactactcacaacctggagtgcagccagcctacccgaagtactttttactccctgaaatccctggcagccaaaagatctgtagagagaggcagtcccccgtagcaacagatcaataaaagatcccctccacagtgaaaaagaacatgtagatgactgtaacagagcctagatgaccaggcaaatcctgacaccgctgcctgcttctcatcctatagaaatcatgcagccctctgataagagtgggagaacaagagtttccttgttggcagatatggtgaaaatgctttgctatgtgtggattttcttttcacagttaaaactttgttttgattcagaaggataaagacactttttttgtgtccctatgagggaaaatttcaaaatccattgaggcctatagtggaaacaccaaatatcccacgattaaaaactacaaagaagctatgtctgaaaatgctttccaatgtgtgattttatctcacagagttaaacatttcttgtgattcagtaggctggaaactctccttttctggaatctaagaggggatattacagagcaaattgaggcctatagtaagaaactgactatcctgtgataaaaactggaaacaaactatcagtgaaatgctttgtgatgtctggatttatctcacaaagctaaatctttgttttaattcagcagtttagaaacactttcactgtaggatctgcaaagggacattttggagcccactgatgcctatagagaaaaatggaatatcccgtgatgaaaacttaatgcaagctatctgtcaaaaggctttgtgaggcatggaattatctcacagagccaactttttgttttgattcagcatgttggaaacatgtttttttgtagaatctaagatgagacattttgaagcacattgaggcctggagtttaaaaccaaatatcctgcgataaaaactagaaacaagctatctgtgaaaatgctttgtgatctgtgaaataatgtcacacagttaaacctttgttttaattcaacaatttggaaacactctttctgtagaatctacaaagggacatttcggagcgcatggaggtctatagtgaaaaacagaatatctcatgataaaaactaggagtaagctatgtgcgaaaatgctttaggatgtgtgggctcatctcaaagagttatacctttctgttgattcatcaggttgaaaacagtctttttgtagtatctaccaataaacttttcaaagcccattgaggcctacagtgaaaaacagaatatcctgcggaaaaaaactagaagtttgctatctgtgaacatgctttgtgatgtgtcgattcatcttacaaatttaaacctttcttttgattccataggttggaaacactctttttgttgaatctaaaaagaaaaaatgtcagagctcattggggcctatagtaaaacaaacaaataaacaaacacaaaaaacaaatattacacgatgaaaactaaaaacaagctatcagtgaaaatgttttgtgatgtgtggattcttctcacagagttaaactttttttatttagcattttggaaacactctttttgtagaatctttggagggacatttcggagccctttgaggcatacagtgaaaaactgaatatcccatgatagaaactagaaataaggtatcagtgaaaatggtttgtgatgtgttgattcatctcctagagttaaatctttgattcaacaggttgaaaacacttttattgtagaatctatgaagagcattttcaaagacctttgaggcccataatgaaaaatcaattatcctgtgataaaaactagaaagaagatatctgtccaaatgctttgcaatgtttggattcatctcacagagttaaaccactgttttaattcagcaatttggaaacactctttttgttgaatctac

SEQ ID NO: 476326 - DNA, 1566 bp, Homo sapiens
agggtcctacgcccacggagcctcgctcattgctagcacatcagtctgagatcaaactgcaaggtgacagtgaggctgggggaggggcgccctccattgttcaggcttgagtaggtaaacaaagtgggaagctcgaactgggaggagcccaccacagctcaaggaggccggcctgactctgtaggctccacctatgggggcagggcacagacaagcaaaagacagcaataacctctgcagacttaaatgtccctgtcccacagatatgaagagagtagtggttctcccagcatgcagcttgatgtctgagaatgggcagactgcctccttaagtgggtccctgactcctgaatagccaaactgggaggcaccccccagtaggggcggactgacacctcacacggctgggtactcctctgagacaaacttccgcaggaatgatcaggcagcagcatttgcagtacaccaatatccgctgttctgcagcctccactgctgatacccaggcaaacagggtctgaagtggacctccagcaaactcgaacagacctgcagctgagggtcctgatgtttagaaggaaaactaacaaacagaaaggacatccacaccaaaaccccatctgtacgtcaccatcatcaaagaccaaaagtagataaaaccacaaagatggggaaaaaacagagcagaaaaactggaaactctaaaaagcagagcaccactcctactccaaaggaatgcagttcctcaccagcaatggaacaaagctggacacagaatgactttgatgagtcgagagaagaaggcttcagaagatcaaactactctgagctacaggaggaaattcaaaccgaaggcaaaaaagttaaaaactttgaaaaacatttagacgaatgtgtaactagaataaccaatacagagacgtgcttaaaggagttgatggagctgaaagccaagacacgagaactatgtgaagaatgcaggactcaggagctgatcaaggcaggccaacattcagattcaggaaatacagagaatgccacaaagaacgccacaaagaatgcctcgagaagagtaactccaagacacataattgacagaatcaccaaagttgaaatgcaggaaaaaatgttcagggcagacagagagaaatgtcgggttaccctcaaagggaagcccatcagactaacagcggatctctcggcagaaactctacaagccagaaaagagtgggggccaatattcaacgttcttaaagaaaagaattttcaactcagaatttcatttccagccaaactaagcttcatacgtgaaggagaaataaaataccttactgacaagaaaatgctgagagattttatcaccaccaggcctgccctaaaagagctcctgaaggaagcactaaacatggaaaggaacaaccggtaccagccgctgcaaaattatgccaaaatgtaaagaccgtcaaggctaggaagaaactgaatcaactaacgagcaaataatcagctaacatcataatgacaggaccaaattcacacataactatattaactttgaatataaat

SEQ ID NO: 476327 - DNA, 520 bp, Homo sapiens
tcatagaagcagagagtagaatgatggctaccagagactgggaaaggaggggcagtaggaaaggaaggaatagggagttgttgatccaagagtacaaagtttcagttgtcccacctttctggactgaaccaatatacctcttatacatattggttgatgtctcacacatccctgaaacgtatacaatcaagctgtaccccaaccaccttgggcccaagtcatcaggacctcctgaggctgtgtcacaggatgcctgcgaggcccctgtctccattcactcacttattcccagggacttagaagtcttctccatgcacagattgtgctcagcacaggaagcacagtggagaactgagcaggctgactggtctgtgttcctggtctgctgggacccagagacaaagaaacggacaatgaccacaagcgtgaaaaggtatgactagggtcattagtctgtggtgttattcacaaggtcattgccttctttctgcgtttgaagcaagacctcacatggtattct

SEQ ID NO: 476328 - DNA, 535 bp, Homo sapiens
tgcctctgtgtccagttcctccacagtctgaatggccatgtttcctttccatggctgtagaatgaggtgcaaacactacagcacagtctgtttcctgctagactctgctcccaaatggtacacaaatggccaaagagcacacgagaagatgctcaacatcattagtcatttgacaaatgcagatcaaaactacaccgagttaaagaaggaagagctttatttggccgggagcttcggcaagacccacgtctccaacaaccgagctccccgagtgagcaattcctgtccctttcaagggctcacaactctaagggggagcttggataaagctgactccgtccctggcttcaaggcttgtgcaggaccccagcgtgggcagtcagggcattctacccccctggctgcagtggctggttcgggactgaatatgagacctaactcaggcaacgaggctcactcttgggcttttccaggaaaagccattccctttcgttagggttggctatctgatatcagcctgtgaaaggaaaataaa

SEQ ID NO: 476329 - DNA, 548 bp, Homo sapiens
aaactagggtttgaaggtattttctcaaagtagctaaggttatcagctggctgagatgaaatgctaatctcatccagaaacaccttctcaggttcacaaacacaaaatcatattacaatgcaacctgttttaaaaggttacatttttacccagataacgcacaatttgatagactatcattttgaaaaccaatgccagtggagagaaaacagttttttcactctatgcctgcttttctcaggttatctaaccttcctatttactgaaattttcaagagtgacatgggcagacgattgttaacagtatacaacaactttcaaattcccatcttcaatggactatcaaaaatcagaaagccaataaaagacgcaatgaagtcttcatctgatgctctgaacagggctttggctttggctttggaggagcgggtttagcatacaaccttgcggatcttctctgtggttcgtccttcaccttggctttatctcctttagcatccccttcagcctttgtcttgggcatggtggcggcgtcgacggcggcggga

SEQ ID NO: 476330 - DNA, 1089 bp, Homo sapiens
agagtgaacattcgtgatttttgtttttttgtggggtattttcggtggaatgagaggaagggaagtgctccaatgtgggaaatataacgccttgggaagacttaaaacaactttgaataagaacctgcttgagaaagatttgccttacaagctaaatgttacatttccactcaacagaaagctcggagaacctgcagaaaccatcttatttatggatgcagaagaactcactgtcacgagaagagcaaattgggaaatctgcccctttgatccagtcatctcccacgaggcccctcctccaacactggggatttcagctcaacatgagatttgggcagggatgaaaatccaaaccctaacaatgggcaaaaccaatttagactgttacaagtcaggatggtggctgttcttgggatgggttcccggaattgctggaactgggtgtgaggggctggtcatgtttcttgatctaggttctggttacatatgtgtgttcagtttgtgaaagtttatcaaattgtgcattactacctatgtagttttctgaatatatattatacttcaataaaatgttttaaaaatatgtatatcatatatcatttcatcttagaaacagaacacgttaataagtgactagtttttggaagaaattattatagcataagttttaaaaaaagatgttggggtggggtttttaactttccataatgctgtaaagtttgcaacactcacacagtcatagaacaaatagaactttgactttggtttcaaaatttatgcagctgcctccatatacttttgacagtttaatcacatatttaacagttacaaagcatgttttagacatcaagaggatacatggagatggtggtagggcttatatacccatggtcgtgtaaaacaggaaaaatgtcagcaaaaataaactattatgctggtctattgagtgactttgtcagctttataaaggaatgaatatatagtgttgaaggataatctttctgaattagtaagttattttttaaaaagcacatctaaatcaataccttattttagaagaaatgtaatgttaggcatactaacatgtat

SEQ ID NO: 476331 - DNA, 746 bp, Homo sapiens
gatcatgtaaatccagaaaacctgtttttaaaaattttcttctcccgcagccccagagtcaaagccggttgccgaccctgtcccgtcccgcagtagcctgcctcctctttcctttcaacatgatagatgtcactgtgtcctttgccaaggacttcctgggagatggagtggccacagccatcttcaagatagcggtagcacccaccgtccaggtcaagctgctgatgcaggtgcagcatgccagcaaacatatcaccgcagataagcaatacaagggcattatagactgcgtggctctcaacttcgccttcaaagataaatacaagcagatcttcctgggtggggtggacaagaggacccagttttggctctactttgcagggaatctgacatcaggctgtgccgctggggccacatccttgtgttttgtgtaccctcttgattttgcccatactcgtctagcagccgatgtgggtaaagctgaagcgaaagggaattccgaggcctcagtgactgcctggttaagatatgtaaatctaatgggattaagggcccgtaccaaggcttcaacgtgtctgtgcaggttattatcatctaccgagctgcctacttcggtatctatgacactagaaatggaatgcttccggatcccaagaacactcacattgtcatcagctggatgatcgcacagactgtcagggctgttgctggattggcttcctatccacttgacacagttcgccccc

SEQ ID NO: 476332 - DNA, 618 bp, Homo sapiens
gagagccagaccgtggggagcatgacggtggggagcatgagggcgaggatgctggaggcgcactgcctcctaccccctcttccacctgctcaccacgtagaggactcaagacacaggggcagcaaagagccactccctggccacggactctctcccctgcctgagcgatggaaacagagcagaactgtccatgcttctggggactctctggggcacgtgtctggcccagggagacctgagctcctcccgctgaggaccgtctccgagtccgtgcagaggaataagcgggactgtctccaaggagtcattctgccagaaaaatgtagtacacaaatacaggataatataacaaatgtaaaatttctcatttctagtgaattaaactttccagtaattttacatctcacctcattcttatgatgctcagtttgcttaattattggcaaacataatggtaaaatgtttgtactgtattagagctttactgttcgattattaagatatttatccagtatcttagagatgctggacttcaattttccttattttatctttttaaaataaaatatcatgcatgcttctgatttgttatagaaatattttgtgttgagtcttttc

SEQ ID NO: 476333 - DNA, 2999 bp, Homo sapiens
cacacccccaccaggggctgcattacaggggaacatgtccaggtttgttatacagataaactatgcaggtttgttgtacagattatttcatcacccaggtactaagcctagtatctattaagctggagagcaatttctctgccaccagcgctgacgatttgccttggcttggaaagcagcaagctcttattgtggctggccaggccaggggacccgtcaccaatggggctgcacagacagacatagaagataaagaagaaagggaaaaggggagaggagagaagaaaagcggggagaaattggggaatgggagaagatgctgggatgggagtaggcagttacggcgttttgtgctctggtgtgctgccccacaagcgagactgggaccacgtgattctgggggagatttgcaaaatacctgcccgactaagcacacaagggtgttagggcaaagatgccatggcagcattgtttataacagtgaaatgtggggaacatatttagtaagaaggcagtagttaaaattatgttgtttcttcccacggaacactatgcaaacattaaaataatgtagtagacctctacttatttctactaaaagatattcatgatgcatatttctaaactaagaaaagcagtttgcaaaactttacaaaacagcatgtctagtagggtcctcttttgtaaaaatatatacgtataactatatgaaagtgtacatagaaaaatctggaataatatacgctaaaatgttaactgatttttttttctgggtagtaggatttgagggaactttttacattcttctttatatattcctttccttattttgtggctttttaaatatagacttaattttttgaagcagctttgggttcatagcaaaattgagccgaaagtacagagaatgcaaacatatctccttcccccatcccccaacaggtgcagcctttccggctatcaccttcccgcaccaagagtgggtcatttgtacaccagtgaacccacatcatcatcacccagagaacagagtttacattagggttcactcttggtgttgtaaatgttaagggttttgacaaatatataataacctgtatccatcattatcatatcatatagagtacttacttgccctaaaaaatcctctgcattctgcttatttatccctctccctaacccctggcaaccacgcatcttttcaccatctccataattctgtcttttccagaatgtcatagagttggaatcacacagtgtgtagcctttttagatcagcttgttttaatgagcaatatgcatttaaggtttattcatgtcttttcatggcttgatagcttacttctttttaatgctactactattccattgtttgaacgtactacagtgtatttatccatttacccactgaaggatatcttggttgtttccaagttttggcaatgatgaataaagctgctgtaaagatctgtgtatagatttttatgtggatgtaagttttcaactcatgtggatggatatcaaggagctcaattgcttgattgtatggtgaagggtaagcttgggtttgtaggaaactgccaaactgttttccaaggtgactgccccattctgcattcccaccagcaatgaatgagagttcctgttgctctacatcctcaccagcatttggtgttatcagtgttttggactttcgccattttaataattgcttgacatttaaagataaacacataatttttttggaatgagaaaatcattagaggtattgtccttttgaaaataaaatccatcttatgtacagcctcaatgaggttatcaggaaaactctaaattcaaagttggtaatcagaactcttcctatggattcccccttccatactgtaagcttaaactcatttgcttgcttttctaaatcagtggttctcaaacttcagtgtgcattggaatcaccaggagagcttgtaaaaatgtagactgctgggctgcacccccagagtttctgattcagtaggtctggggtggggcctgagaacttgcatttctaacaagttcccaggtgaggctgatgctgctggtgtggaaccccacatgtcacaccttgagccatgctgttctagataaggaaaaaggtgcttcaaaaagttagaagtaatgatctcctttctaagttttccaaattttctagaacaaatgctcctttaaaaatatcatatttagaatattgtaaaagaattcctgaatttttatgagatcattttttctgaaaatagataacacatctatatgaatatatataaaatacattgtgggccctcaaatacctgtaaagtgaatttcagacaaagctagttttccatggtgcatcctgccacgtgccaactgatgttcggtgttattgacaatcactatctgcattgtgtgacattcttgtggtctgtctatttgataaattttaagcttaaagccattgttcaaaaagtcacactattgctgacattcaatggtaaagaatctcagtgaacccaaggagtgcacatgcttgtttaaagttttttaaaaagcactttcttctgttcactctgttggccctgtgtacacagccactaagtcattggcacccattccctcccacacctgccctcagagccccttgcatcccctgtgcagtcaattggagggtgctggacttcctggtcaatgcccaggctcttctcagtttcccttgagccccctcatcagtttcttgcactcccttaccctttctaaaggacttccctcgggctgggggagcagcagggagctcagctctttggagcccagcccctgcctcctgaggggctaccctgagctttacaccatagggctcctctgcagggtcagctggagatgctctctgtggggccttcactaggcctcctcctccttcccatcctgcctttgtcactcccttcctcatctgccctgggagtgctggtgtcataatcaataaatcacct

SEQ ID NO: 476334 - DNA, 778 bp, Homo sapiens
tcctggacgccgcgtgctgctgtccgccgccgaccggtgtcctcgcagagataacctggctgaactcaccgcccagcgctatgtcagttctccctcatgacaacccaaaacttgaccggatttgtgttctgcagagaggaaaaaaaaaaggtaaatgaattgcaaagagatgaaaaccagaaatacagtatctctttgaatttgagcacccaggaaaggtgtaaacctaccgccttcctttccaggaaactctcctgcttcccagcaaaggtgaggacggaggcagccatgggaacgatgcacccacagcccagggatgctggcagccctcaccagaggctggaagaggctcctccagagcctgtgctggacttcaggccacggccaccgaacaccagtgcagtagccaggatgggcctgtggctctggctgcagcctccagggacaccagctggagagaaggaagccacgcatggagagcggccaggctcaaaatatcttaaagaaaatggaactcggagtcagtcatctgttctcaacgtggtcatctcaaaaatatgagcacacggaagttttcttccttcttgtcagttttgagtccaatatcaatactgttgtcctgtgaaagattttaagatttaaatgttttttcatgtaatttcctgatgtcttgattgttgcttctattttgttcatcaaaaccaaacagagtggaggttgctctggggctggatggatggccagtcattaaaatcaatgccttattagtctgccttag

SEQ ID NO: 476335 - DNA, 990 bp, Homo sapiens
cagggccggagccaaccagtctacagggctgccctaacaaagcgaaagatttcagaagaggacgaattggatgtacctgacgacatcagcgtccgggttatgtcatctcagtctgtgcttgtgtcctgggtggatcctgttctggaaaaacagaagaaagttgttgcatcaagacagtacaccgtgcgctatcgagagaagggggaattggccaggtgggattataagcagatcgctaacaggcgtgtgctgattgagaacctgattccagacactgtgtatgaatttgcagtccgtatttcacagggtgaaagagatggcaaatggacccctaccacagctcctgaaaacttgaacgtctggccagtcaatggcaaacctacagttgtcgctgcatcttgggatgcgctaccagagactgaggggaaagtgaaagtttcctccttccaaccatctgccaaatcatttcagaatacattctttcatacgccccggctctcaaaccatttggagcaaagtccctcacctatcctggagacactacttctgccctggtggatggtctgcagcctggggaacgctatcttttcaaaatccgggccacaaacaggagaggcctgggacctcactccaaagccttcattgtcgctatgccaacaagtaagcattatgtgtctgtggctgtcttctctctctcttcattcctgctgtttgttttgtgttcctttgaatcatgctcttgggtttggaactgctcagcagatgatttttccaggctaagttgcatattgatttttaaaatatttttgtgtttcctttagaaattagtcttctcaaagattaaaatgttattgattattgataacagttactatttcagtattattaatgtattaattatataattaatctgacatcattatttaactttaggcttgtggtaacagggaaagaacatttttacaaatggtagtgtgacatttttcattg

SEQ ID NO: 476336 - DNA, 1089 bp, Homo sapiens
ctttttttttaaggttaagaatacaaagtgccttggacagcatctgggagagtcattcaataagtggtggcgttcctgaggcagacactaacacgggtctctggcatgcagctgccaggctgcgtttaccacatgcgctgacttctctcccggcagttccatgacgggaattgaaatgctttctattgaaagacacaaacacatggatccatcaaggagagctgggggtgtgtttctgagcttggcatcaaggctgatggagcctccgtccagcaggaagagaccgaatgctccttacgtgacgtacctaaataaagacccatcagccccgtgctctctgactgatgcactggatcacttccaagtggacagcctggatgaaatcatccccaatgacctgaagaagagtgacctgcctccccagcatgctccccgcaacatcaccgtggtggccgtggaaggttgccactcatttgtcattgtggactgggacaaagccaccccaggagatgtggtcacaggatcagatcctgcagtgagcgtgaccataagctcccgctgggccacacatttgtccctttttggagtcagccctgggcttgtgcctctgcctctttctctcctttcacgtctgttgggtgcttccagacaaatctgggtgcttctcagttccttatgtgggaataggaggtgatgaaaaaatgcccaaggatcttgagcctccttggcctctgagatgtttaagttcactctgccaaggacatatttgaagatacatcttgaaatttaagttcttatggaaagagaattgatattttctgtgaataattgcaaattttttttctgggcctctgagctgtgtaagaggaagaagtatggctgtggctgtgtgtgtctctgactgggaggtagcggtcgcattagaggtcagagtttgacattctctgccattattgtgctagtgcagttcgcacaattcaaaatttctagtgcttgtcttggtgttcccactattatatcttacaatgaaaaaatgtgtccaagaatatccaaagagcatcttctcttgtggaatttgtacagcagcgc

SEQ ID NO: 476337 - DNA, 499 bp, Homo sapiens
agagtacttggggtgaaggcgaatgtgcaggagtgggccccatcatgaaacccatgagcctaggagctagacggcactgtgtaggcactgtctgctggagtttgctgtttgcctgggtatcaccagagaaggctacagaacggcaaagattgctgcctattccttcctctggaagcttcatcccagaggggcacctgccagatgccagccagagttcttctatgccctgccttgagaagaggaatctagagaggcagtctggcctcagcgaccttgctgagctgtggtgggctctacccagttcaaacttcctggcgactttgtttacactctgcaattcaaacatgatggtgaattcaaagcagctttgtactctagaagctggtgtagaggttggcagaaggtccctaacagcactggttgctgcctttggactgctgtgtgagagaggggagaagtcctgtcttggttagcctgttatattttaaagtctttgggg

SEQ ID NO: 476338 - DNA, 597 bp, Homo sapiens
ggaggcctcacactaggtgtctgaatgtgaatttacaaaccaaggctccggtctcactgtaccaggtctgagccccagattctcaatgcgttgtgtaccaggtctgagccccagattctcaacgcatctgaacacccacgcattgtgtcagagaatttattctgcacactctgtggctgaaattcctgttcttccagtggaagtgatgtgcaccagctcctggaaggaccgcctcactgccggtgggaggcactccagcgcccccttttcctgctttggaggttgtgagggcactgggccattccagggtcatggtgccttccctcctttaaggtacatacagctgaaagcagctctcaagtgtgcttttaggaaatccaaccttgggcccaccttagaccttttgaattggaatactggaggaagtcaagataggcaagaagtggagtggctgagacgacctaggccaggcctgctggcagaagctgaagcaagctctagggactaaagttagcacctaagaagggtctggaagccagaattaccaggtctagcataaacctgtggacaggggtccagagctttagttggggtttc

SEQ ID NO: 476339 - DNA, 541 bp, Homo sapiens
gcggttgtgctgttacttcgcaatatgcatgggcgttctctggcagctcagcgttgtgtttctgttcctgtcacttctcctaacataaaccctcctcatttccaatttcctggacttctatggatgtttgatcttcctaatggcagaccatttactcccattggaagtacctttctggcctctccaatgaggtgtgctgagcatctgctacctgaaacttccctggcttgtctcagagacaagggagccatgccaccttctacaacagcaaagctgattgctgggagcttcaaaatacatgaagaaaaacaaatagaactgcaagaagaaatagacaaatccaaaattatgctcagagattttagtatccctcctaatagcacagaacaagtggagagaaaaataaggaagactacaaaagacttgaacaacattgtcagccaaattaaccttcttgacagttatagaatgtatcagccccaaacagcaaaatatacattcttttcaaggacacacagaacatacagaccaaggtagacca

SEQ ID NO: 476340 - DNA, 777 bp, Homo sapiens
ctcagaggagctgcttcactggagagatatgtccccattcaaaatgggtcagaacatcaacaacgcatttggtccagaaactgctaacaaatgtacagtgcagcagaggttcaagaagttttgcaaaggagatgagagccttgaagatgaggagtgtagtggctggctaacggaagttgacaacgacccattgagagcagtcatcgaagctgatcctcgtacaactacgcgagaagttgctgaagaactcaacatcaaccattctacagtcattcggcatttgaagcaaattggaaaggtgaaaaagctcttggattttatacaacaaccagcaatgactagctccatagttgaaccaagaagaagctccaaagcacttctcaaagtcaaacttgcactaaaaaaggtcatggtcattgtgtggtggcctgctgccagtctgatccactacagctttctgaatcccattacatctgagaagtatcctctgcaaatcgatgagacgcacggaaaactgcaatgcctgcagcgggcattggtcttctccatgacaatgcccaaccacacgtggcacaaccaacgcttcaaaaaattctctaaggtgaacaacattctcatttgtcctggactggatcctggattgaagggattctgggaacaagagacctttgctgcaaaaactgggaaagtcctggacaaactaggctcacctctcagcccactcattggcttttcattctatgagtaaagcgaagtgcacatccgctgtcttgctgt

SEQ ID NO: 476341 - DNA, 751 bp, Homo sapiens
gaagacagtggaattccaaccctgccagagtaaagagacttcaataacaccccagactggattgggtgggatatgtgtggagagagagcctggtttggcttcaaatcagaaaagttagcaagaaaagtcagtagggcctgcgttcttcaacaggttgtcactgtgggcaacaggaccatggtcctgctggagaccctctgtggccttggggcattgcattacagcaagctgatgagagggggcctgtgcagcaagcacggtggcctcatcctaagcctaagccctggacccatatgttctattgtccttggaagatgccattgctgggaagcaggaggcagttcctcctgtctggctcagactgtggaggctttcctcgcagggtcctgctccctgtgtgcccctcacttggtccaaggcttagaggtcaaatgttccactctcctcctgcgggtacagggctccagcagccctccccgggccactgcattgccaaccttgaatccatacgacatcctgggatccagggccacatttttaccttgaaaggccccaaaaccagagaagatgagtcctcctgagtcctgcattagttgctaaaaatgatgctggatcatacattaagcataaggaagtttttcaaagctatgatttgcatgtgataactactttactttttaaaaattgcttatcagattcttaatttttttttcctgtacctgctttgctggtgctataagtatgttcatgg

SEQ ID NO: 476342 - DNA, 562 bp, Homo sapiens
ggaaccatcttcctgccccttcttgaaattggctcccatgattgctgcagctggcaagtctgaaaccttagggccggccagcagctggaaactcaggagaagacacctccagaaagctcctgtttcaaacaacacagtggaaagaaccctacctctaaggcaagggagcagggctgctggggagctggaggtgttacgggaaagtggtccggatccagaccccaagagagggttcctggatctcgcacaagaaggaattctgggcaagtccatagagcaaagtgaaagcaagtttattaggaaaccttgctgggctgcacgctccatggggctggatcatatccgctgtgaccagtggattcccaacctctgtggcagcacctgtgttcctttaactgctgggctgcctgtgattaaagtggtcagggaggggcagggtggttgtgctggagtcccagatttggtggccctgtccagtgaggagaagtgaggaccagtgcctgcatggagaacagcctggacactttaccattaggtgggtgctctgtgcttggggtctgga

SEQ ID NO: 476343 - DNA, 483 bp, Homo sapiens
atcaagtttggacataggatttcatgaaaaaggttcccccagtgcacgacacttttgcatttacagtaaggtttcagaggagatgtatactgcttattaaaaaatcatattttggtcttttggccggaaccgccatcttccgtgtcaccatggcaaaactgggagtctacgatgttccccagcatgctgttggcattgttgtaaacaaacaagttaagggcaagattcttgccaagagaattaatgtgcgtattgagcacattacgcactctaagagccgagatagcttcctgaaacgcgtgaaggaaaatgatcagaaaaagaaagaagccaaagagaaagaaccaatgggaaggagcctgagctgctggaacctattccctattaattcatggcataataggtgttaaaaagaaaaataaaggacctctgggttgtaaaaaaaaaaaaaaaaactcatattttggtcataggtagaaatgt

SEQ ID NO: 476344 - DNA, 489 bp, Homo sapiens
tttcagagagctcactttcacctggcccgggtagagatataagatgctaatgagacctgagatgtacgaacaagcatgtacagctgctgtgtgtgtgcgcccagaggaccacctagaacatgcttaccagagagaagataacacagacatacaggagaagacacagagaagcccacgggaaggtggaagcaaagattggagttggagaggttggagctgcagcaagtcaaggaatgcccggagccaccagaaactggaagaggaaggattctccctgcagcttcaaagggaaagtggccctgcagacaccttgatttgggcccactggtgcaatgcagttctgacactcactaccctgtgccctgtgttaagggcacagtcctccatggactgccctcacttcagacaccagctgctagttcagaggtcccagggctacccacactcctgaccaactgctacaaatttaacgtttcccaccaattatca

SEQ ID NO: 476345 - DNA, 531 bp, Homo sapiens
aaactttcctaacatccttgagtaggctatatctccaccatgcgctctccttacacagtgcacatctcctgcacagcatacagtgacccgcttaagatccacaactcctatagagagcagctgtgcggtacagctggtttcaatctggatttgtatgactccaaggtccacacctgtgagtacaacacgctggactgtccacggcaatgtggcctctgcccggaagtgaaccttgaggtggctgacccttcttcatcaagcagggagctgtggttcagggcaggagcccagggagcaggggcgatgcagggtgtcactgagctcagacctcctgagtttgtgaagtccaggaagccccaagttggcagcggccacatgggcaattgtctgagcaaggggaagaggtttctgggccactgtcagtacaaacaggggcttcctcaaaggcatcagctgcaggccgaggaacgggagagcgggatgaggcagtgagggtctttggaggagttctgaaagcttgtctggggtccc

SEQ ID NO: 476346 - DNA, 672 bp, Homo sapiens
gagaagatcttatgaacacaaagaagaaagcaacagacattggggtctgcttgcatggggagggtgagggaggagaggagaagaaaagaagagtgagcgatggccctctggcttcaggggagcccatggttagcaggccacttaacaggagaagcccttcctggtttaaaacttcatctgtttcatgttatcctcatttctttccagaccattcttcaccctccttgccttctccctactggcatctcaggcctgacgtcacggctgtgtttcaacaaaccttcatgttctgggctgcatgttctggtctcccacaaacagatggcattccagccactcctcaagaggcctggcagttctgcagaagtgttcgtgggctgcctcaaggaggaaaagccaagaatgagggctcagcccccaacccaggcctcaactaaagcagctctgtcttcatctgatttaatattagcctttagagtaatgtttcgtttaaagaaaaaaatccatgaacgaaacattcaaaaaccactgcttagtccaaaactagaacccttggtctaacacattttcctgtgtcttggggaatatttatgctgaatatttaaaatctggactgtttagaaagttctgattgcacttccaccaaaagcccagtgtcccagtgggtaatac

SEQ ID NO: 476347 - DNA, 738 bp, Homo sapiens
aggccatggccagtacactgtctgacaatttacagagtgtttggtcccttcagccagaatgctgtgcaagactgcctcagaacaagaggctcattgtattccaaaggagatgcagcaggccactctaactctacatcatcagcaaaggccttgtgggtcaggttctccttctgctcagttctaccttcttcccttcatgacaggttttctaaaagttgagagaacggataacaattttatccagaacattttggcaaatatatatgtacagatccctatgaaacttagtgtcttagccaactttcatgttactgtgacaacaaggaacacccacaaccacatgtctgaagactccggagttctgcccctggtgaggggctacaccttcatggagaaacacacagaagaacaacaaaaaggaattgtcagtatcagctgggagaaaccagatacagaattacatgacttatctgaggccatatagccagttcacactgcacccaggactgggacccagatttctgaattctgaggatgatgtttcttccatcatgttaaaatctccacttcaagctttcagggaatatattgctttgtgaaatcaaatgtatgctatccctgatgataattttttgattaccccaaaatatttaatttaccaatgaatttgggggctataatttgaggcaaaaatgatgtggctcttagtgtaaatttattaccatatccaaatctctc

SEQ ID NO: 476348 - DNA, 596 bp, Homo sapiens
ctaagagtgttgaaaaaatggaagtctcatgtgcttctggtggaagaataaattggtacaaccacattggggaacaatttgtagtacgtgtatgtaggagtcaagtcattattgacagcagaatgtcccagacattgttgaaagggggaaatacttcctttgaaaatgaaatgctgcctatctgggttgacctgctggggctagtttcagagactggctgttttctgcaccctttcttacaaaatagtcctagcagtacagatgctctcaacaactgcctcagtactgaagctacacatcagctagatctacatcagataatgagatggaagccaatgactcagcaagccagttggttgtttccaaatatacacacctttgttttccagagtaaagttttacacaaaacgatttcaacacacatggtggcagaatatcaaaacaactccgacagtgacatttggctaaagtgatgagaggtgggattttaatgtgcaagcttgattaaaataataagtttcatcattgctactttgttttgataatttaagtgcaagtgaaaaacagcagaagtttaattaattattttcaaaata

SEQ ID NO: 476349 - DNA, 1047 bp, Homo sapiens
ggtgtacaaatgattttgttacccaggtagtgagcgtagtacccaatagtccaataactaggatccgtttgcagcatggctttaatgggaagccgcttggaccatagacgctataccaatgctccttcaaatagcaggcataaaataagaggaagaacctgtcctcacctgcctccttgtgcaatcatcacaaagacaacttgccctgtaacggaaagtaaagatttaaatttacttggtaccaatggcagtgatactgagcccttaaaggtagtgttctgcagggagcaggaagtatttattgagggaacggatgacggcaaggttgtgaaaggactagattaccgtattaatgtacttggacttcagcgttcattctacagaaatgattgtcgaggaactgccttagatattggcaaggatgtgttcaatctgtactgctttggtgctaataggatggtctcggaattacaaagatacctcaactctcctataaaatgttatcctgtgatgtccctggatatagtcaggggctttaatgtgaagttgaactgaattcaaatcttaactcttccactttctgcacaattttttcagttaatcttattcactaaaatatttcaataagttagtttaccagggaattaaatctactgcttctatgttatactacaaatccatttcccctgattgtgtcactaatgaagagctaattttcagtctgttttcaagtattttcccacatatatttattgtcttctttgcttttctttctgtatatcttaatcatagactatatttatgatattttactgttcatttgtctttttctagcatatttgtattctaacttcaatcattcaataagttcttgggcttactacagagtcatatagatccaaggttcacaaaaagatccaaactgatacatatataatgagaaaagaattaacaactacagtcacaaccacaaagccaaacaagcaaagagaaaaaaaatgagaagcaaagcaaaggtaaatttagtaaataaactgtaatacatcc

SEQ ID NO: 476350 - DNA, 880 bp, Homo sapiens
cacccctggaataatgtatattcgtcagtttcagaatcctaaatggtgtaagaaaatcagtttaattttgccactccactaccttcagatctctatcacttttgacaaaaaggcaacttttaattatattgctgctcttctgtacacagtgagtccgttctcttttgctgcttttaagattttctcttcgcccttgactttcaacagtttaaccataatgtgggttctacacaacgaaaaaaagggttacagaccctacttcctccatgcagcttctactcttgcagaaaagggtagtgaggtgttgagagttaattgggtacacactgggaagaaaggatttctgccagcaggtcccagagggcgcatgttctatttcctggagaccatcagcattggttctttttctagctttttcaaaatggaacatgattttagacctttcttccttgctaataaattcctaaagctataaattttctcctaggtactgttttagttatatttccaaattttaataggtattttcattttcattcagtttgaaatcatttctaattttccctttgatttcttcttggacccatggattatgcagacatgcagtatttatttgatttctggtatttgtggtctttttagatatcttagtgttatacatttctaattcaattccagtggtcaaagggccacactctgtgtgatctcaatcattttaagagtattgaaacttattttatggcccagtaaatggtcaaccttggtgagtatattatgtacatttgaaaacaatatattttctgcccttgctgtttgaagtgttatgtaaacatcagtttacatacaggtcatatttccctatcaatcaagctaccaagac

SEQ ID NO: 476351 - DNA, 1741 bp, Homo sapiens
gagggtccgtggcttcattcttgaagttaattagatcattggaggtgttgtcttcactaagaaaaggtgcaggggggatcatgggaagagacgcattggatgcatctgattcaaaaaagtgcctgagaccaagaggactaaggaaaaaaactgctgacgctggggtgaagaatcttcctagggtgagtgtcacagagacaacgagcagtagaacagagcaccagggagtcagtgagaaggaaataggaacgagtaaggcccttctccctcttctagccttgccgtttctctcccgcgtccctcagctgcaggtctgttggagtttgccagaggtccactctagaccctatttgcctgggtatcaccagcagaggctacagaacagcaaatattgctgcctgatccttcttctggaatcttcatcccagaggggcacccgcctatatgaggtgtcttttggcccctacttggaggtgtctcccagttaggctacacaggggaaaatagaaagccaatatattgagctgaaatatctcaggctttaaatgaagacggtggcccccaactaatgcatctccttctttgtttcccaatgcaagacacagaaatctctcaaggtttcctttaagaatatatttctacacttttcagaataaagtttctgaagtccattctaggggcagtgcacctgaactgaagttgtaattcttggagagtttcagaatgggaatgcagacctgggtgctagctactctctgcatgttaaaaggaatcctactgccatttgttttcctattaaatgacatttcaaatactttattataaacataaatcacatctttcaagaagttatttagattatttctggatagttagccattataaaaattgctacattgagtaagcttgtgcatggcaagttcatatattcacaagcatatctttgctatacattcctataattgtggggtcaattattaggtgaatttgctattttgaggaatattagcaaattgcttttcatagtggttgtaccaatatacacttacatcagcagtgtacaagagtttctgcttcatcaaaccatccccaacataatgtattaccaaactttttgaaatttcacaaaatgagagttgacaaatagtatcatattgattttctctcattatgaatgaggtggagcttctattaaaatgtttaacaagcacttatactttttgtgaataaattgttcatatcctttgtctatttcccattgtcttattgatatttctataagttagagttagttctataataattaaaattacaaaatatatgtttttgagttgcaaatatctcacaaagttctgtttccattagtatattttcatcattaggatttttaataagagcttttaggcatttcaacagtttgaatacattttaattaaaattttacataaacataaggaatttgaaacattacatgtatacagatcaatgaattttcattaagtgagtaaagttaacctttgtaaataccattcagagtaagaaatagtgctccatagatacttccccaaatgacacttccagttactatcagttcctccccaaaggtaaagccaccaacatacatcagttacacctgggtttaatatttacatgtttgtttataatatttattatgtttattatatataaaattatatgatttcaaaaagttatataaagaatctgtattttttgtgtgttt

SEQ ID NO: 476352 - DNA, 730 bp, Homo sapiens
gggtatgcttaagttactgcttaatttgacgcctagttgtccacatagcataactatttaggttgcaaggtgacttgatgacccacagtcaaacggtcagtttccaacaaagcccagtaacaggccaagagctgtctctcaaaaggaaagtagttatctgcagaatatggcagaaccttgctccaaaatcctagagatctccgttgtgattcacctatgggtgcccgccaaaggcgccaaacagcatccctatctgacactgacacctcaagcaccattgaatctgctgggtcatatggcccaagttgcaaagcagctagcacagcagcctggacctattgcagagccttctactgttctggaccccactcaaaactggcagccctttggttcactcaataaatgggccagagtaacacacccaaatgaggaatgtgttgcctcccaaatccaaacaggcctactaggcattgtttctctttcttggttgtatgaggagccaaatgcagcaacttatccttcaccttacaaggagtatacctcaacaggcctcacaccactggatccctagaaattttactgaggtagaaggtccctgaatcttcgtcagatttatttcctaccctctggcacgcaaatgtctcaccaataagtccagtgtgtttactacttcttgcttactggatccaataagcataatatcaccaatgtaacggactagtgtgatatc

SEQ ID NO: 476353 - DNA, 844 bp, Homo sapiens
agctgagggagccggctccggtattggccggcccagaaaggggctcccacagcgcagcggtgggctgaagggctcctcaagtgccgccaaagtgggagcccaggcagaggaggcgccgagagcgagctagggctggaatcaagaaaagtctgtagtcgtaccttcctaacgtcaagtttctggctgtgacccactaaaaaacagtatggcccgcaatggtctgaggagaaatatcttcatagcaaacaagaataattctccagaaattcctacctgcctgactgcagtgttaactcacaagtatttgtatacaaagctgaaatttgttactatattaatactcttgattgttggtattcaggtctaccagatactacaagtagcaaaggcagagcagaaaattctagagaaaaacacgctaataacaggagatgcaaaagagacagaaattattctccaaccccatgtggttgtgattgagtttctcagactattttctactcccctacaagggatcccatccaaccatgtcactgaagtagtgtttgtcaggtttctccactgtaaagttactacctgcccctcttccctttccttacctctctctttggaagatatcactatagacagcccacacttacgggaggagaagtttatgctccactttcttgagggatattctaaaattctcatcgcttttcggccttttggctaagatcaagtgtaaaattctcattagttccttttattaataaaaattaaaagttgagaaaatttgtgttatgccaagagtcactaaaaataattataatgctacttaataaatattaattgagtcttttct

SEQ ID NO: 476354 - DNA, 530 bp, Homo sapiens
aaggattggaggccacctgcagaaactagaaaaagaattaccaatatgaacacacgtttcagaagaagtgaatactctttggaaccatctgttttggctttcttcataacctttgggaatgcattttggagaaagccatcacaaaacttcacagaattgtacctccttcctatggtagctgctttgcacattccagaaatttatgtctttctgggaagtgacatagcacactctgcttgcctgctctttcgcacgagggaaggaaggaggtggtactattggagctcttgttcatcctctgcttttgctcgctggtaccacaagaaaattggaaactctggaaacgtgtgtaagacatatgtcacaattatcccacctgaaggatgtagagatttacaacaacttttgccagttatcagttgacagctgcattagagctgtattcaataggtactaactcacctgcatgtccatcctattggacgtgggtagaatggcaccaggagggtctgcctgattaacataagatt

SEQ ID NO: 476355 - DNA, 1385 bp, Homo sapiens
aaccagcatgtcattctagaattatttctcctccctgcctcagttcctctctttgtaagctttggccaggtctctctacggccatgagtcagccatctgaaggaaagatagagaaggaacgggcaagacctgagagcagctgcctgatttcttctgatgctcggaaagtttgtgcatacagcttttcctgggcccacaggagaggactctgtgtcagcccctttgtccatccagtcctacagggctgcattgcatcctcatccactatcatcattactattattatcatcatcaccattattatcaccaccaccatcatcaccaccacaattgcctccaccaccaccatcatcaccactaccattacctctgccaccgccatcatcaccactaccattacctctgccaccgccatcatcaccactaccattacctctgccaccgccatcatcaccactaccattacctctgccaccgccatcatcaccactaccattacctctgccaccgccatcatcaccactaccattacctctgccaccgccatcatcaccactaccattacctctgccaccgccatcatcaccactaccattacctctgccaccgccatcatcaccactaccattacctctgccaccgccatcatcaccactaccattacctctgccaccgccatcatcaccactaccattacctctgccaccgccatcatcaccactaccattactaccattacctctgccaccaccatcatcaccactaccattacctctgccactgccatcatcatcaccaccaccaccatccctagcatcatcttgaccacccacatcaccaccagcatcacaagcataatttccaacttgttgtagagctactagggactaagctgttacactatagaagtcatctttaatgcttagtataattttgaaagggaggtattactatccccaactcaaaaataaggataatgtatctctttatatttgtaacttgcacaagtcaactagctgatgaatggccgatcctgtattttaatcaaatcagtctgaatccagtgcttatacgagctcattatattaatagtaaacattttagtatggtatgtttctaataatgcttttttcaatagggatttttgcattttaatgtatgattttttaccatgtttggttaaaagtttaaatgccaacatttatgccagtgtgttcaaagaacatctttataacctttataacctcctcattagcatcatttgatctgaagattttctgtaaattatttcaaaggccaactatcaggaggagtttcatcttaccaaataaatgtgaacatatatgaattagagaatataatttgtaaaaaaaaaattaaattat

SEQ ID NO: 476356 - DNA, 727 bp, Homo sapiens
gcattaccacctgagctccacctcctgtcatatggcgcaggggtccccaacccccggaccggtaccatggactggtacttatcagcggcggtgttagattctcatagaagcgggaaccctattgtgaactgcatatgcgagggatctaggttgcaggctccttatgataatctaccgcctaatgatctgtcactgactgccatcatccttagatgggaccatctagttgcaggaaaacaagttgtagggggcaaagcagctctaaaagcccaagggcaaggctccaaagagacacaggtgctgggtgttagaagcaaaagcatgagtggggctctcagaaaacaagttactccagggaatccaggtggagcagatgactgtccactacaatccttactgctctcaaaatttcctccagcttggactttccacctgaacttcagacccatgcatccaactgcctacttgacatctctacttggatatctgtaataggtcaattgtattaaccacagcaatcacgtgcagcacgtgcagtcaaagaaagcctttcactaaagtgtatcctcattatttgcacaatgataatcattaagtcattaaagtgaattgcaggaataaaattattaaaggttggtaatgatttcaatacatcaaattgaagaaatatagtcctttaaactttgattatagttggttttttatagaactgtttggaggatatttt

SEQ ID NO: 476357 - DNA, 955 bp, Homo sapiens
tccccagtttatgtcagggtactggtacaccttgggcttcacagagaacacacacagtgccaaccctctgctccgctgctttacctcagacttggacatcaacaacaggaaggtgaaactgcattttgaggacaagttcacattcacagcccacctggcactgaaggaagatggaattactatcctctgctcagataacaaccgaggaaagaggccctacccaccctatcccataagtgaggagggagaggaacatgattttaccaaactccacaacaaagatggcagacagcatagctttagatgcgcccatagtagacatcaccagcatagctgccacagagaaactcatcagcattccagtctgcctcagtctgggctgcaagcctccaaagccaagatggccaatgctaactcccaggaagcaaggtacagcatcatctgtgctaactcccctttgggtgcaagatggctacagcaggttcaggtgagagaactaagttgtgtgactccaaaagagcagaaaccaggaactggagaatggaggaccaaagatcagagaacaaacgcccaagatgcccagaatgagaaagtttcatgctgactcagaccagctttaaaaaacagggagaaccctgccaccagcttgtcaccaaataaccatccattagccaagtaaagtaacttaaaatagtacattattatctagtgataaactagtaaaaaccaatcatttcctgagcaccttgatgtgtcagtgttgtactgagtaacagagctagctgcatagtacttcattgtacggacataggtgaatgaacattcacctgtgtatgagcattcaggttgtttccagtattttactatcacaaatcatgctgcagtgccttatcttgtacttacatgttttttatattttgaaagtaaatcttcacagatttttagaattgggatc

SEQ ID NO: 476358 - DNA, 618 bp, Homo sapiens
gagggctgccagcacgctgttacctctcaatttgacagctgacacacaaagaagaaggccatgtggcccacagctgggggcggggagtggtgtcccaaatatgcctgcgcatcagagggggacatgcagctcgacaccactctggcctcactccctggagattctaattcagggagtctgagaggggatggaaaggtgaactttaaacaagccaacttaaccactgccaatttgggaactactgatttacaaagtggaacccagaacccagaaaatgaggcctgcatcctgaccaatcctcctcttgaaaatctgtctcttctatcatttgattatgatcaacgaggggtcatgaaaagcaagatttatatccatggaatatgtgtaaagaatctggatttagactcttctgagggatggtacagcactttctctgaatctgttaaagttccatttttgataataagatactcttgcccttctgggaaggaggaaaaaaaatcctgtttcaagaatatcgctcagtactagctagatgcgtttccaaatgtgagaaagtaaaattatcattttaatctgcctcattctcactttttgggatccaaagggtagaataaa

SEQ ID NO: 476359 - DNA, 489 bp, Homo sapiens
tcccgtggcccagtcaaattgacacatacaattcaccgtcacaatggggatctcttcagaagcaggctcagaaagctccccagctgccaaaaagacgctgagaaaaactgagacagaaaaaagcattcaggatataggcattcctcaaaagagctacctgccaaattttggatggcagcaccccaagatgaaaggagcttggatccccaagtcattatttggaggagagcctctgcaaagaactgcctgctgtgcactggactgtgagcctccatgcttacagtgccttcagctgacggaggccagaattactcacctgccattctcaaaacccttcttattaaaagaatatagtgatcacttagttactttagactggtggagcctgtgtgttctgctggagttcatgaatattacaatagcagaaaaacagcacaagttggctctctatatccttccagataatgaagagtttcttaggggctgaat

SEQ ID NO: 476360 - DNA, 602 bp, Homo sapiens
cccacagctcattgacccatgatgtcctctaccctctgcttcaccaaagacacagcaacagagagaaacagaaagaggaagaggaaagcagagggtaaggagaacccatggggcagttacattattacattggattctcatagcaatcaatgctatgcagatctctcagatgagttagaaaagcaggaagaagcagagacctctgtcagcaggcaggaaaggtcagcccctggacaaatattcagggatcagttcctaagtgtgtggggagccccctggaaaccagttgctagcaatggtcctcttactgggaaggggtcccgatccctagatcccaagaaagggctcttggatctcgtgcaagaaagaattcagggactcagatgccagtgggaaatagagacaagtatagattctctaccacccagtgtggtaagagtaatgatggataggaaagcagcacatattacagtgttggcagccatctgtttcttcagttgcagttggtaggtgcataggtttatttttatgattctgcatcataacgtacgtgtatattacatactattttgatataccaagtgttgcataatttaaaaggc

SEQ ID NO: 476361 - DNA, 665 bp, Homo sapiens
ccgcgaggaaaaatgctgcttccagcacgggaaatctaccgatgctgacactgcttcccctgggctccctggttctggggatctgctcagatgacagctgccactctaagacccctgcaggcccaggggcccctcactgctgttgtctctctctcacactctgctgacttcttcctcccattgaggaccttgggaactttgagacttgcagcagtcaccactctctcatttgggagatacaggagtcctagggcagccagtgatcactcaccctggtcttcaccatccttaggacaagcgactctaggatgtctcaatgggcctgtgggagaggagacttctctcacatcctccaaacttcacactgaggaggctgctaggacctttgctttccctctcagatttgccctggcaggacgagaagacccatgtctaagttttcttgatgtttccaactctcatcttcctccctggatcagagacagggctctctatctcactggggatggaaagcatggaaactcttttctccctgttcacatccccttttataagtgttgtcttacaacatcaaggtgcttttaaatttaaaagcaaagcaattggtacggaaacacagaatgtgtgtgacttagccaaggatgcttgatcagtaggtgaagata

SEQ ID NO: 476362 - DNA, 1203 bp, Homo sapiens
gtgatctcaagatccttaatcacatctgcaaagccccctttttcttaccacatcagcctttgatcatcttccattcctccccctgaatatttctcgctgaatgattggtcaggtgacagctttaagacttagctcaaacccattggagcctggctgtccagatgacctggtgtggctggaaaggattttgccctgcatggatgtgacactgtgggatgatgtcaagggctctgggaagcgtggcgccagcatccgcttctacagaggcctcaggaagcttaaaatcatggtggaaggtaaaggggagcagggacttcacgtggctaaagcaagagcaaggagaagagagccagtggtaggaggtgccacactctacaacaaccagatctctcccttcttggcaaaagtgtgggctgccagaccaaaactggactttcataaacatatctgtatcagccaagtgagtggctgcatggattctccagaaaaaccaccttggtcccagtggactgtgccctatgaaactctcttgaccatcctcagagaaagatgcgtgtctcttaaattgatggtaaataatgaaaatccttggcaagatccatctgccaagaaagaaaacaacatggaggagaaacatccacttcttaaaaactgtggcccagaatggctcataccacttccactcacactccgtgggttagaactcagttgcatggccacacctaattgcaaaggagactgggaaagaagaagaagaagaagaagaagaaggaagaagaagaagaagaagaagaagaagaagaagaagaagaagaagaagaagaagaagaagaagaagagaagaagaaggaagaagaagaagaagagaagaagaagaagaagaaggaggaagaagaagaagaagaagaagaagaagaggaagaagaggaagaagaaaagaagaggaagaagaggaagaagaggaggaagaagaagaagaagaagaagaagaaaagaagaagaagaagaggaagaggaagaggaggaagaggaggaagaggaggaagaggaggaagaggaggaagaggaagaggaggaagaggaggaagaggaagaggaagaagaagaagaagaagaagaagaagaagaagaagaagaagaagaagacagtagtctgttgtggcggtgtggagttggaatccctagctgagcttctccatcttc

SEQ ID NO: 476363 - DNA, 718 bp, Homo sapiens
tccaacccacgacccacaggccacatgctgctaaggatggttttgaatgtggccaaacacaaattctgtcctaatggaacagcaagactgtgcccttcccctcctgacagatgtcatccaaacaaacaaagaagttgccttcaaagacctggatgtggccattctcttgggctctgtgccaagagaggaaagatttactgaaaatgtaaaaatcatcaaatggcagggtgcagccttggagaaatatgacaagaagttcgttaaggttattgttatgggaaacccagccaatatcaactgcctgactgcctccaagttggttccatccatcttcaatgagaacttcagttgcttgacttgtttggatcacaaccaaactcaagttcaaattactcttaaacttggtgtgactgctgacaattatccagatgtcaaccaagccaagacgaaattgcaagcaaaggaagttgtttatgaagctctgaaacatgacagctggccccagggagaattcatggctgtgcagcaacatggtgctgctgtcatcgaggctcaaaaaccatccaggacaatgtccactacaagagccatctccaaccacctcagagacatctggcttggaaccccatagggagagtctgtgtccagtggggttatctctaatagtgactcctatggtattcccagtcatcgttctactcattctctgtcgtattca

SEQ ID NO: 476364 - DNA, 697 bp, Homo sapiens
tctgcagccacagctgagagctaccgcctacacatcatgctgcctctctctggattttataaatgggaaagcattactttctaaaaataattctgtcaacaagtatgggagtgttcacccaggcacagcagcatacccctcccgttcctcctctctcccttgatgggttgagcttcagccacactgggcttctccagagctttgaatgctcccagtcctttctaagcagcatcttctgtctccctgcatacaaaaacacagcccctcatccctgcaaggacactgcctactactccagctcagatggccccctgggaagcagccgctggcttcctccatttccatggctagaaatccaaaatgaaggtgttgatgggaccatgctccctctgaagcctccagggaagaatctttgctcatctctaccaccttccggtagttgctggcaaccttgtcattccgtggctggtgctgcagcactccagtttctacctttgttgtcacatggccttcttccttctctgtgtgtggtctatgtgtctccaaatctctcttctcctacggagaccagccactgaattcatggcctgccccaatccagtaggacctcaacttcacttgattacatctgcaaagaccctattacccaagaaagtcacattcacaggacccaaatttgaagctgcttctcagagta

SEQ ID NO: 476365 - DNA, 603 bp, Homo sapiens
atcatcacagaggcataccccaaggttacccacattttcttatgaacatgacattagttggcaagaaccattttgtcccaggtatatctggaagcaagaagggaattcctgtaattctccctcatttagaagcaatcaagggaccattttctctagagctgaaagggacctcaagaaatcgtctaattcagcgctttgcattgcagcaaataagatggtttaatcctcattttacagaagaggatgttgtttctgagtctaatacacaccagaagcacctggagggctcctcaagaacagatggctgggcctccccagagtttctgattcagcaggcctgggtgagaccagagaatctgcaggtacaacaagttccaggcgatgctgatgctgatgctgtgtgtgcaggcactgcactgaaacctccacaaaggcgcttacataagggctatgcagggtgaagattttgtagccaagcatgatttattcagtttgaaaattttcaaaatttgaatggcttatttttctcatagaatttagatgtgtaagcatgattcgacagccaggtggttcatggatttaaaactaaattttacagagctc

SEQ ID NO: 476366 - DNA, 755 bp, Homo sapiens
tccaggtctttagagaaactctttcaaccaattgccaatctgaaaatcttttgaatctacctacgacctggaagcctcacttttaactctacacgatgccattcacagtcaagagaaatgtaaacaaatgtaaagggggcagtattaaatcccaactgcataaaatttactgtgaaaaagcaaagtcattatatgacaaccgaaagcaaaaagatgttgaaggatctaatgctggagaatttaatgccagcaaaggatggtttgataattttagagaaaagtttgtctttgaaaatgtcaagataacaggagaagcattttctgccaacccagagacagcaaagctcagtgaacccaacaagaaatataagaccacaccagggcacattataaacaaattgtttaaaaccagttatgaaaagaaaataataaaggcaacaagaggaataaaaacacattatgtgcagaagcagcaagataaggatgacatcagccttcttgttgaaaataatgcaaggttctgaaattttacaattatattttatttaatgttagttttttcttcattcattttagccatcaatggaacctttcaatctgcaaatgaatgatcttcagttttcgacatttttcttgtataacttatgtgataatatcacccctttaatttttctatttttctattttactagaattttattaatccatttaggccccctaattttcttttctttcatgtttttcatatttttgtg

SEQ ID NO: 476367 - DNA, 615 bp, Homo sapiens
tgtctagagcccttgttacccgctctggaatcctgacagctcctcatttcctctatcccaaaccgtggctggcgcacaggaagacaatatggaggaggtggaaacagttggatttaacgagattcagtgttgggcctgccgtttaccggcattgatgggatacatctcttccctgagtctcagtttcttcatctgtgaaacggcagaaaaacagagtaagaaattgactctagtagaagctcttgtgagacttccttatcagcgagctcaatcatactccccatcccaggtaaatggctacgtaatgtatccagaacaccttcttgctgaaataatctcagtcgggcatttggctctagatccctatttgctgatgaccctcagatggtttcactgtttccagtctttctcccacattttaaaacataaattggatcacgactctgctctgcatagatcaagaccaatagcttctcatcaggataagatctatacaccttaccccagtgaacaaggccctacgtgatgtggccactgcctcgttctccaaactcatgctataccattctccttttgctatggttggaatattttgtcccctccaaattcatgtgt

SEQ ID NO: 476368 - DNA, 1057 bp, Homo sapiens
ttgtcacgagtgagcacagctttggggctggcttctcccgagtgtgccatgaggaaaggggtccagcgattcttccctgagagaaacccctgcactgcgggtgcccattctcgcctcagcctacacctcctctgtcctccaacacagctgatgagcggccggtttatcgagggcaaccagcttttcaaaggaagtgccccacagatggcgctactaagcccggctgtcgggacacacctgagactgtgcatccaggccacgctatccctcccacctccaccccttctcttcctccaaactggcccccacacccatcctctctacaccatggtcagcctgctgtgcgggctccacgtctgggtcaaccctgtgtgggcagagaacaggggcagcttccagctccagaaggaaatcccagctcctctactactcctttccgatccaggacacgagaggagaggactccccttacggatcccatctcctcccctgaagcatctgtgactgtgcaggttggagaaggaggcagggaagggggaagaaaaaaaaactaccgttgagatgacataaaacgctttgtgcaaatgatcgtcctccaggggtattccgtgaagaggacacttgtcatatagccaagcatgcttgcagaaaataaatggacgtggtcagacaaatatttttgtgtgtttcattgatttgaaataaactatcagaaatttctaaacaaatactcgccaaccttttggaaaaaaatatggattgaatctttttttttaagtctagaaagtgacccagtgttgtgggagaaatgtgaaaggcaggcaccatcgctttcacggcacttggggtcatagtctggatgaccaagattcatttgatcctcaggggtcttttatgattggactgcaagtaaagctgccagccaaattttataacacaaaaggtgttccgtgtgctcacagcacccctgcttaccagatgacagaatgtcttgaagattgtgcacgttcctcaaaagacacatttagacagtcatggtcaggcagttgatagactc

SEQ ID NO: 476369 - DNA, 758 bp, Homo sapiens
agtagttgcagatatgggtatatggggttgcagagggacatgtcttggaaccaatccccaacagaccctgaggtttggctgcttccagggagctccacatggaagcaacaatgtgaggtttggtcagaagcagtgggcggctcttccagggaatcggagccctggctgctgctgtgggaccttctgctccacacctgcacgtgtgctggcttccgcttgttaaatgcaggcctgtggacctacctcccccatggagcggtggtctgggtcacggtgagaagcagtgcctctcaacccctcaagccacaaacaaaatcaagagacatggaggtgcgcctgcgtggggtggacaagaagacagcctcgacccacaaaggcaacttacaaagcctgatcataggaggtgcctgcttctcctttgtcttctgccatgattctacctgcagcttgcgaaaggaacaactgcccagctgcctgatagagggctgggggtggagagcaggcaactgttactatgccaagagtcaattataaaccattcacacaactaaaaggcaaagaacttacaaatttaactcatttgatttttcaaaatatgaagttttgcagtcaaatatactcattgtttgaaaattatgtgcatgaatatatttatgcagaacattttaaataaagctgtgtttcttttctccctggatactatctttatgttttatgttttgattgcaagctttatcaattaaacttttcacgagttt

SEQ ID NO: 476370 - DNA, 1374 bp, Homo sapiens
ggtccagctattccgaggacatcgtgggctctcggagaaggcgacgcagctcctcggggagcccaccatccccgcagagcagatgttcctcttgggatggctgttcccgctctcactcccgcggccttggacgtgggcgctctttacccctttagtcgctctgggtcgcgagggcggctcccaagattccgcaactacgccttcgcgtcctcctggtcgacctcgtatagtggatatcgctaccatcgtcactgctatgcagaagaacggcagtcagcggaagactacgagaaggaagagagccatcggcagaggaggctgaaggagagagagaggattggggaattgggagcgcctgaagtgtgggggccgtctccaaagttccctcagctagattctgacgaacataccccagttgaggatgaagaagaggtaacgcatcagaaaagcagcagttcagattccaactcggaagaacataggaaaaagaagaccagtcgttcaagaaacaagaaaaaaagaaagaataagtcgtctaaaagaaagcataggaaatattctgatagtgacagtaactcagagtctgacacaaattctgactctgatgatgataaaaagagagttaaagccaagaagaaaaagaagaaaaagaaacacaaaacaaagaaaaagaagaataagaaaaccaaaaaagaatccagtgactcaagctgtaaagactcagaagaggacttgtcagaagctacctggatggagcagccaaatgtggcagatactatggatttaatagggccagaagcacctataatacatacctctcaagatgaaaaacctttgaagtatggccatgctttgcttcccggtgaaggtgcagctatggctgagtatgtaaaagctggaaagcgaatcccacgaagaggtgaaattgggttgacaagtgaagagatcggttcttttgaatgctcaggttatgtcatgagtggtagcaggcatcgcagaatggaggctgtacgactgcgtaaggagaaccagatctacagtgctgatgagaagagagctcttgcatcctttaaccaagaagagagacgaaagagagaaagtaagattttagccagtttccgagagatggtgcacaaaaagacaaaagagaaagatgacaagtaaggacttacttgttgcacagcaggaattttaacaacaaaaattttatgtgaccaaaagtgttaaaaggctttacagtgctactgtacttaccatattagtaagtccctcaggaaaaagcttcttttgagatatctttagcagcttattttttgttattttaactttaaaaagtaatatgtgcacatggttttaaaaatattcaaccattat

SEQ ID NO: 476371 - DNA, 684 bp, Homo sapiens
agactttcaagtggagatcaggcgactgcaatggggagtgagggtactgaaggggataacagagctgaggagtcgcaacagagaccgcatggcccacatggtctagaagatttactagttggccccttagagagaaagtctgtggccctgccctggaagctcaatggtgccagcactgagctacatccactggcatctttctacttgcccccactgacttcctgtgtgtcggctccattttcatactgtgtgggcaagagggtggcagcatcacacatgagcttctggcccactcagcaggggaaaggggaaggagaaattctctttcccactcagcgcaaagaaccgagattgagtcccattggtctggcttggatgtggtgtctgtctccatggcagagtgctctgatggtccaggagtgggtcactcaccactcctggagctgggaacccacctgtcactccccagtctcatagattgagcaggggtcaaggcagaagtcgatcatgcagggacacatagaccatgttaaaacttgaagttttattctatatttagtgggatcatgtaatcagatttatattttaaaaagatgtctctcctggcaacatagagaatgaactgggggggcgcaagagtggaggtggagaggctaatcaggggtggttctgctggaaaaaaaa

SEQ ID NO: 476372 - DNA, 1366 bp, Homo sapiens
caagatttgcaatttccctgctgcttcttgttttctgcactgtgcctccttcatacaaccttctgacgtctacggccccagatctaaagggatgaggctccatcaaagttcagcatgatactcaacagatttcagtatcttgaagcccaggactttttgggactccgactggctctccttgcccctcagcttgcagcctgcagacaacctactgtgggaccttgtgagcatgtgtctactgttaaagtgagggcattgattggaaaagaatgggatcctgcaacttggaatggggatgtgtgggaggaccccgatgaagctggggacactgagcttgtaaactctgatgaacttttttgccagaaggagcagcttccccatccccaggtaactgtgcactggggaaaaggaaatgatcagacatttcagggactactggacactggctctgagctgactttgattccaggggacccaaaacgtcactgtggtcctccagttaaagtaggggcttatggaggtcagaagacagatggatcttggagaatggcagtggattatcataagcttcaccaagtggtgactccaactgtggctgctgtaccagatgtggtttcattgcttgagcaaattaacacatctcttggtacctggtatgcagccattgatttggcaaatgcctttttctccattcttgtctataaggcccaccagaagcaatttgccttcagctggcaaggacagcaatatgcctttacaatcctacctcaggggtatatcagttatctggctttgtgacgtaatcttatttggagagatctagataacttttcacttccacaagatatcacactggtccattacatggatgacattatgcttattggacccaagcttgctttatttgggtttcataaaaattatgaggatatgtaccagcaggtacatctacaaaaggacattgtaacttgtctgcccttggtgcctgagaattggtagattcttactaatggaatctctctgattagccagaattaatgtaaatggaagattagccaagtatttatcttttctgatctgagaagcttcagttcttattttcccaataaattcccccaataaaactcaatgacttaatggaattaaatacacagaagcaccgatgtggtttaaaggcagcagtccataactgactcaaaagaactgtatgaatttcactcattttatctgaactaggtgttgcattaagatctaaatcataaaaaagttcagaatgctcaaaaagcatttcttgaaacttttctttggattttcaactatttatcactgatgcctaccatatgcctctttgctatcagcctcagtg

SEQ ID NO: 476373 - DNA, 1487 bp, Homo sapiens
ggcggccacccgggctccctcgcgctgacctaagtattcaaagagacatgggctccaaacccaataacgttgtggttcttgtaggctcagagagttcactcaaggacctagggatctatgatcagcatgtggcaaagctggccattactttgtctccttcagagcagcaagttcccccaggccctaggtgggcagaggagcccctttctgtggccaccaccaccactgatccatgtggggttctgccaggccaccaccattgttcacttaaagcccaaggtcgctttagtcagcttgtggtgaatgctgccagacccggtactcacccttcagggccactggctcccgtttggaccaaggcaggtccagaaatgttgatcaacagccttggcctggactcagggaccccaagagcctgcttggtgctctaccctattgtggttgagctgatggagaagccgatgttgctggcgacccacactcaatgcagcttatgccgtggagcagataaggttatattctgtggttctgaggtttaggactccaacatatcatcatttgggggcatcagtttaatctatggtaaccatgtgtctttgaaaaaaatacttaaaaaatttgtcttgcaaagagagaaattaacagcaattaattaaaagaagtgaaatgaggtatttaaaagaaatgatactaagcaattaaacctgttatagctaaaaaaattgtcaatgtttttataaagcaacacatatattaaaaataattgttaaaagtgaagatgatttttataaaaaagaaaaactgtacataaaactgcagacaaaatctgtaaaatactggaaggtgtgctgaaaaatagaaggtataaaggcatccaacattttcatctttcacagttggagatattagctgttacattctttacattaacattatttctcaaatttattattttatatttaaagtgaattacaagtcgaaaaaagaaaataattcttaactttcaaataagaaaaagaatacaaaagtgtaatgaacacattatcagtagagcaacagaaaaagaaaaacaaggtgaggaagaagcatgaaaaagtataaacttaactcaggtaaaactaaacatatcaatatacatacaaatacatattaatgttcatattaatacctatgaatggctaaattcatattaaagctacatattgaaagacaacacaaaatttgactgcacataagagaagcacctaagcaaaatgatagtttaataaaaaaagaagcatgcaataatatactgaaaaaatgcaaagcacaggagagcaagcagaggagttccagtggtagtggagaatttacagtatacataatcagagtctgtcttcaagtaatatgatattgctctagtttatttcttattcatttcctgaatgtctctgatagctctctggtcatttcaagataaatttttcattttgcatttttccagttct

SEQ ID NO: 476374 - DNA, 644 bp, Homo sapiens
ttatgtcccagctctaaggaaaagaagacagtaagaaagagattaagatattttaatagagtgttaaccgatgttcatgactgtgacccttgaaaagtattattaccttagaataaattaccccagcagtggaattgcactgtcacttagaaagccaaaggttcctcacaaaaggaggcaagttgagaagaccagaggctgctgcctcaatccagtgccctgcttgcgaagcaggggtgccactcagagaagtaagccactatcctggtccctacctccagagcagcgacacaacggttttgcccaactagatacgttggtcctaagaggagaaagctcgaaagctccacttaaggaactgactttatttggaacagaaagtaagggaaattcgagcctaagggctttctgggaaacagtggagagtaaccaattaataataaacatgaatttatgtcttatggttctagaagctaagaagtccaagatcaaggggctagcatcttgtgagggccttcttgctgtgtcatcccacagtggaaaggcaagagcctatgcacgcatgagagtgaaggcgctgaacttgcccctttataatgaaccagctcctgcaatgagagcattaatccactcatgaagtggaa

SEQ ID NO: 476375 - DNA, 772 bp, Homo sapiens
gtcccttgacgccatgcagcaattcagcaattcagcatcatatttatcaaggaagcttgcttgcatttggctctgcttccctgggtccacccacgccctgtgtccccagcttgacccgacagcttccatgaagttgtcccttggtgaaacttggtttcacagcttctacctctcaaatgtatccagaatccaaccacttctcactactttccttctcaccacttgtgaaataaaacccctggccctgaatttaaatcctgctccaagccaaatcatcatgcctcccctggattttggcattaactccctaaactgtctcctaaattgccacctttgtccacagtattctcaacagggaagccaggtgatccttacaaaatccttggtcagcagtcctcaaaacttttggtctcaggactccttcatactcctaaaaataactggagaccccaaagagtgtttccttatgtgggttgtaggattgtcttggatatacaggctcttttttggttccatatgaaatttaaagtaatttttcctaattctgtaaagacagtcaatggtagcttgatgggaatagcatgaatttataaattactcaggcagtatggccttttccatgataatgattcttcctatccatgagtgtggaatgtttttccatttgtttgttctcttattttcttgaacagtggtttgtagttctccctgaagaggtgcttcacatccattgtgagttgtattcccaggtattttattctctttgtagcaa

SEQ ID NO: 476376 - DNA, 1005 bp, Homo sapiens
attttccacagctttgtgaatggcagagtggtactgtgaaaatgccacaggctacacacacaactgtccccagggttggaagaagctacgagaggagccagggaaggaaggagctgttgcaagcctggttgctggctcatgtcaacaagggaccaacatttcacagtctcccactgggagcagttttcaaaacagcatcctgactgctaccaaaacagggaagaagctggggcaagtaaaaatgctgattgctgaagagaatcttgagttttcttctccaattcaccattcatttggttggtgtaaacctttcgcgatttttcagagctctaaaagggtgggttatgatcatttcggcttgctttttaatgtttctgctgggagatgggagattggagctgcttattctcccattttgctgatgtcgcttcttggttactcttgatataatattttgtgcttttataggaaagttccttgagattagtagctctctttaaagctacaaattttcctaaaggacttgattttaatgcttgcattttgccttatcgtggcaaacttatgagaaatcacctccagaaatatgtgacaaacccagtgaattaatacaaccttctataataacaatttatcacctctgagccagcttgcttattctttcttgcccatccatatttaattaataccctctcactgccaaattcattttatctctccctagtctctagtttttcttgctctgttggcataattctcttctatctgcaaatttacacaaatatatcagtttaatttagtatacaattattgaatgatatctatatactagggacagcgactgaacctggattacaaagataagtaagatttagtttttgcatcaacatatttaccagttttgacaacaacatatttaccaagcacactttggatttttgtaagctatctatttctttactatttcttgctgaatacatttcatactaactctttcttccattc

SEQ ID NO: 476377 - DNA, 694 bp, Homo sapiens
caccacttcctctggccctagttgagctgctggttcctggcatggcctgccttctgcaggcaccattgatgtgtctccattgtaaggaacttggagggcatttccgagatctttgcagcaccctctcccataacaggcctggaggcctaggagggaacaatggtttcgcaggccgggcccaggtccctgcttctctttgcagccttggaacatggcacactgtgtcccagttgctccagctccatccatggctaaagggggccaaggtccaccaacagcttgcaccatgcacctggaaaagctgcaagcactcaacaccaacccatgaaacagctgtgggtgctgtaccctgtacagccacagaggcagagctgccaaaggccttgggagcctacctcttgcatcaacgtgccctggatgtgagacatggaatcagaggagattatttttgagctttaagatttaatgactgccttctggaagaggtttgtctatgttattaatctttattttaaagaagtttttgttttcttgatttccctattttgactagtttttttattagcacttttcattttctcctattatcaactgttttaagatttgttctgttattttttgaaactttaaaaatttatgtttacttcatagactttttctctttctgatatactatttaatgctgttgcttttc

SEQ ID NO: 476378 - DNA, 1337 bp, Homo sapiens
gtctagttactgaaatactacggcagagttagaagagtgagttagtgaattttcctgctgtttttgctccgaacgccatgaggagcttctatggctgctttgacctgcacttttccagtctgaacgttatccacccttttcatccttctacacatgaaaataagagccaatctctccccttcataatttcacctctgtatgccggcctcaagctcagccccaacaacaccttaaaaggtgttgagacaaacaacaatctagagaataaaacagggggtatggagagatccaagcagatgaaagtaagaatcacggaggcctttaagccattaatagaagtaaccattacacttgtcttcaagaagcaaggatataataagagattggctgtcagcaactcagaagagggacctcacctgatcccgaccatgctgacacccagatcttggacttccagcctccagctgaaggacagtgaggtgcacctgccactgccccagccgactcagggacagcgtccaggctgtgagcaccagggcccgtatgaggggatcagcagggtccctggggcaagcagcctgcgagagagcaagagggctcagaagccaaccacagaggatccctgccttcccttcagctcaaatgtgaagaaagtacatgaaaaccaggaaaggaccatccagaaggatgaaagtagcaggacttgtgctcatgcaagcccgagaatagtgcctttttccagtgaccagattggaaaatgtcagggttcatggcttcaacctccagtcacgttctccccgcacttggaatcagtggtctccttcaacatcagcagctgcgcagccataccctttatgatggactttcagctgccttttatttccaagaccaagcaccaagtgatatgcagaagctgttctctgctgttcccttctgacactgtgttctggttccccagtgtcagctcccagggctggagcccgcgtgatggaaactgatgtgtcattcagtgcacttattttgagtgtgtttatatcaaaggaaacgcgtaagacacagagcttaggcaggactgctcttgctgggccggatgggcgagccagactcaagggcttgctgaacaccgtgcgggaccacctgtggtatttcacaaggagggtattttagatgtcccctcattttgggccaaagcctaggatggaagcacacaggaagacctgtgtggggagcacctttgatttttgcttcacatttaggtatttggaaagaaaggcaaatggattgcagtactcattcccacaccttttctcccttctctttctctctcttgctcccgt

SEQ ID NO: 476379 - DNA, 1870 bp, Homo sapiens
gtagataaggcttgactaaatctgaagcgcttaataaaaacctgctggttttgtggctcaggtgggcatcatggacctaccgatacgtgacgtcaccccggcggccgagctgaacaccccagtgttcagccactctacagatttccacaaggaaagatcagacaatgattttctccttgtgacattgcggaaggacaagagtgaatgttattcgactttccttgtgttgaatctcacagtgctgctccaggttgccttttacttcaccatcttcatccctgagatcaaggacacctttaattcctcatctctcaagaatgttcattggttcacggaattcattgtctccaccagaatctctggtttcttcaatggattctggcaccacagcaacagccagcttgccatctttgtgggcaccagagttccatgtgaggaggaaaatgaattcaactgctatggtctaaatgtttgtgccgccctcaaaattcatatgttgaaacctaatccgcaatgcaacggcattaagaggtagggcctttaggaggtgaaatgtagagcctttttagttaagcaaggatagttcctagtttgtcaaattccataagatgtcattcatttcaaaacagatgctggttgagtaagaagcaaaacttcaccagcataggtatgttttaagaagtataaccttgaaccctctcctctcagtctgtttcttgtacatacatatttatcgtcaattgaaaggttttgagcgggaggtggtgattaaatgagactattagcaaagctcaagtcaggacggcctgatttcacttctacaccctgtaaaatgacggctgttgaaccgtgtggtctttatgccattagcctatgtaaagtatagataaagaaacagcccacgaaatgccatctcctatggacttgcatgatgctcagcctcatcattcagttgtgaaaaacattgcaaagccatcaaaaagaataaagtactgatcaaggaacacctgcatgaaccttgaaagcatcatgttaagttgaaaaagatgcaaaagatgacatattttatgattctaccaatatagaatatgcagagtaggtaaatccatagaagtaaaaaattggtagtcaccaggggctggaggaaggtgggggaggaaaggaataactgcttgtaagacacagggcttccttagagggtgataaaatattttgtaattagatagagttgatggttgcaaaatattgtaagtgtactaaatgcaagtgaattttcactttaaaatggttattttcatgttatgtgaattttactttaatatatttactttaattaaatatataaatgtatattttatatataatacatataatatatgatatgtacataaatatatattatatatttcaaatatatatatttaaaagcatatatatgtatgcatatatatatatatatatatactttctgtgccctaattggtttagggcagcttacagcagctcaagtaacatcatgtgtcttaaaatgctttgtaagtattaaaatactctgaaattcaaagtgtctttttcttgcaggggaaccttgatatttccaaattcacaaatcttattttgaactacttttaaataatccctgcacattctgatttacaacaaattataatgcaaataaaaataactacccaagaacctgtgagaataaatgtgccctgggtggcttgtgcactagtcacttaattagctggttgcctagtatccctcaattagtggtagtacagtagttgaggactgcagaatacctctggttattcccaattaaggtggcaaagaactactcatgattagcattgttgcagatgcagtt

SEQ ID NO: 476380 - DNA, 907 bp, Homo sapiens
acagcaaacatcagaaccagcctcagatatggctgtgatgttgaaagtttcaaactgtgaatttaaaacagctgtgattaatatgcaaagacctttaaagagaaaagcagacaacatgcaagatcaaaaggataacgtaaatagtgatatggatattttaagaaagaagcaagaagaaatgcttgagataaaaagcactgtaacagaaataaagaatgcctttgatgagctaaatagtagactgggaatagctgaggacagaatctcaaagctgaaggatctgtcaatagaaatttacaaaactaaaaagcaaagaggaaaaatagacaaagaagaaaaaagagcagaatatccaagtcctgtggaacaagacaatcacaaaaggtataatatacacataatggaaataccagaaggagaagaaaaagaggaaggactggaagcattccattacattatagcaaagaacatcctgaggctttagagtcaggaagctttaatctatctccaccattaactaccagataaaagtatttatctgtttttaccctcatattcatgatctgtaaaatggagatcattaaacctacttcataggattgtcagccagattgcattaaatttgataacacagtagtgtacatagcacataagtgcttgataaatggtcagtcatttttagcatcacctcagaaatactttacctccttagttaagcatattcctaggtttttatttttcacagctgttttaaaagggattgagttcttgatttgattttcagcttggttgttactgatgaatagcagtgctgctaatttgtgtattttgattttggaattgaagactttaataaattcatttatcagatttaaggattcttttggaggattctttaaggttttct

SEQ ID NO: 476381 - DNA, 678 bp, Homo sapiens
tttctaagccaatgcagaatgccaggacccaatggcttgctgtggcatcttttggggctctacagaagctgaccctaaggctcccagaccatatcaaagaactgaaactctccagatcatcacatccagaccagaagacagaccccacatccctcatgattcttttacccctcccaaattcctctttacctgcatgtagttacatttcttccttgctatataaacccccaattttagttggtcagggaggtggatttgagactgatctcccatctacttggatgcagcaccagattaaagcattcttctccagcaatacttgttgtcttagtgattggctttctgtgagctttgaccctggacagcagttacaagcaagggcggagaaggtggcaacagcctgcagccttctcttgagatgcacattgcaaaagcaaaagggtcacctgcttaagcaggctagatcaacttcgtcagaactgcccactgacagtgtcttgtcagattgcgttttactcccctagacatcggagagtataaagataaattttacctgaatacttgaggtatgattgcatactatcttcccatgtatgtctacattggttgaatctcactgactaaagttctttgaatgtaattaacattagcacaaaactacaccaaacgttaatatac

SEQ ID NO: 476382 - DNA, 1524 bp, Homo sapiens
aggccacctccagacttcaggcataacccttaaagagctagttctctagcaggcaggcttttgacaatgccttacataactgttgtcagatcaggcaggctgcagatatgtgcatatgtgaaaaggagccaactacctcaaaggcatttcagagacctttatggcagcccctcccatcataggcttggaaggctaggagggaagaatggttttatgggaggagcccagagccctactggtctgcacagccttggggaactttgtctcacatcccggctgctccagctccagtcatggctcaaagaggctcagaggatatgtggaaaagattcaatgtcccagaagaagcctgctgcaggaatggagccctcttggaaaacctatcctagggcagtgctgaaggaaaatatgggctggagcctgcacacagagttcctgctggggtaccacctagtggagccaagagaagagagccaccattccccaaatcctggaatggtagaaccactggcagctcgcatcctgcacctggaaaagccataggctctcaataccagcccatgagagtagccacgggtactgacccctacaaagccacaggagaagagctgtccaaggccttggaagccccacttcttacaccagtgtgccctggatatgaggaatgaagtcgaaggagattattttgaagagctaagatttaacgaccaccctactgggtttttgatgaaaagacctttattgatgagtgtgtgtgagggcaaaggctgtctggtgtgtatagtggaactgagtctggtaatgtgcaggaatgctggttccaggatgcatgatggtgcctgatccagatgacataagtgtgaaaaattccttgtccaaggaggaaaaatatgaaaatatcccatgaggggaaagaaaatccttacctcaagtttcctcatttaacttcaggctaaagtctctgcttgtagcaagtgacattgcagtttataccaggattaaatacttgccaactcgatcaagtatctatattgttctacaatgtggaattatatccagatagatataatgctaaaatttttctaaatcttgggtttctcagggcaggttttatataattcatactgagtattcttatgtcagataaaggtaagtatgtagtggcctctgtcagatatcccaacatttttaataaaatgagatttataacaatgagtataaatatatttgcattatgttttaaagattttagaagcataagaacttttatctgtcagagaaactctaaaaaagaaatcatggtgttccaagaaaataacctactttccgttatcagattttttattgttaaacataattggttgtctcatatcctgattttagaaaatatatatttttactaacattaaatgtactctggggaagggttagagtataaatcatcaagatgtaggacacttaaaattatagaattttctattcttatctagaagcatgcctttaactgagttgaatttaaatgtg

SEQ ID NO: 476383 - DNA, 926 bp, Homo sapiens
cagtgttgcaataagaggtgcatgttatcagtttgctccatgatccgtgatattgagctaaatttgagtcgaggaccacctcactctagtccatcctacacacacttaggtgaagggacgctatacttttctgaggtcaattgttggtcagcaaagagggactcagatatttcactgcatcagccaaataattatttctccaccaatgattctgctcatccacctcctctaactcctttattcacagtgtattggagtctctacaatgtactttttatggtgatcctaacagttttctcaaggacagacataatggagaataacccacctctacatggcaggattttgtcctcctttcttgtgatttgtgtcttctcagtgtgtagcagagctaagaaagtcattagagataagcagcaattgaaaaacactgctggtgtaacatttgcattatggatgagatggggtttcccattggccacttggtgtacacctcatgcaaatgaagttgtggtctcacaattaggctgattggttgtggaaagcaaccaatcagaggctgaagtgaagttacaaatttacactcctacgcaaaaagcaaccaatcagaggtactttctgctttctgcaaccaatcagaggaaaaagtaccattaactgttcatctatgttgaaaaatctcacagtaaatgtttataaaaagcactgcccatatctattaaatgagatactttgtcttatttggtaaagaagaaagttgttcttaatgtataatcattttcaataactgtattaatgaaaggaagaaaataatacgtaaccttgaatttttcatgtctttcttattccaaggatttcaagtgcagaatcaaagacatataaccataataaaatgcaaaatcacaagccctcagaatcagaaggga

SEQ ID NO: 476384 - DNA, 648 bp, Homo sapiens
gtagccagtggtttggttggatggtcagggacttggaagaagcatgattggaaaattggtgacaaggaaatccggggaagaggctgtgtatgctctgaatgagcatctaatatatcgtactgtttctcccataaccaggattcaggggtccaggaatcaaggggtggaagtagaagtggcaccactcaccatcatccctagtgatccattggcaaaacttttgcttcctgttcctgtgacattacattctgctgctccagaggtcttagtttcagaaggaggagtgctgccaccaggagacacaacaacaataaaattaaactggaagttaagtttgccacctggacactttgggctcctcctacctctaagtcaacaggttaagaagggagttacagtgtttgctggggtgactgacctcaactatgaagataaaatcagcctactactccacagtggagatgaaataacactggattttcatcccacctgaaatgacacaataagtctggacaaatacatgatacaatgtttttcaagtacttggacattaagcaaagaaggaaagtcatcccccaaaaatgagggggagaaaaaagtggactgaaattttcctagctttctgtcagagaatattctccaggtcac

SEQ ID NO: 476385 - DNA, 655 bp, Homo sapiens
ccgcgagggtccgcggcttcattcttgaagtcaccacggaccctcgcggtcagtgttacaactcttaaaggcagcatggacccaaagagtgagcagcggcaagatttaccgcaaagagcgaaagaacaaagctcccacagcatggaagaggacccaagcacattgctgctgctggctcaggggtccctggcttcaactcttagctgtgaggactgtctgaaatttgaaagggctagccagggttcccgtggagagcacatgtatgttccacttcccacacgttcactcacaggtcatgtaggccctggtcctacctctcctcccactctttgcagccttgctaatcagagaggatctatggagcacccggtcctatctctcttcccactcattggagcctctctaatcagtcagagaggatctacacccctaaataaacttgaggcaggagcctctcaggtctgttttatgctcgaagtcaaaccacaatatgctctaagtcaaaccacaactgagtccttccagggagaccaaggtcgtcacatgtttaagaacactgaataactgtaattgctgaatgtaacatgcatgcctctaggctcatggcattatactaatcttgtgcatttgccttatatcatctctgtgacatttc

SEQ ID NO: 476386 - DNA, 943 bp, Homo sapiens
cttatataccttctaagctatatgtctatctgagacctctggaatactaattgcagcagctccatcggaggagcacagggctctgggctctgcggacgctccttcccctaatgttccgggagagaggtcgtgcatgcacctcaccacagcttgccttcctagggcactgcctgcccttaccctaccgacacacagagacacatagaacggactctcagagaggctgtacaatgcactgccctgtagagaggacaacaggacacagaactgccagacgccttagacatttggccccagccaaacagcttggtgatgttctctggcatgcaaggggagagaggcacagcagtgtgacatgtgacatttcactctcatcagatgttcctcgtaaatggatcacaacagctgcaatgccccaaaaagagataactatcttgggttataaagatctcaacttcccaatcctaagagtaaccagtgacatgtcctccagaagatggtacaaagctttaaagtgtgacccctgctcttttgcaaatgttctaattaaaatgaagggagatttatgaccttaaggtatttaaaatgactcaagtggcatttttcataaggttcgttccagtagatttgtttggtaattttgccttgcatggctctgacggctcattgtggcccctttagtgcattttttcttttattcacatatgttttaaatctgtttgaaattaattttctaaaatttggaataaattttctgaggaaaggtaaaaacagatccttacaatcagctcctggtttgttactcagatgcatctgcctgagcaacattaggatgagaagctgcagtccatgatcagagttttccattttgccttttctccatgtattgctctctggtttgtcctcagcagttaaatatctcagccattggaactgtcacctc

SEQ ID NO: 476387 - DNA, 821 bp, Homo sapiens
acagcggagcgctgctctgcagaagcagtcacagagctcaacattactgctcggagagtaatcgcctacagcactggaaatgttttggaaaatggacagaagagcgtcgctttccctgcagcaggacatcgcagggagcaagcagccccagcgatgtttgcgaggcgctttggcaccatcacgggcgtggcagaatgcctcagggtgagagccctgcatggtctgaaaacaccatttctaacaatttcactacgagtgggcgtccgtcctctcggggccttggctccggggctgttcctaccgcatccttcaggacggcccgcaggagtcgtcctgccgcggagaggctgccctgccctcagttctctccccgtaagagaagtgacagaggcgatggtcctagaggctccccttccccagtgtgggacttagcagagggcgggtccagcgggccttttacggaggcccccacctttttccaacaaggccccttgctgcatcagggctcttcccgagtgacacagccacgtagatgttccctgtccctcaccctgcgattgtgcagaccctcagtgaaggggtccctcccaggggaagctggtcaggtacttgctgaccgccgacgcacggcctctcctgtggtgctgagcagtcagagaaccgcggacgccggttactgctctacaggccgccttgccctgttcgcatctgcaccacacggatgtgttccggtcccacggacatgacgcaacgcagtttataatcctaacttccatatctcttgaaactcttttttatgtgttactaaaagttttttcccc

SEQ ID NO: 476388 - DNA, 1355 bp, Homo sapiens
acagcttttccgtgagctcctgcctggaatttgagctgtgtcctcatgacctggagagttgctgaagactgtctgtttgctggcatgagagttaagaaactccagggaacccagacacaaagggagctcgcgtgcattcacaggctcttttccattggtcctcaactggatgatcacaagaagaataggagcagagctgaggtccagagaaagtcttctgcaaggatcagtcaccattgtaggaaagagaagagggggagaaatgaagaagaagcctcaccttcaaggagcagtcacacaaaaagtaacaaaacctgcaggctatcaagcagtgattgaaggcagcagcagatgtatcatttccagtctgacatgtaaagaatttggagattgtcactcccatcctcacaagaaaagcataaagctgaacaagcagaaaatcatcatctcttacacctgtcagagaactgaggtcacaggacaaacatctgccctcaatattggggatacaggtgaacacagagaaccattcttaccaggaacagaaactcacgagcagaagcagattgatggcacctgtcagaacacttagactgcaattcatgaatttctgcagactcagtgaggaggagcttgagaattataaagtctgtttgagcaatcaagatgtacttcaataggtgaatagatgaacataccgtgggatatccatacaagggagtagtaccagcaatgaaaagaaatcagctactaaactatgaaaagacatggaagaatcttaaatgcatattgctaagcaaaagaagcaaatgtgaaaagatgatataccgtatgattccaaatatatgacattctagaaaaggcaaaactatggagacagtaaaaatgtcagcagttgccaagcatctggagggagggagggagggaggctgagaacatagagtcccaatactgtgtacaaatgttacttggattagttgttgctaataaagtaagtacatttgtttctgttttaagttggcatttttccccatctctgttgattgtgtgtgagagtgtgtgtgtgtgtgtgtgtgtgtaatatgaaacattaatacgtctccaaatgtcaactattcaagaaagactactcagagaagtgaccctccctccatcctgcttacactctttccagtccaccatttttcttcccatcccaaccattcattgtggacatttccaattattaaaaaatgagacatagaaattatattctatgtgtaaaattgtatcctatttatcattgtaaataacgtcctagttcagcttctccagaagtatggcttgagttaagggcattgtccacactagttatt

SEQ ID NO: 476389 - DNA, 806 bp, Homo sapiens
gaaggagcggagatgcccagtacagtcggcgtcctcctcagtgtgtggaaacccgcagtgctctgtgggaggcacagaaaaacaggaggtgctggggaccaagtgtttggctttaaatgctcaaagggagagtcatgtcaaaggaatatgaaaacaggagcatcagaccatctcttcaactgttactcagagatggacctatctaatgggtattcaggccttcagcacagtggatggctcaaccgcaaaatacaccctgcagatgacagtaaattgctgtccttgtttgggttggcactgtccttagacctgggccctgtgctgcagaaggcaaagagccacctttctatggctgtacccttgcccaagggggatgcagcagcaatgccaaggagacatgctgtccccaccattctaggtcacactatgggaatccaagacactgaagtttcctcttccggggctgtgcaatgtggaacaggagaaagcaaggtgaaaaagtatggcatgggttgggtgtgcccacttggtctttcttcgaaactcacagatactgaggaggaagtcatgggccaggccactgtcatcctcaaatgcaccattttcctaactaaaactggttttcctggtttccttcatctttgcacctgcagttcctctgctcttgccctgtatcttcacgtggcatttgattccaatcttttaggtctgctccttagatagaccttccaccccccttccaaatcttcattagtccttcttcttaccataattaatgtttgggaaaaacattttaaaattatatc

SEQ ID NO: 476390 - DNA, 543 bp, Homo sapiens
catctacaagcatcaacaccatccaggaaaacatgacttcaccaaataaactaaataaggcaccagagagcaatcctgaagaaacagagatatgtgatctttcagacagagaaatagctattttgaagaagctcaaagaaatccaagataataccaaaaaggaattcagaattatgtcagataattttccttctaacagtcaggaccctccactgcaagtctgttggagtttgctggaggtccactccagaccctgtttgcctgggtatcaccagcggaggctgcagaacagcaaatgtggctgcctaatccttcctttggaagcttcgtctcagagaggcagctggccttatgaggtgtcagtcgcccccctactgagaggtgcctcccagttaggctactcaggggtcagggacccacttgaggaggcagtctgtccgttctcagatctcaaactccgtgctgggagaaccactactctcttcctgtcagacagggacgtttaagtctgcagaagtttctgctgccttttgttcagctatg

SEQ ID NO: 476391 - DNA, 726 bp, Homo sapiens
actcttaaaaaggtggctggagctaaaggcatagtcaaggttaatgctcctttttctttatcccaaatcagatagcggatgtgcgtgtgcatctgcatgtgtgtactgggtagatgctgcattcgttattctttcaagtgaaagcacccctgtgaatccctggcagactgtgacaccagggacaatgctggaccctggtgctggtcctggttacccccagtctaccttcctccatggtgagccttcccatgggaccctttctttcagtgcccttggcacatccagtccaacccactggaaaggatgtgctttgcaagggaaggacccattcctccctggagcttccaggtctctctgcacacttacccatctgctccttggtgttcagctttgccagggaacactgagaaaggccacccagggacagtcactacttctccttgtgtttacaaagccaggggggcatagtcaatcagtgattcaaatggcttttgaataagtagtattgcatctccctcagtgcctgggcttccaacagagacttttcagcaaagtgttgggaataaataaagcgtattgttaggaagagactcttttaggctatggctatgctaatttatttaaatatatacattagtaccatgtgaatctgaagatttaaagggactatgagagttctatatgtagactaccccttttatttaagatccagctattgctgatgca

SEQ ID NO: 476392 - DNA, 645 bp, Homo sapiens
accaatcagcaggatgtggcaggctgcccagccagcactggcaacccgctggggtccccttccacactgtggaagatttgttatttcgctctttgcaataaatcctgctgctgctcactctttgggtccacactgcctttatgagctcttcactcctgaagccagcgagaccaagaacccaccgggaggaacgaacaactctagacgcgccaccttaagagccctaacactcaccgcgaaggtctgcagcttcactcctgagccgggagaccacgaacccaccagaaggaagaaactccgaacacatccgaaaatcagaaggaataaactccagaggcgccaccttaagtgctgtaacactcaccgcaaggcaaattggatggctcctaggtgccacgcattgcaagcattgaactagactttactaacactaaaacgaaagaaataatgtcccttttctcaaggccctcacaatcttgaatgtcagacccatgatttaataaattttactgctagtaaagcactatcactcctctaccaaagataattctttactcaaaatgaccgaagctaagcatttttatttatttatttatttttcttttttttaattatactttaagttctagggtacatgtgcacaac

SEQ ID NO: 476393 - DNA, 1085 bp, Homo sapiens
cctgagtcaccttctctccttggcttctgtctgggggctgcctgcaccgattcgaagcagttatcgagtgctcgctgtgttccgagtgctgcttcctcccaattagctgcgctgaagacgaggattgtaggaaatgagggagcatctggcaccggagatgctgactcccaggcccacctccaggccatgctggcagaagacgcaaattctgaagagttccagcgctgccattcgctatttcagagggtgctcttcttggtacagatatcacctgattctaacatgaaaatggaacagcaagaggaactggtgaagggcctggagttgcttaaaattaaggcagccgatgggcgtatcatcagatccccttgtgactcaggcgagtcaggctacagagggcagctgcgctctgctgggggctcggctgtggagcaggaagaggcccatgaactctgctctcctcttgcttggcgcactggcctgacctgcactcagcggccacaaccttccattacagcttcctcggggcccagatattgttctcatagcttcaggtatgagacagagtttatccacttcacactgcatgccacaaaagtgttcaacaacgcatctgtagtagcctcacagatcaatgctgtccgtaagcttagtaaaggtatttctggctcaggggcaagatataattttgtgtaagttttgcatattcacttgtataactatgaacatcaactttcagaagaaagtataagaatatgataattgaatgaatgtctcttattgctattgaactcaacatagaataggttatacctgaactatacaagttatagttaacaaaagaattagtgaatatttgctcacctgtaaaatgggcactgtaatagtatttgcctcatgtacttctcgtgaggagtaaatgaagtggttcgtgtaaggcttttagacttgtgccagaactgtaaatattattattattatttaaaattttaattattgtatgtatttttaaaatttgtttcttgacagggaggttatgtaactatcctccaatattctatgggagaatgaggcttaaaacccac

SEQ ID NO: 476394 - DNA, 575 bp, Homo sapiens
ctggtttacacttccctcagcagcagctccagagtcacctgggagcttgtggagaatgctcgttctcaggccccagctcaagaccaacagaatccaaaggcctgaatggagccccgcaagctgctttaaccagccctccaggcgatgcccatgcaggcaaaagtttgagccctgctgcattagaagatgtcaatatacttcaatggcaaaggatgtggacatttatcatggtgatgctataaagcaggagactttgcctctaatcccccatccttttccagatattcgtatcagcccaggtgctggacctgaatccccaggagtaaaaagtggcaatctacattcatgccaggtccccagattattcttctttcatgtaaaaaacgtgacagttccacactgcacggtgctctctcctaggctacgatgggcacggggactccagtgcccagctcccacttcccccaggcctggtctcctccctgcctaagctccaaccccagcaaccttgttcctttacagctgttgctgttggtcaataaaagtgccacacagagattctatatgaagccaac

SEQ ID NO: 476395 - DNA, 627 bp, Homo sapiens
ttgaaggacttgaatggacctttctctaaagaagacatacaaatggtccataagcacatgaaaagatgcccaacatcgctagtcattagggaagtgcaaaccaaattgagaggccacctcacacccatgaggatgactagtatcaaaaatcaggaatttacaagtgtggatgtgaaccgtcaggtaaccagggctgcagtgagagccacagatttcatgggaagtggaagaggagatggaaagaggactcctcccagagcctttgaagttgccatccctgcttcccttccctgccctgtgaatgtagcctatagcccatcttctttccagggtcctgtttcccattcagttattggagactttctgacgcctccagtgtcctctggtgatgtgttggggtcagttgggcatggttgccggcattccatggacacaactcaccagggagcagtcgtgtgttttaggaaataattcactaatcatgggtgaggagtgctttccccaaattttcactccaagtaatgtgaaaaagaaaataaagctggcttgattgatttaatatacccaaatcatctatttatttgggtagaagaacaatagtaatggtacatgtgcacaatgtgcagg

SEQ ID NO: 476396 - DNA, 584 bp, Homo sapiens
gctccgccggggtgataaggagtgaagtgaggagctgggaaaagtatgggagcatgaagcagacggcatgggcaggaaagaaagcggagccggctccaggtctcactgaaaccaggacgacaaggaataacccccagagtctggatccagaagagaaagaagagcagaagcagcaggtagagaataagcagaaaatggagcctggaacagtgctattgcctggggctggctttcgcagggaagccttgaagggcccgttggtgacatgcatacccaattccctgacctcacatgcagcactcgtgtcatctccattccacacgacaacccccaaaggccatgaggccgggcgcatgggaagcgatgtgcacctggccttcctggaggtgcagtggtcacacgcaaagtcctgtggcagacaaggagaggctgtgtacagctttggaggctgtgcagtgcttccaccccatctgtggacacctcctcctcccaatcttgcacctgtatcctgtgctctcggcacactgtgcgcttgtacttccctgcgttctgccggttctctgatgcctctgagcctttgacat

SEQ ID NO: 476397 - DNA, 814 bp, Homo sapiens
tctgcaaatgcatctcctactactttgtcttttactcgacatgctccagctgtatctgaatattttcctgcccttcaaaagggtcatatgtttctccatttcagcaccttcaccacatcctgtccttctcgtttggaacagtctttcttcactctccacccagccaggtcctcttcctcagattgaccttcaaagttttcactggacgtgcagccagggcaaagttcagctccaaggtccgaagtcaaattctaaggtcaaggtccaggcccaatttctatgcctcaggtcagatttgatgtccagatgggagcaaggtccaagatccagcttcaagatccaggttttgatccactttgcagatccaggttcagatgcaagatacagatccaaatacaaggtgtatgtcaaaggtccagggttgatgtttgcacccatggttctggtaccaaggtctaagtccagcacatttgaaggtcaaggtttcttactattgaaaactgtggccacagtaagtccaacatgtgactctccagcaaactgtaagaacacagctctgcccacatgctgtgtgagtgtgcatgagattcccacaaaagagaaaaaaagaaagagagcagttcttgagtgtgagacactaaactcaccaggatgccaagcctccatgctccactcacaagcagtttcaaataactacttacagcttgtagcaattgagtaaagtatatttctggaacaaaatttggagcatatttgtttctgtctacttgatttatccagatttagaaactacttgtgagtactcttaacttac

SEQ ID NO: 476398 - DNA, 972 bp, Homo sapiens
actaccgcagacacatgaacagggaatggaggcccaggggagggacaccgtgaggtggttggtgtcacagcttagggaactggcaggcagcccaggggccaggctcgccccgtcagtctacctctctgtaggaaattcaacctcagatgctttccactttgaagaaatcacaggaaaagtgcacacatcagagtggagaattatttgctggcatgtccacattctagacactcggttgaatgcctctgtccactctttccagccctacttcctatattcatggtccacctacaagcacacatgcaccttcaccctaactgcagaaatatgcatggcttcacaattgcaacacccaaagatgttaatggatttaaatctagggactgaggatgactgcaggttcttcctccatctgtttcagcgaaatttcataatacaagtggagagaatcatgaatccaaaccctatgtcaccctcacctagttgcaattgtcaatgttttgccaatcttctttcatgtatcccaattatttttcttttcaggatactctagcttcataattacttttattggctcctcgacccaatgttatttggtaatttattaaattttctcttattcaagctgtttttattttcactaagatgtttaatgttttaatgtgggcaatgcacatttcatttttttgattcctgcctatttattgttttcttgtgttggctaggttttctaactggtgattgctagttcataagagtggtactattcattttcttctcttggtataatattttatagttttaaaaatatttcatgtgtttcatgaaatttattaaaatagagaaaatgtaaaagaagaaaattctcttaatttcaggtatagtaatcattagcatttcatgatatatcatttcaggccattttcctttatctatttgaaatcacactttgcatacaccattgtgttcagg

SEQ ID NO: 476399 - DNA, 1541 bp, Homo sapiens
aagaggaacagctccagtctacagctcccagcgtgagtgacgcagaagacaggtgatttctgcatttccatctgaggtactgggttcatgtcactagggagtgccagaaagtgggtgcaggacagtgcatgcagcgcaccgtgcgcgagccgaagcagggcgaggcattgcctcactcgggaagtgcaaggggtcagggagttccctttcctagtcaaagaaaggggtgacagacggcacctggaaaattgggtcactcccaccccaatactgcgcttttccaatgggcttaaaaaatggcacaccaggagattatatcctgcacctggctcagagggtcctatgtccacggagtctcactgattgctagcacagcagtctgagatcaaactgcaaggcggcagtgaggctgggggaggggtgcccaccattgcccaggcttgcttaggtaaacaaagcagtggggaagcttgaactgggtggagcccaccacagctcaaggaggcctgcctgcctctgtaggctccacctctgggggcagggcacagacaaacaaaaagacagcagtaacctctgcagacttaaacgtgcctgtctgacagctttgaagagagtagtggttctcccagcatgcagctggagatctgagaatgggcagactgcctcctcaagtgggtccctgacccctgagcagcctaactgggaggcaccccctagtaggggcagactgacacctcacacggtggggtactcctctgagacaaaacttccagaggaacgatcaggcagcagcatttgcagttcacgaaaatctgctgttctacagccacggctgttctgcagccaccgctgctggtacccaggaaaacagggtctggagtggacctctagcaaactccaacagacctgcagctgagggtcctgtctgttagaaggaaaactaacaaacagaaaggacatccacaccaaaaacccatctgtatgtcaccatcatcaaacaccaaaagtagataaaaccacaaagatggggaaaaaacagagcagaaaaactggaaactctaaaaagcagagcacctcccctcctccaaaggaatgcagttcctcaccagcaatggaacaaagctggacggagaatgactttgacgagttgagagaagaaggcttcagacgatcaaactactctgagctacaggaggaaattcaaactaatggcaaagaaagaaaaaagaataaaaagaaacgacaaagtctccaagaaatatgggactatgtgaaaagaccaaatctacgtctgattggtgtacctgaaagtgacggggagaatggaacaaagttggaaaacactctgcaggatattatccaggagaacttccccaatccagcaaggcaggccaacattcagcttcaggaaatacagagaacgcctggagaagagcaactgcaagacacataattgtcagattcaccaaagttgaaatgaaggaaaaaatgttaagagcagccagagagaaaggtcgggttacccacaaagggaagcccat

SEQ ID NO: 476400 - DNA, 693 bp, Homo sapiens
ccacgggtggcaatggtctctgcagtcgtatgtcttgcccctagtctacctcatgcagataaatgcaaagtaagcctcgctctcattgatggactcatgcccctccctagacgccctcaaccatcagatgaaatactcacacagtatcaagccctcattgcagtaatttatccatttcctgtctgtaatcaatttataagcatgcttttttcctataaaatagggatttttatagtactatttttcttagaaacattttgctttagtaactggcaacgttcagtttcttcacctgagtggtggttgcatatttttgttccctttgctgacaaaaagaaaaaagcccaagaagaagttataatgaggtactggaagattttcctgaggagagagtgtcttccagtccatcaggtgctagttcatcaactagcaatgggagaaatcccagagaggattctggaatatgcgaacactgtagaccccaaatacaaagctcaagggagagccctgggctatgctgtttcagaaaagggaagttaagtataagcaaatataaagaaaaaaagcattcctctttcttctgaagtaataatatagattacaaaataataccaaaaacaaaaaacaaaacaggcagaaagcccataactctggtccctagggagagattgactgagataagtaccaaggttc

SEQ ID NO: 476401 - DNA, 916 bp, Homo sapiens
ttttttaatgtttgttgcctagcacatgcggctacccactgaccgccagcaaacctgtgactatgttactttatatgacacagatgattttgtagacgtgattaaggatcctgaaatgagaaaattatcctgggcccagtgtcctcacaaaggtcttttgatagatttattcaattcctctgccagagagacaagatggcccacgaataatggtggcccccagcttggtccagacacccagaagatccccaagtggatcaaaccaccgcccctctctgcaaggcgtcttctgatctcccatacaagaaaaggcagtgacagtctgtgtggtcatccagctgatgacgatgtgagtgtccttgggatccggaagcattccctttgcggtgtcatagataccgaagtaggcagctcggataataccctgcatagacacgttaaagccttggtacaggcccttaatcccatcagatttgtagatcttaaccaggcagtcacagaggcctcggaattccctttcagcttcagctttacccacattagctgctagacagctaaggagtgctttcacttcctcaggtcttagacgccactgagactctgatagaaacatctgagttgtcttccttaaaaaggaaagagagagagagggagaaagagagagagagagagagagagagagagagagagagagaaccaaaagatgagcacagtttcagaacacagatgtcacaaggacaagagcatgaaccagggctgagtattaatacgaataactttctcttttatctgtataaccaaaacatcttttcaccccgtaattatagctacccacttaatttttgcaaacagatgagagtacattgggttaagccagtagtgtattttcaatctttacctcttccatttctatatc

SEQ ID NO: 476402 - DNA, 812 bp, Homo sapiens
cttttcctactctaaaacctaacctcgtggcactacctttaactgccatgtcactgaagatgtttcagtctctcagtgagcttgtgccccgggctatgacttttacaagtgcttctctggttttactgtctctaggagctcttggattcttggcaggaccccttcgggttctcagtgtcctcctattgtatggatatcggttggctgtgcctccttttggaccatggtggtttggacttgcccagggtctactacagtcacttgctcaggtcaaggtggaccacacagacccagagcatgtggcaggcaccctaccctgtgcccagggcttggagctcctgtctggctttgcctctgctcctaccagcaggaatatttcagcaacaactgctcacctcctgctgtgtggcccagttactaacaggccacagaccagtcccagtcagcagccccagggtcagggacccctactatagaatttaaattgggtagaaagtggatttagaattataatatctcccttgtgcatggactcatcattaaaatatctatttactagcagtagcaaagcatcgtgtgctttcttttgatactagatagggtggaggcaattagacaggatgactccctgaaatctttgagtgtcgttatttgaatactaaaataagctggaaaccagtttaagactattatttatgcaattgagctccttcaacctgcttgatgaacagtactaatggggtcctgtgtatggtgttttaatgcatttttaaaaagacatctggaaatttctatttctattccacttcact

SEQ ID NO: 476403 - DNA, 504 bp, Homo sapiens
aacctacgtgattatcagggcagggatgaagcccacttgatcatggtggataagcatttcgatgtgctgctggattcagtttgccagtattttattgaggatttttctgcaggtctgttggattttgctggaggtccactccagacgctgtctgcctgggtatcagcagcagaggctgcagaacagtggatattggtgaacagcagatgttgctgtcagatcgttcctctggaagttttgtctcagaggagtacccagccacaactgtgctgttttggttactatcactttgtagcagaagttgaagacagtgatttcactcagaaagaatgtccccggaccattcctatcattcaccctcactccttaataagcaataaattatctatgagatatagctgtgttcaaaaacttgatgtaccttatgaagaaaaaaatgaccagatgttcctagcagaaggctggggctgtaacaataggcctctgggacagtgggactgacac

SEQ ID NO: 476404 - DNA, 728 bp, Homo sapiens
ccaactaaaaatatggtgaaaaatgataatctggtactctttagaagactattgtagccaagaaataattaatgattcggaggaagatgcaccagttgtttccaaccaccactcgagcacctgcttctgcagccaggatcctgttgaagacagtgtggctatagagggcagcatgcacggttttcctgtcatggttttaacactagccatctaccagggtgctaacaatccttctggaggttctgctgttagatgtctgcttttgcctggtgcacaagctgctgtcatgtatcctcttttacaacatatccacatcatgtactacctcaaagaatggactcagagaagtcagacaaagccactggggaaggaagacttaaggagtcccctggggcacagtgaatttgatatccctgtggagagacaatctcttcctaacaggattcctgggggcagagctgagaagagagttgtgtttagctttcaggagtcccataagaatattaagagattgaggcagaggcaaacaatgaggcaaattataaaaacccaccactcgtaatttgcggtggccccaaggaagggaagaggaaacgaggttattcccgttccattacagaaggcttttaaacattccaaatattctatggtttgtctcttcatgtcagaactaagatatacctttcccatatttatcaacacgttagcaaaatatttacttaatcttg

SEQ ID NO: 476405 - DNA, 2539 bp, Homo sapiens
gaaaccatcagtataattcaagtttcctcctcaaactactcaaagatgtgtgctcctcaaggttctctcttgggtcctgctctcaattcttatacctcaagtcttgctgccatcatctccttcttatgtatggtagaatctccaccagcacagtttcacctgtgcgagcacactgctggcattgagtctcctggaacatacacccccgtgtctttttctgggtgtcaggccctggctgtctgtccctttatactcaccctcacaccaacccaaagtataacaagaacatctggctacagcggtacctcctccaaacctgcagagcaccaatcacttttacatgctcgtcttgagcaaggaacactgaggaccaatgagaggctgcttccgaataagaaggccgcagcagcacactatagctatggccagaaacgacccaaccgtggggtgacactgagccagtgtgagcatgtgcaaaccagccagtgccgggaccaggacatgaggctgattgtggagagtgaatgcatggcccctggcaatgcgagcctactgataacagctctgcagccttctctgtgtggaagtcgatgccctgaaggcctgctgctcacagcaaccacagcttccttggaagcctcccctgtggctccctgtgacatgggcctctgcactgtctgcatgcccacaccatcggttgatgatcctctgtgtatgagacacctgcattcagcagggctgcttctaggttgctcagtgaatttcagaccagtgccagccacatctttaaacccagatctgatgggagctcacccccaccgcttctgtgttgtgtgtgaagctgccctttatctctatcttgcctcttgctgctgggcagtgaagataaaaggtgtggctatgcctcctgcagaagagaagcagggaagaaatactacatacatgtgtggacatcaagagccttgggaaatgggtggcagtctatcatggagacgacttttacacaaaaagtgtggcctgtgccagaaatgtgaggatgaatccttggagtacaatgtgatgctcttccctaaagtcaaaagagaaatgggcaccaagaacgattgaggacaagcagtgtgataaaactctatgaagctctttgaacttagtatactgaaatcagtcttgggcactgttgtatgccagtagaagtttcaattatctattgtcatgtaggaaaatatgatacttctgtatgtttactccgtatcccacaatcttgctatactagcttactagttccagaaatttatttcccttgattcttcggtgttttctatataaacaattgtgtcatctatgaaaaaagacagtttaattccttcttaatatttaccttttatttctttcttttctcttattgcattagctaggacttccagtatgatattgaataaaagtgaatgcatagtgatgttttatgtgttttaagtttgctttcattgccctactttatggatttaattttctcttatttttcattcaatataatgtttttaatattactcatttagttatttgtggccttagttctttctgctgaatgatatcacagtctacgcatttaccacattttatttgttctttcactttaataaaagcacatagctttccaaaaagttttgcctcaacaattagcactatggtaagtaccttgctacatgacaatacatctatgaacaagggtttatgtagggttacacctcacaatatttgtgtgtgtttatgtaaaggcagtaaacacatggaatagatggatacactaaattcagggtatgtttgcatgagataagaaatggagggaaatttaactgatagagtgaacagagaagactacaacttgcctaaaaatgttttaactttaataaaaacatctgaaacaaaatggtacaatgtgatcaagaagaaattcttaaaaataggcacatgaacttttggcatattattctaggtgcatttatataatttttaaagttagattcatttctgctgtcagaattcagaatctattaggagacatagcaaaaaattacatcacaaaatataacagtaagtcctacagtttaaatgtgcccaacatatattgcttatgtgcatgaggaaggtaggcatggaggccctaaaacaaaatacatgactgagaataagcttccaaatattgctgtatttatgtgaattttggattgttgagtactattgtgctaggcatatggggaaaattcaaggcaaaggtaacaagttgtgaaaagtatggaattttggagtttttagcaaacagatggaaaatattttatgtgtgtggagcagaatttttatgacatgatagaaagaggatgaaatcgaaagttcaacccagaaaagtcctgccaggttgtgccagccaacggtaaggctaatagacatatttttactctgtgggccaactaaaggagtgtaatggtgagagaaagataattctcttgtgtcagaaaactcttacaaattctcatctctcaga

SEQ ID NO: 476406 - DNA, 844 bp, Homo sapiens
gacttccatctatgctctctcagggcaagtttcacagccacgaagaagatggaaaatatgaagatctcaaaaagcagataggcctgagtaagtacaacccatttttaataaaggatgataaatttcaaaacaaaggaaaagggtgttcaggcttctatcacctgcaagctgtgggaagaatgaaagagtgtttctcacagccacagcagcagccagagcgccagcacatgcaccagcttcctgaggcccggtccctatcagccaaggaaggatcagagataagatgcctgccagccctggtgaaggaagaactagagagaactcaccagaagcgctcctttagttatgccacttgctgtgatagaggccatggaatgggaggggctgatgattatccaagtagcagtcagcatggatcagagaagacttttaaaagatgtagctcttgctaagccttgaggtgagttcatatggtaactaaaaccatttctgatggtaaaatttgtgcacacattgaaaccaaatcaccaaattattatttgttaaaattagtattcacacaaacacattgtaggttataggaatagataattttccttgattttcttctttagccttagcatttgtcagaaataggagccaataagaaaagtccaggtatgaggatttttgtctttacatgcatagaagtcagcctgcaaaaccattgtgagaataagtgatgtatcattggagttgatttcctaggattgctaaataaaggcattaagaggaaaccaaatttacattattttttataatttgttaaacacatgattatttaatgtctaataatgccatgatc

SEQ ID NO: 476407 - DNA, 525 bp, Homo sapiens
cagcagagcattacccgccaagatggtggtgaagccttttcttaccttctcagaccatgccaaactgttggataggactttaatctgtgtgctaattctgacagcaacgcctgtggcagcaaaggttttggctattacaaataaagctgttatgaccacttatatacagatttttgagagctcgtggagaaaagctattgaaatggaagaaaacagaactaaagaaccaattcaaatggatgctgaacatagagaagtattgccagaatcattacctgtgttgcacaatcaaagagaatttagcatggctgattttctcttagaaaccactctatcagattttggccagtctcattcgactgaagagaaagttatttcagattgcgagtgtgtgcctcagaaacgtgctgaccagtcacatagatgaaccaccaacacaaaatcagtcagatttgttaaataagaaagtaatttgcaagcaagatttggaatgtttagccttcaccaagctttcagaaactagcc

SEQ ID NO: 476408 - DNA, 582 bp, Homo sapiens
tttttcttttcctgaccatcaggattatcatggcaactgctctgtggaaatgggggacagtgggcatcctatttgtgcggacttctccttgcacagttcttgagctccatgggcacgggctgctctggtctgctctctgggcctcagtcaagtgtgaccagtgcagccttacatcccgagccaagcagctgtcttggggatgctgctggttcaatacatgttggcctcaactgtgcaggacctggctgtatcctgggaatatattataaactgagttacataaaggcagagcaaatgctaaagcaaactgtccagaaggaaggacagcaggatgggaatcactcagatgtttataaacaatgggtcctttgctcttgggggaaagcaaaaagatcattgagggtgtgcataggacttggaaatcagaatgtttttctaagcttctatgcacaagaagaaatgcgtatcattaaatttggcatacaatcaagaaagctagaaagcaggagagcattctcagatatttcaaggaaggtggtgtgaagtgtgagatccagggtgaaggatggctctcctctgctc

SEQ ID NO: 476409 - DNA, 1452 bp, Homo sapiens
cagcagtctacgggtggttgaagtatggccgctgggattgggcaacacccagctattgttacaggtacatatactactaagcaaattttaaagcaaaacagtcctccttctctggattccagaaaaatacaagaagcagacacgattgctcttggaagaaactactacattatttctatctgtaaggtcctaaatagcaggcatgtgactaagttgtctatgcattcccagggcattctcaatgtcgtatgcaaagagggtgatcagtgtgtgcttgttgcattcatctatgaattcagtagtctgaacagatgtttcactatgacaaaattatccattttattatggcagagatttctagatatctaccaaatccctattcctttccttctattggcacagctagagtacatataccagacttattatagcatggctgcagcaatgtttccattaagagaaacgtacaacagttctatcaaatttttatatgactctcctaaacaatagttttacatgtttctcagtctcactttctcagtctatttttgtttctaataataaaaactggtattaatatactattaataatttatcttcacacagaatttttaaatatttatttgctgtatcttactttgtccaaatgagttctagataaaccaacttaagtcagatgaacaaacattcaaggttttttgggtttccatatttcacagttttatctataagggaaatgcaaaatatatgcaaatgattagagaaacaatcctgctatgtagattataaataaacacagtgaactactggctcacagacaggatataaaatgggacaaaatgatgtcttttggactagtctttttgaataaattttattgtgcagatgtaagatatacaacatgaagttatgtgaaacattagtaaaatggttactatagtgaaggaaattgacatagtcataatcttgcatatttactcttccttgttttgtggcaagagccactaaaatctactcattttacagtaatcccaaatacagtactgttttatcatccatagttttcatgtactttagatctctagaattactcatcctgcatatctgccacattgaatctatcctctgacctacatctcccaaattccccccactcctgccccttgtaatcatttttattctctttctttatatatttgaacttttgagattccacctatatgtaagattgtgcaatatttttctttctgtgtcaggcttatatttcacttagtataatgtcctccaggttcatccgtgttgtggaaaatggcaggctctccttaaggctgaataatattctattccatatacatttgatggaataagtatccatgttacagtttctttattcattcatccttcaatgaccacttaggttgttttcatatctcagctattaatgcagaatat

SEQ ID NO: 476410 - DNA, 524 bp, Homo sapiens
gcttgacaaagtcacacacctagtttcaaccctggatacttggattgggtttcaactttctctttgattcccatgagtttctttgccatgcagattctgaattttatatctgtcatttcagacatctcagtgtggctaagagccatttctggggaagtagtgtgtttgtttgtagtgaaggggagtggagcaaatttactgctcttgggcactgcttctgtggcctctattgtggctagggcactggcgccaggctgctccgggtctgagacctgtggaggtctccatggatattgcatgttgtctcctcaacaactctgggcgctctatcagtttagaggccctggggaaagaagcagagagtggaatggtggctgccaaggaatgagaggaggggacaatggtgagttgcggtacaatggttgtaaagtttcctttatgaaggatgaatcacttctagagatctgctgtacaacattgcacctacagttaacactactgtagcgtgcacttcaagatgtgtt

SEQ ID NO: 476411 - DNA, 588 bp, Homo sapiens
ttctgtttacatccttctccactgcctccagcatcattcaaggcgttcggggtacatgtgcaagttcaggcagccgagtccttacgctgtcctggtgcctcctcagtgctttctaagagcacaactcgaagacccatcaaactcatcaacatcagggcattccggacaaaaagataaaacctgtgtgctcctggagaatagcccacttcttcccaaagctgacaggaccatagctagaagtaacacccagcatcagccgacgcagagaatgacggacttgaaattgactaatatattttataaaagccattttaggaagataaacacatctgaggccacaggatacattttagaaattctaaatggcttcactctctttgggccaagcagctacttaaatctggctgacctctttccctttgacacccttttatgcatcctctggatacttcttgctcagtgctattgacttcactttcatggataggattctacttcacccttaacttcagactgcactagccaaccccccaacctcttaattctagtgtccattcgcccccttactggggtacgggactctcctgg

SEQ ID NO: 476412 - DNA, 2323 bp, Homo sapiens
gctgcagctccacagattttaatcttcttcctactagcaatggttgctgggcctggctcgaagccgagcgcctgcagatacatccagagatgctccttctcgaaagcggtgaccgaggccgagctcatcctcgcggtaggcacggtggctacaaagaaaaaaagcgcaagccccggggactcggagggccctcaagatccctccctacggtcagcctgaggtcgcggtggtccttccattgccaacgcctgctcctttcacgcccagagccatttcacctcaaagggccttacaacctccgggaaactgagtttctaacggtacatagaagctaccactccactcctgtaaaggttaatccttctgtgcctgatgagcctataatggcctttgctggaggattttccatgcaagacagtgcgattctcctcaggacccatccataccatgctgctttgcttctagacctacaactggactcagtcccaagggaagggaagctgaaaacggtacacgacaggaaggcaatcttcccctgaagtccggccagctccagtcagattcttctctgaagttatgtcatcaagttgtgcctttgaagtcaagccccttctctctgacatccagctgcttctcccctctctgccagctgagtctgaggtttttatagaaataggatgggatggggtggggttactaatatggacattacatttaactgactgactttttaatgccactccaaacttgcatttcagggttgaaccacacttgagcatcatatatcatccctttatgtattgttggacctgtcatattaaattttgtgatgatttttaaatctatgtttgtaacagatattgatcagtagttttcattttttaaatttctttggtttggtatcaagatataaactatcttgcattgttcttctgatcatatgagggataaatttacctaaatattgttcagaccataatattatatccatataaatgccagtagcaagagttgaatcaaccacaactgcctttgtaattatttaaagcatgtgtgcctataagagagttagtacaagaccaataactccataactggtagaattggaagattttaatagtgcttaacattttgtacgtagctttataacagttttctttttctttttttctgagacattcttttcaatataccccatcatggttgaactcaaagtcactccttatttaaaatctacaactgctgacattttgtatccttcgcattccaggaaatatattctgtgtcacgttatttccatgaaaattgtttgaatttgtgctatggtctagaaaatgttaatttttatttcaatatgactaaaggtaatttgatttttctagtgctaattgaaatatttttcccttcctgattgtttactatttctctaggatatacataggtgtaggtttatctccattgtagcttgcttagcaagcattgaattcttgaatatgcagattagtgtcttacaaaagtctagagaactttcagccaaaataccatcacatattgtcccttcccagttcctttcttctatgagaacactcactaaacacatgctacactttctcactgcatcttccatgtctcttaatgattctgtccacattttgcattttttcaaattatctgtaatgcattctgaaatatttattaactctcatcatggccatgtctaatctgatgagttcatttttgagtttttaatttaaaatactatatttttatacaaactactttttgaatttgctacatcaatttttttagtctcctaaaaatatgttcattttttaaaatttttttaaagcaaatgtgctttataatctaacaatgatatttctactaatgaacctttgtggatctgtttgtactctttttctgcttccctttcaaatggtggaatatcatttccttgtgtacttagatgcctttgaatgacaaatatttatttttctttgaaaattatttttgtgcacttttgaggattagttggaagaaaatttgccaaagagaatttgaatttttttgtgagtctactaaaggcaccaccattctgggaccaccttatgttaattcttggcctaaaggtgtttggacgtatgtttggactgcacaattaaacactttttaaattaattgctgtaaatcattaatgattgagtttctttaaatctgtccaatctcaagtcattttcattggcatttgcagggaatgtgaaatgggactaatttacctctgattcttctttatactgaggatataaattttggtcctagcttt

SEQ ID NO: 476413 - DNA, 605 bp, Homo sapiens
gacagtgtaaaacataatgcttgtaaaatatgatggatgggaagctgaaaagaaaaggagaagtccacttgccgttgaagtgcttttgacagccgtgacagcagttgacagcagtgagccggctctggtgcctgaaataacagtaaaatctataactggtgtaatttttctactggctttcttgcgtttgaagcatcctgaaattatgcatccctccagaaggggtaagtggacctgcatggaatccctgatcctgctggaagagaatactcctgatgctcggagtatgaaaacaggaaaaacaaaacaaaacaaaactactcttgaaggtgaaggaggaatatcactgagctcaccaacacagccaggaaaaggaacagaagttttaccaggtttcttaaatgcctacaattattttaaaggaagccgtgtgtccaggaaaaattgagacatatggaataaattactaacccatttctccttgaaatccattagatgcttaatgattttttacatatatttctgaattgaaaagctacttgtgaattatttttataagcatatccttatgtaatgttttgtttttaacagtgaattgaaggttt

SEQ ID NO: 476414 - DNA, 589 bp, Homo sapiens
cacccatcacccaggtattaagccaagcatgtacttgttatttttcctgatgctcttccttcccttgccccctgacaggactcagtgtgtgttgttcactcccctgtgtttttgtgttctcactgttcagctaccacttataagtgagaacatgtggtgtttggttttttactcctgcattagtttggtgaagataatggcttccagctccatccatctcactgcaaaggacatgatctcattccttgttttggctgcatggtattccatggaatatatgtaccacaatttctttatccagttcaccattgatgggcatctaggttcattccgtgtcgttgcaattgtgtatagtgctgcaatgaacatgtttgtcaaagatcagatggttgtagatgcatggtcttatttctgagttatctattctgttccattggcctgtgtgtctgtttttgtaccaggctattttggttactgtaaccttgtattatagtttgaagtcaggttcaagaggtacatgtgaaagttaatgacatgggtagattttgtgttgtagcggttagcttatctcttaagtcaagtcacttaa

SEQ ID NO: 476415 - DNA, 944 bp, Homo sapiens
cagtctcggcaccatgaacagtgccaagaggcagacagactctggggaaaaaaagggaaggtccctggaagagccccatcttcaagccaaggaaggcctgaagcctgggggccaggctgcctgtcctgccgatctgaatgggaatttatggggctctctccaggcccacccatggcttcccatagaccaatcagcacatgctttctctcctatgaaggccagaaataccccaggcttggccagactcaaagagagactacaagatgtaaaggcagagagaagtgagaaagttgcagaagaaaagcttgaaactagcagatgtaggttcacgaggtttaaggaaagaagtcatctgcataacataaaagtgcaaggtgaagcagcaagtgctgatgtggaagctgcagcaagctttccagaagatctagctaagatcaatgatgaaggtgaagacatcattggaagaaaatgggataatgaatttggtgactttaacttgaagccaatgttcatttaccattctgaaaatgctagtgcccttaagaattatggtaaatctagtctgcctgtgctgtatcaatgaaacaacaaaacctggatgacaacacatgtgttcacagcatggtttactagatattttaactccactgttgagaactattgctcagagaaaaaaaataaaaatttatttcaaaatattactgctccttgacaatgcacctggtcagagaacctacagatgagagctcgccttgatttcagcccttgagaccatgaacagggaaagcaagcatgctgtctctgaacttctgattcagagaactgggagctaacaaatgggtgttgttttactgctaagtctgtggtaatttgttatgttgctaaaggaaatcaatgtactctgataacacaagcagacagataaagaaaagttgtatactcat

SEQ ID NO: 476416 - DNA, 502 bp, Homo sapiens
cagactgggcgatagacatgcttcaggccatcaccattagccccagcacttcctggttggtgagatttaaacataaaatcacaaaacacaatatcctgggtttactctttttttggtccctcaatttgtctttcaacagtgacatgataagttacattgtaggtttttccaatgtgacccagataatactgaatgtcaataaatactgctcactttccccaataaatgtcatcatcagaaggctgtttgttactctgtcgttatccagagatgtcttccttgtaggaatcatgctgctctcaagtgcctacatggtgattctcttgtccaggcatcagaggcgctcccagcaccttcacagcactagctttttattaagaacctccccagagaaaagggccaccaaaaccatcttgctgctgttggagtttttaaagatttcacataaatgtgaaatcatgcagtacttgtctttctgtatctgacttatttcacttaacat

SEQ ID NO: 476417 - DNA, 1948 bp, Homo sapiens
gaaaaaacaaatttaattgatttccaaggtttgtcaaggaggacagaaactcagagcaccctgcacttggggatcggcactaggagctgctctctggatggggagatgggagctagcagctcacaatggggtcacaaggtaagttccaaacagctctgtcacagagagcgtcagcagatcgcaaagaaagggagcatgtgaaggagaaagccctgagtgatgtcacagctcatttctgggcaaagggagaagaaattagcaccctgaggcccttccgccttattaacccattgcacttattctcagaggctcctgccaaaaatagagacattattccacctccacctcctcaaattctaagccagaaatatgtgaccctcagctgcaggtctgttgaagtttgctggaggtccactccagaccctgtttgcctgggtatcagcagcagaggcttcagaacagcgaatattgctgaacagcaaatgttgctgcctgattgttcctctggaagcttcatctcagaggggtacccggccatataggtaagttcacttttccctttggtggctcctttttccaccaatctcaacatctgctcttatcctttttctacaggcgacatgacaattgtaggcctggagggagatgagttgacaacatcccttccctataaccacttgttggatctgatctcacatacacagactcactccaaagactgacctgggtgtctgcttctcagcttcattaacagtgggtgctcacaagtctaggtgagtggtgaatcgagatagaattttattagctagttgttagaattagctcctaataatttcagtctgtggttcattgaattctaactatcataagaaggtgtttccagatacaaaataattaatcttatgaagtaacaaatttatagatttgtagaaaaacatttagatttttggagatgttctacttgaatttgtatacatttgacttttctcaatataatagctgaactctcaatataattagctgaactacaactttctgcatttatgtgaagttttaatttgtaaacacagaaatctgaactaataaaattatttagtcatacttcttgcttctttaaactttgaagattgctttatataattctgatattttagaactgtttcaaattaggatgttaaaaacacaagatatgtctaacattttacagtaataagattttagcagatacccagattcttttgtttcatttcattatagtaattgccaatagagatttttttcttgtgatattaaaactatctgaaaatataatgttctgctgtttatataaatttctgttgagctaactactaccttgtataaatggggaggaggtgatactcagtgtgctttgaaatcttttcctaaagtaaattgttttagtatggtattgtttctaagtaaaccaaaactttaaaatactctgtgtattagtttgggtgaggttatttcatgatgagaacaatggtattaaaacaatggtattttcttattataaaacatcctcttggtttagtatttctgcttatacctctgaagactaccaactgcaatgtgttcaataaaacacagtccaaaatgtgacaagtaaatttggtttttaaaaacacaaataatcattgtctgtattcagcaggcatatcgtcatcaagcatgtgtgtttctttaaagtagaaaacagagaggatgaaatcaggataagtaaaacacagaaaggaacaaatgatgataaaataaatttgtggtccatgtgggcatcaaaatattaaggaacatactcagtggacaattgctatatttctgaatatgaatgaatttgtcttaaaataatttgtgttgaaagcccctgtcttccatgcatagtggagagaatgtctgagaagaggaggaccttgactgctcctgaacc

SEQ ID NO: 476418 - DNA, 796 bp, Homo sapiens
cgggagtggggggtggtgcgaatgcctggaggaaggggccgcgtgggctaccggcctacagtcccagcaagcgccgggctgcggggtggtgagcagtcccggagggaggcgcaagccgtgtggacctctctgcttccaaacctatgctggccactgattctgtgccatccctggctaaggggagtgagtccagagagggacttaaggggcaagtcggggctgggcagtgagaagagtgtgacgctgcgaagtgcacctcatctttgcctaaatcgggcgggtctcagcctcaccccacctctcgctgctcagctcggtttccctccagagcatcacgcctcctccagcacaggagccgcctgctttcctaggctgctgtggaactggcctgaggtcccagacgctgtccattgtgctgccgccctccgcgctctccagccagagcgccagttcaccggcttttgggagaactccgccgcctcacctgcccgcggacaaggtcacagctttgcagggggttgacatgggctgtggcttcctggaaatgtcaccctcaccagagccttttacatggatgtgaattttgagacatgaaggaggggctgcaccccatggacctgggttcctggagtctttgacggctttgtgtggtcgacttgttttgatactgaggacacccctgctggctgttaatttcagggcaagggatatgaggccattattttaagtgaaataactcaagaatggaaaataaaatactattatttttcacttataagtgggagttaagctatgc

SEQ ID NO: 476419 - DNA, 873 bp, Homo sapiens
cacagcagggtttgcattcctttgagagtctgatgctgccgctgatctgacaggaggcggagctccagcagtaaagctcaccaccactcacctcctactgtgtggcccggttcctaacaggccacggactggggtggctttctctctctgagcagcggggacatgtgacagcacagggcagcccgcgggggttatggcggggtgaaaaatcttcctgtggctgtggaattcttgataaggtggcgaacgtgttgtgcagcggcatcctgagggctgcccgccctcccaggcgcccagggcgggcaggcaagctgcacgctgtcatcgcctaaggtacatgtgcacaacgtgcagaagcaaactcttgctgtttatttatgacagaacacacatgcaggacttgaaagatgttactaacaatgtccactgcgagaactatggaagcagaaaactggcagctgtgacttacaatggagttgataacaacaagaataaagggcagctgactaacgccctgctgacctgtcctgatgatgactgttcctgcagaggtctgcagaacccccagttacctggccctgagatcatggagtgctccatgaatgaggaccatccgggctacggaaggaggggacatgtgagtgcgccaggaggaggatcacccgcctgggctgggcgagggaggaagcaggcagggctgggtcggtgcccctggcactgggtaagtggccctgggccctctcacgtccaggtggagcacgggcgtcatcatgtacatgctgctggctggctccccacccttctggcaccagaagcagatgctgatgctgaggatgatcatgagcagcatctaccagtttgggtcgcctgagt

SEQ ID NO: 476420 - DNA, 491 bp, Homo sapiens
ggagaagggggccgaggttggtctatgcccagaatgaacaaaggcagcttggaggttagaagcaaaatggaatcagaaagccaatcatcaggagccagaagagaaagcttcctaaagaagccagagaagtcaagactagcgccacctggctggaatttccagagacaaatattaaaccacagcctgaaaatgcagttgcatgtttcagcccggtcttatcctctagaagctgaaaagggcaaggaaatagatgatcacctagggcaggggtcctcaacccccaggctatggcctgttaggaactggaccgagcagcaggaagtgagtggagggcaagcaagcgaagcttcatctgaatttacacatgctccccatcactcacactcctgcctgagctccacctcctgttacaccagctgtggcattaaattctcacaggaatgtgaaccctattgtgaactgggcatgcgagggatctaggttgcctaacc

SEQ ID NO: 476421 - DNA, 843 bp, Homo sapiens
actgcaacctccgcttcctgacagcagctctcatcaccagctttcttacactgtctgccctgtctcggctgcttagtttggttcccacacgcagcagcacaaccagcattcccttgccttcaggttcagcagcttaactctttctgtctcgctgggcatgagcgagccaagctgtgtctatccagccagtaggcagcagctcctggagagagtgggcccttgtggaacactcctcagccccccaacccccagcagctgaaggaggcagagtagctttgactcctaggccttcaaagatacaacccatcctttgtccactgtctagcaatccgcacgcactgtggcccctgctagaggaagaggccctgttattggggagcctttaagactttggccccactgtactgggtgcagctcctatgagcccaccttcctggctgcttcctactgagcagccttcagccctgaggatggacagcaataggagaccttggcatcccactgctcctttgtgcagcctcctccaccagcaaagctccttttcctatgtccctgctcctcactggaatcaagggacacctggtcggccaaggccgcggccacggccatctcagttccaaggggcctgggatgtgtgtgaaatggtgccttcaggagcaagggctggaagacagtcagcccaggagtgcctcgctgcacactgcagagggttctccaagggggacagctggagcaagagccccaacagggcctgtctctgcccaccagcctcggggggtctgagtgctgggaatcccagctggttcctatttggcatctgcaagaaaccatgaatccagctct

SEQ ID NO: 476422 - DNA, 553 bp, Homo sapiens
tccttgcaagggacaaaacagagatgttctgccccaacacagccctgtatcaagctaatttcatgggagatgctcaagataaagatgttctattgctatatcctgagttcctgaggctctcatctgtggaaggtttgaaaacttcatgcaaatcagtagaaatgagtgataagttcaaccactccatctccttggacaaagggcaggagcaccaccctaccaactacagccagccctggtctggggtgatagtagaaacagaggggtcacctcagacagaaatccaaaacgttcagggcaggcccaggatctcgactcaaatatggagactccattgcccctgtcccagggctttcacacttaaaagctttgtcacattcaacacattgaaagattttggtaagggtagttgataaatattggttaagtccattataactttttttctgtccgttacactcacccacaattttccagtcttttcttaagtttaaatttgcagtgccatagctttcatatcttctcagtatcacttttgggaataaatgtttta

SEQ ID NO: 476423 - DNA, 507 bp, Homo sapiens
gttcatcacccccggcactcacggagctgtccccagcagctgcctcacaagattggtcctgatgcagccacagctgctgtacacagagccaggagctccttgcagtttggtgtattctgctgagatttgtggctctgaccctcctctgctcaccccattcctggtagtatctgctcagctgcctggtttggtccagtgtttcctgggagcctgttgtgtgactgcatttcagagggtctttagggattccaccctcactacaccatgtcccaaaggggtccacatcccatctggactccgttttcttcttaatgacaggaaacttgcagaaagagggcttcggaaaccattccagaaccctactctgcccatggacccagaaaaacataagatgaggacaaacaaggaaagtttaggttttcgctggagaaagaggaaaggcagaaacagacaggaccagaaaaccggccagacaagatgatgtgtaagtgccaaaagaaccataag

SEQ ID NO: 476424 - DNA, 670 bp, Homo sapiens
gggccccttgaaggaacgggcataccaattcccagagctcacatgtatcaggaacaactcctggtcctgccagccagagacccaaatataacttctagagatggaaaaactctagttgttatctcaatgtctgaggtaacaactagagaggatgggattaacagttttgacattttagaagaaaacattactttacttgaagaaatagcaggctgcagaattggtttttataactgtgatcctaagtggacgggtgtcacgcaggccatgagaagggaggaccgcagtgtgcatgtagcatggcatttgaagcccttgccccttgggataactctcaaactccccaataattgcacatgcatggcctcagacatccaaggggctcccgttgtcatgaacaccattttgaccggatacattgtcttcgctaacacctctacagctctttgtatgacaaagttatgaatgatttgacctgttacacataacatacataatatgatataaagctgctatcagcatggactcaacagttgtaattactttcatgattgctgaaactcctagtgtctctaacttgcagtttctcacaattgcatcttcccctgtaaattgattatatattcgactatatattttaagctgaaatattttaaagtgaattgtagct

SEQ ID NO: 476425 - DNA, 600 bp, Homo sapiens
caagcttctccatcaccatgagaagccagcccaagatgttcaacaagaaccacaggaaggacaccaggtcctggagctgctgccctcctgggctcctgtgtgattctccccatgcagcaagcaaggtgcctgatgtcctcctgcgtgcaggcgagtctgtagaccaccatgcgggtgaatctgcggctcagtgcaagtcagtgggagcccaggaggtggacatggacgtcagcctggggcaggagaagggaagctgcagtcaaatagccacgggccaagtctggggcagcacaaagagggccttcagctccactgagggcccggagcttctcaaaggcagagatcttggccagaggaggactggcaggggtttggcagcacaggagaaagctggttttatgctgagcggtggcatacagcatggcattgtggaaggagaggttctacacctgcctgtgccaggaacaacaggcatcctgctgcacgagccatccagcactgccggggactgagtggggcatgtatccttcactgcagaaacagttcagcctggttccattttgtcagtaacaaaatgaaacgaaaagatgagctgttttt

SEQ ID NO: 476426 - DNA, 1277 bp, Homo sapiens
gtttccggccgttcagtccccaaccccgtggccccagccgggctacgcacgctgcgggcctcaatttcttcaatcgcaaaatggggacagagcgcgggactcgcggggaccggcggggggtgctgtgggcccgatccggagtggggactggggtcagggtcgtggtctacgggcccggcgtgggggtcgcggcaggggggctgggctgcacccccgggccggcgagggctcgcagtgagggaggggaacacggtgggcgggggcggcccgtggacccaacgccccctccccgggcgctcccaaacctcgccttttatggagaggaactcgggccaagtgggccgggccggccgaggggcggggtgggggccggtgaggggcgggctgggggccggccgggtccgcgctggactcgcacggggcctggcttatctcccggagcgcctcgcggccctgggacgcgggaggcgccgcgagctgcggcccacgtgagccgcgcgggcctgggagctcccgataacaactatccacccagcccgggcagagtcggcccccgcaccccaagctgagactctagccctggccccggaacggggtctgccctctctccctctctcctctcctttcctttcctctccttccctctccttcttccctctctccctcccttcctccttccttcttcccttccttccctccctccttccttccctccctcccttccttccctccctcccttccttccctccctcccttccttccctccctccttccttccctccctcccttccttccctccctcccttccttccctccctccttccttccctccctccttccttccctccctcccttccttccctccctccttccttccctccctccttccttccctccctccttccttccctccctccttccttccctccctcccttccttccctccctcccttccttccctctctccttccttcctttattccttccttcctccctccctccttctttccttcctttattccttccctcctccctcctccctccttcccttccttccttcccttcctccttccttccttcctttcttcctatttgcaaggattccccttagcctggtgcctctgccaaggagctgcagaggcccagggcagagctactgaaggcagccaagtgaccaccccaggctatgtctggaggccaggtgtatgtggggaccaaggctctgctggtcacctcctctgaggagccctccctgactgcttttctttttttttttt

SEQ ID NO: 476427 - DNA, 3512 bp, Homo sapiens
tcacctcgcagcctctgctgaccacacctccctagcgcagaggctgcccgggagcaggaaatgctccaccaggtgacagcctctggtgctgtctgccaactccccagtcctgagcctccaggccgccggcactccccgttccccgttgcgggggacagtcctatagttgcagcagcacagccgactcccgggaatcggggtctgaccgccaggatggaagtggggccagccaccgagaccttcgtgctggaacttcaatgtcttgaggatgggggcccagggcctgacaccctctcaggtggcagcggtgggagcgagagtcaggaggaggaagagcctcaggagaggaacagcagtccacagcggccagcagtctcggccccagtgggggccagtgaaatcgctgaggaaacccggccgggacaacgagagttgcaactgcagcagttagaacagcagcccgagccgcagcaacagccgcaacacgagcagctgcaacagccgcagccacacctagaactgcaacagcagccgcagcaagatgggcaacaacagctatctcaactacaacaggaaaaacaccaatccgtgcaccatcaggaactgaaaccagaactgcagctaatgcaccagcagcaacagttacagccacagcaagtgcaagagcaacagcggttgcagcagcagcaggagcagttacagacgcagcaagcacaagagcaacaggtattgcagcagcaggaacagctacagcagcaagtgcaagagcaacagctgttacagcaacagcaggaacagttacagcagcagcagctgctacaacagcaggaacagttacagcagcaacagtttcaacagcagcaggaacagttacagcagcagcagcagctactattgctgcagcagcagggacagttacagcagcaactgttgcagcagcagcaggcacagttacaacagcagctgctggaacagcagcaggcacagttacagcagcagctactgctgcagcagcaggaacagttacagcagcagcagcaacagcagctgttgcaacagcagcaggaacaattgcagcagcaacaactgcagcctcctcccctggagcccgaggaggaggaagaggtggagctggagctcatgccggtggacctggggtcagagcaggagctggagcagcagcggcaggagttggagcggcagcaggagctggaacggcagcaggagcagcggcagctgcagctcaaactgcaggaggagctgcagcagctggagcaacagctggagcagcagcagcagcagctggagcagcaggaggtgcagctggagctgaccccggtggagctaggcgcccagcagcaggaggtgcagctggagctgacccccgtgcagccggagctgcagctggaactggtgccagccgcagggggcggcggagcggcggtcccgggggctccggccgcggtcgtggtggctcccccgggctacgtggtggtgcaggagctcatggtgctgcccgccgtggcagcgccggccgtggtggccatcccgggcccggcaggcagcgcggcgttgacccctgcacggcagcggcggcggcggcgcgctcgggaccggccgaccatctgcggggagtgcggcaagggcttcagccgcagcacggacctggtgcgccaccaggccacgcacacgggtgagcggccacaccgctgcggcgagtgcggcaagggcttctcgcagcactcgaatctggtgacgcaccaacgcatccacacgggcgagaaaccctacgcctgctcctactgcgccaagcgcttcagcgagagctcggcgctcgtgcagcaccagcgcacgcacaccggggagcgaccctacgcctgcggggactgtggcaagcgcttcagcgtctcctccaacctgctgcgccaccggcgcacgcactcgggcgagcggccctacgtgtgcgaggactgtggcgagcgcttccgacacaaggtgcagatccgccgccacgagcgccagctgcacggcgcgggccgctccaggggcctcggcctgctgcgcgcctcgcggccggcggccctcggtggcccagcccgcgcggagcaggccgctacagccactgcgcccgcagacaaggcgctgtgagggccgtgatcggggctgcctggccgggaggggaccccccacccgcctccacctgaaaagctccttgacccgggttcatgggcgctggaggcgtcctggaatatccctggagtaaaaggcttccaccatcatcatcatcatcatcttccggattccctgagaaaataccaggttcacagatttcaccgccagaaaaatccatccgccaaaagagaagtggaccggggctgaaacagcacacgggacacgtttgtctgccctttgaggggtctgccaaaggttttccctccgggaaaactggacttactacgaacgaggaaaaacccccagtggcgagacgattaatgacactggccgaggactggacacccaccagggaatcaagacgtggtgagacacacgtggaaaatcttcgatcctggtgaaaatgatcgcaaggagaaattcggggaggaagcaaacttgtttgcactatgtagaaactgaccaaggcatcgaatcgtcctcagaggcatttgccttgaaaatactttccaagatgaaaattcatcagggtgggtataattctgatgaaaacgcctgtgttcatcaacacagggtcagagcgctcaccgggtcgatgtgcaaatccaagccaggaagtcctgctccgggtggaaggtaaaaccttccctccagggaaccaggggctccggcgggcatcggaggcagcttcttggcctctgctgctgtgtcccccagtccccccagcccgcattaatgtcctctggaataagagcctgtggctgaagcagagggccttctgggagagctctccaaggtctggaaggagggtcccccagaaggagctccggggtagccccactgtggcccccctggactccaccagcttcatgcttctcagatgctacccaggggccggcccggggagaccagggcagatttctcccgcaccaggctgtggaggtttggagggctgcctgagcagacactgtgccattgctggggctggggaaagaatatctgagacgacgtttgggagcaatgctctttaccacgttcaccaagtcgtctggggcaggggttgtgagctgcagcagttgctggtgccttgtgggaaggtggggcagggaggaggctgcccgccacctctgcccccagtcacttcctgcttgacctgactcttcacatgtggctgcttaattcctgcccctctccccccagctgcttctcctttactaacacacctgctacattttacacatgtgttggtaagtgagaaacagaaacgaaaaataaattaaaatgcagaaatacaatgtccttgtcttggtgttttcacctctggattttgtgtcttccat

SEQ ID NO: 476428 - DNA, 873 bp, Homo sapiens
acaattaaaatgtcagttttcaaaaatgggatataaggacaatgattcatcacaactttttggtgaaatctaacagtgttcttgcccagttgtttcataaaaactggtatttttgctggaaaaggaagagggagtggttggacaaatgtgaggaggagccagagaagaagctcacccccgagcctgaggagacctgggtggtggagatgctgtgtgggctcaagatgaagctgaagcaacagcgagtgtcacctcctgacctagacacgcccccaccaaagatcccatcggagcccaccatcctgggagcatcaccgacatcccttcctccctcggatttgcatccgaccatcgaatacccctccaccctgctatttccaaatgagtacagtcaccccaacactgaagaagctgacgtcagccagaagtctctcctggtggtgcccctgagcagtaacctgatagctgtccccagctacttggccaatgacatggaggaggacagcgagacccccaaacaaaacatcttcttcttcctgtacgggaagaactgctctcagattgccttgttccatacgcttcatttccgggtcttccgttctgtgtgctgcagggcttgcatttccctggaggagttcgaggagatccaggcttatgacccagggcactgggtgtgggcgtgagatcgcgcccacctttcctagagctccagggaccgtggaggcctgagcttgtattaccacaacaataccagcccttcaagcaattctgggtgaccccaaaactcatttgaactcagcagcccaagagtttcattcctctaactttaggggactcagtgcctctggtcagcatgaagtagatacagaagca

SEQ ID NO: 476429 - DNA, 13195 bp, Homo sapiens
tctccggccatgatcccaaaagattggcctttaattataattgatctaaaggattgcttttttaccatccctctggcagagcaggattgcgaaaaatttgcctttactataccagccataaataataaagaaccagccaccaggtttcagtggaaagtgttacctcagggaatgcttaatagtccaactatttgtcagacttttgtaggtcgagctcttcaaccagttagagaaaagttttcagactgttatattattcattgtattgatgatattttatgtgctgcagaaacgaaagataaattaattgactgttatacatttctgcaagcagaggttgccaatgctggactggcaatagcatctgataagatccaaacctctactccttttcattatttagggatgcagatagaaaatagaaaaattaagccacaaaaaatagaaataagaaaagacacattaaaaacactaaatgattttcaaaaattactaggagatattaattggattcggccaactctaggcattcctacttatgccatgtcaaatttgttctctatcttaagaggagactcagacttaaatagtaaaagaatgttaaccccagaggcaacaaaagaaattaaattagtggaagaaaaaattcagtcagcgcaaataaatagaatagatcccttagccccactccaacttttgatttttgccactgcacattctccaacaggcatcattattcaaaatactgatcttgtggagtggtcattccttcctcacagtacagttaagacttttacattgtacttggatcaaatagctacattaatcggtcagacaagattacgaataataaaattatgtgggaatgacccagacaaaatagttgtccctttaaccaaggaacaagttagacaagcctttatcaattctggtgcatggaagattggtcttgctaattttgtgggaattattgataatcattacccaaaaacaaagatcttccagttcttaaaattgactacttggattctacctaaaattaccagacgtgaacctttagaaaatgctctaacagtatttactgatggttccagcaatggaaaagcagcttacacaggaccgaaagaacgagtaatcaaaactccatatcaatcggctcaaagagcagagttggttgcagtcattacagtgttacaagattttgaccaacctatcaatattatatcagattctgcatatgtagtacaggctacaagggatgttgagacagctctaattaaatatagcatggatgatcagttaaaccagctattcaatttattacaacaaactgtaagaaaaagaaatttcccattttatattacacatattcgagcacacactaatttaccagggcctttgactaaagcaaatgaacaagctgacttactggtatcatctgcactcataaaagcacaagaacttcatgctttgactcatgtaaatgcagcaggattaaaaaacaaatttgatgtcacatggaaacaggcaaaagatattgtacaacattgcacccagtgtcaagtcttacacctgcccactcaagaggcaggagttaatcccagaggtctgtgtcctaatgcattatggcaaatggatgtcacgcatgtaccttcatttggaagattatcatatgttcacgtaacagttgatacttattcacatttcatatgggcaacttgccaaacaggagaaagtacttcccatgttaaaaaacatttattgtcttgttttgctgtaatgggagttccagaaaaaatcaaaactgacaatggaccaggatattgtagtaaagctttccaaaaattcttaagtcagtggaaaatttcacatacaacaggaattccttataattcccaaggacaggccatagttgaaagaactaatagaacactcaaaactcaattagttaaacaaaaagaagggggagacagtaaggagtgtaccactcctcagatgcaacttaatctagcactctatactttaaattttttaaacatttatagaaatcagactactacttctgcagaacaacatcttactggtaaaaagaacagcccacatgaaggaaaactaatttggtggaaagataataaaaataagacatgggaaatagggaaggtgataacgtgggggagaggttttgcttgtgtttcaccaggagaaaatcagcttcctgtttggatacccactagacatttgaagttctacaatgaacccatcagagatgcaaagaaaagcacctccgcggagacggagacatcgcaatcgagcaccgttgactcacaagatgaacaaaatggtgacgtcagaagaacagatgaagttgccatccaccaagaaggcagagccgccaacttgggcacaactaaagaagctgacgcagttagctacaaaatatctagagaacacaaaggtgacacaaaccccagagagtatgctgcttgcagccttgatgattgtatcaatggtgtctgcaggtgtacccaacagctccgaagagacagcgaccatcgagaacgggccatgatgacgatggcggttttggtgaaggtacgctcgagcgtggtcattgaggacaagtcgacgagagatcccgagtacatctacagtcagccttacgatctaaaagattggaaaagaattggtaaggaactaaaacaagcaggtaggaagggtaatatcattccacttacagtatggaatgattgggccattattaaagcagctttagaaccatttcaaacagaagaagatagcgtttcagtttctgatgcccctggaagctgtataatagattgtaatgaaaacacaaggaaaaaatcccagaaagaaacggaaggtttacattgcgaatatgtagcagagccggtaatggctcagtcaacgcaaaatgttgactataatcaattacaggaggtgatatatcctgaaacgttaaaattagaaggaaaaggtccagaattagttaaagaaaataagacccaaccgccagtagcctatcaatactggcctccggctgaacttcagtatcggccatccccagaaagtcagtatggatatccaggaatgcccccagcaccacagggcagggcgccataccctcagccgcccactaggagacttaatcctacggcaccacctagtagacagggtagtaaattacatgaaattattgataaatcaagaaaggaaggagatactgaggcatggcaattcccagtaacgttagaaccgatgccacctggagaaggagcccaagagggagagcctcccacagttgaggccagatacaagtctttttcgataaaaaagctaaaagatatgaaagagggagtaaaacagtatggacccaactccccttatatgaggacattattagattccattgctcatggacatagactcattccttatgattgggagattctggcaaaatcgtctctctcaccctctcaatttttacaatttaagacttggtggattgatggggtacaagaacaggtccgaagaaatagggctgccaatcctccagttaacatagatgcagatcaactattaggaataggtcaaaattggagtactattagtcaacaagcattaatgcaaaatgaggccattgagcaaattagagctatctgccttagagcctgggaaaaaatccaagacccaggaagtacctgcccctcatttaatacagtaagacaaggttcaaaagagccctatcctgattttgtggcaaggctccaagatgttgctcaaaagtcaattgccgatgaaaaagcccgtaaggtcatagtggagttgatggcatatgaaaacgccaatcctgagtgtcaatcagccattaagccattaaaaggaaaggttcctgcaggatcagatgtaatctcagaatatgtaaaagcctgtgatggaatcggaggagctatgcataaagctatgcttatggctcaagcaataacaggagttgttttaggaggacaagttagaacatttggaagaaaatgttataattgtggtcaaattggtcacttaaaaaagaattgcccagtcttaaataaacagaatataactattcaagcaactacaacaggtagagagccacctgacttatgtccaagatgtaaaaaaggaaaacattgggctagtcaatgtcgttctaaatttgataaaaatgggcaaccattgtcgggaaacgagcaaaggggccagcctcaggccccacaacaaactggggcattcccaattcagccatttgttcctcagggttttcagggacaacaacccccactgtcccaagtgtttcagggaataagccagttaccacaatacaacaattgtcccccgccacaagcggcagggactgtaggactaatcttgggacgatcaagtctaaatctaaaaggagttcaaattcatactagtgtggttgattcagactataaaggcgaaattcaattggttattagctcttcaattccttggagtgccagtccaagagacaggattgctcaattattactcctgccatatattaagggtggaaatagtgaaataaaaagaataggagggcttggaagcaccgatccaacaggaaaggctgcatattgggcaagtcaggtctcagagaacagacctgtgtgtaaggccattattcaaggaaaacagtttgaagggttggtagacactggagcagatgtctctatcattgctttaaatcagtggccaaaaaattggcctaaacaaaaggctgttacaggacttgtcggcataggcacagcctcagaagtgtatcaaagtacggagattttacattgcttagggccagataatcaagaaagtactgttcagccaatgattacttcaattcctcttaatctgtggggtcgagatttattacaacaatggggggcggccactgtagagcctcctaaacccataccattaacttggaaaacagaaaaaccagtgtgggtaaatcagtggccgctaccaaaacaaaaactggaggctttacatttattagcaaatgaacagttagaaaagggtcatattgagccttcgttctcaccttggaattctcctgtgtttgtaattcagaagaaatcaggcaaatggcgtatgttaactgacttaagggctgtaaacgccgtaattcaacccatggggcctctccaacccgggttgccctctccggccatgatcccaaaagattggcctttaattataattgatctaaaggattgcttttttaccatccctctggcagagcaggattgcgaaaaatttgcctttactataccagccataaataataaagaaccagccaccaggtttcagtggaaagtgttacctcagggaatgcttaatagtccaactatttgtcagacttttgaacaagttagacaagcctttatcaattctggtgcatggaagattggtcttgctaattttgtgggaattattgataatcattacccaaaaacaaagatcttccagttcttaaaattgactacttggattctacctaaaattaccagacgtgaacctttagaaaatgctctaacagtatttactgatggttccagcaatggaaaagcagcttacacaggaccgaaagaacgagtaatcaaaactccatatcaatcggctcaaagagcagagttggttgcagtcattacagtgttacaagattttgaccaacctatcaatattatatcagattctgcatatgtagtacaggctacaagggatgttgagacagctctaattaaatatagcatggatgatcagttaaaccagctattcaatttattacaacaaactgtaagaaaaagaaatttcccattttatattacacatattcgagcacacactaatttaccagggcctttgactaaagcaaatgaacaagctgacttactggtatcatctgcactcataaaagcacaagaacttcatgctttgactcatgtaaatgcagcaggattaaaaaacaaatttgatgtcacatggaaacaggcaaaagatattgtacaacattgcacccagtgtcaagtcttacacctgcccactcaagaggcaggagttaatcccagaggtctgtgtcctaatgcattatggcaaatggatgtcacgcatgtaccttcatttggaagattatcatatgttcacgtaacagttgatacttattcacatttcatatgggcaacttgccaaacaggagaaagtacttcccatgttaaaaaacatttattgtcttgttttgctgtaatgggagttccagaaaaaatcaaaactgacaatggaccaggatattgtagtaaagctttccaaaaattcttaagtcagtggaaaatttcacatacaacaggaattccttataattcccaaggacaggccatagttgaaagaactaatagaacactcaaaactcaattagttaaacaaaaagaagggggagacagtaaggagtgtaccactcctcagatgcaacttaatctagcactctatactttaaattttttaaacatttatagaaatcagactactacttctgcagaacaacatcttactggtaaaaagaacagcccacatgaaggaaaactaatttggtggaaagataataaaaataagacatgggaaatagggaaggtgataacgtgggggagaggttttgcttgtgtttcaccaggagaaaatcagcttcctgtttggatacccactagacatttgaagttctacaatgaacccatcagagatgcaaagaaaagcacctccgcggagacggagacatcgcaatcgagcaccgttgactcacaagatgaacaaaatggtgacgtcagaagaacagatgaagttgccatccaccaagaaggcagagccgccaacttgggcacaactaaagaagctgacgcagttagctacaaaatatctagagaacacaaaggtgacacaaaccccagagagtatgctgcttgcagccttgatgattgtatcaatggtgtctgcaggtgtacccaacagctccgaagagacagcgaccatcgagaacgggccatgatgacgatggcggttttggtgaaggtacgctcgagcgtggtcattgaggacaagtcgacgagagatcccgagtacatctacagtcagccttacgaacaaggaactttagatctaaaagattggaaaagaattggtaaggaactaaaacaagcaggtaggaagggtaatatcattccacttacagtatggaatgattgggccattattaaagcagctttagaaccatttcaaacagaagaagatagcgtttcagtttctgatgcccctggaagctgtataatagattgtaatgaaaacacaaggaaaaaatcccagaaagaaacggaaggtttacattgcgaatatgtagcagagccggtaatggctcagtcaacgcaaaatgttgactataatcaattacaggaggtgatatatcctgaaacgttaaaattagaaggaaaaggtccagaattagtggggccatcagagtctaaaccacgaggcacaagtcctcttccagcaggtcaggtgcctgtaacattacaacctcaaaagcaggttaaagaaaataagacccaaccgccagtagcctatcaatactggcctccggctgaacttcagtatcggccatccccagaaagtcagtatggatatccaggaatgcccccagcaccacagggcagggcgccataccctcagccgcccactaggagacttaatcctacggcaccacctagtagacagggtagtaaattacatgaaattattgataaatcaagaaaggaaggagatactgaggcatggcaattcccagtaacgttagaaccgatgccacctggagaaggagcccaagagggagagcctcccacagttgaggccagatacaagtctttttcgataaaaaagctaaaagatatgaaagagggaacttggtggattgatggggtacaagaacaggtccgaagaaatagggctgccaatcctccagttaacatagatgcagatcaactattaggaataggtcaaaattggagtactattagtcaacaagcattaatgcaaaatgaggccattgagcaagttagagctatctgccttagagcctgggaaaaaatccaagacccaggaagtacctgcccctcatttaatacagtaagacaaggttcaaaagagccctatcctgattttgtggcaaggctccaagatgttgctcaaaagtcaattgctgatgaaaaagcccgtaaggtcatagtggagttgatggcatatgaaaacgccaatcctgagtgtcaatcagccattaagccattaaaaggaaaggttcctgcaggatcagatgtaatctcagaatatgtaaaagcctgtgatggaatcggaggagctatgcataaagctatgcttatggctcaagcaataacaggagttgttttaggaggacaagttagaacatttggaagaaaatgttataattgtggtcaaattggtcacttaaaaaagaattgcccagtcttaaataaacagaatataactattcaagcaactacaacaggtagagagccacctgacttatgtccaagatgtaaaaaaggaaaacattgggctagtcaatgtcgttctaaatttgataaaaatgggcaaccattgtcgggaaacgagcaaaggggccagcctcaggccccacaacaaactggggcattcccaattcagccatttgttcctcagggttttcagggacaacaacccccactgtcccaagtgtttcagggaataagccagttaccacaatacaacaattgggagcccccacaaaaaacccccacaggggtatatggacccctgcctaaggggactgtaggactaatcttgggacgatcaagtctaaatctaaaaggagttcaaattcatactagtgtggttgattcagactataaaggcgaaattcaattggttattagctcttcaattccttggagtgccagtccaagagacaggattgctcaattattactcctgccatacattaagggtggaaatagtgaaataaaaagaataggagggcttggaagcactgatccaacaggaaaggctgcatattgggcaagtcaggtctcagagaacagacctgtgtgtaaggccattattcaaggaaaacagtttgaagggttggtagacactggagcagatgtctctatcattgctttaaatcagtggccaaaaaattggcctaaacaaaaggctgttacaggacttgtcggcataggcacagcctcagaagtgtatcaaagtacggagattttacattgcttagggccagataatcaagaaagtactgttcagccaatgattacttcaattcctcttaatctgtggggtcgagatttattacaacaatggggggcggccactgtagagcctcctaaacccataccattaacttggaaaacagaaaaaccagtgtgggtaaatcagtggccgctaccaaaacaaaaactggaggctttacatttattagcaaatgaacagttagaaaagggtcatattgagccttcgttctcaccttggaattctcctgtgtttgtaattcagaagaaatcaggcaaatggcgtatgttaactgacttaagggctgtaaacgccgtaattcaacccatggggcctctccaacccgggttgccctctccggccatgatcccaaaagattggcctttaattataattgatctaaaggattgcttttttaccatccctctggcagagcaggattgcgaaaaatttgcctttactataccagccataaataataaagaaccagccaccaggtttcagtggaaagtgttacctcagggaatgcttaatagtccaactatttgtcagacttttgtaggtcgagctcttcaaccagttagagaaaagttttcagactgttatattattcattgtattgatgatattttatgtgctgcagaaacgaaagataaattaattgactgttatacatttctgcaagcagaggttgccaatgctggactggcaatagcatctgataagatccaaacctctactccttttcattatttagggatgcagatagaaaatagaaaaattaagccacaaaaaatagaaataagaaaagacacattaaaaacactaaatgattttcaaaaattactaggagatattaattggattcggccaactctaggcattcctacttatgccatgtcaaatttgttctctatcttaagaggagactcagacttaaatagtaaaagaatgttaaccccagaggcaacaaaagaaattaaattagtggaagaaaaaattcagtcagcgcaaataaatagaatagatcccttagccccactccaacttttgatttttgccactgcacattctccaacaggcatcattattcaaaatactgatcttgtggagtggtcattccttcctcacagtacagttaagacttttacattgtacttggatcaaatagctacattaatcggtcagacaagattacgaataataaaattatgtgggaatgacccagacaaaatagttgtccctttaaccaaggaacaagttagacaagcctttatcaattctggtgcatggaagattggtcttgctaattttgtgggaattattgataatcattacccaaaaacaaagatcttccagttcttaaaattgactacttggattctacctaaaattaccagacgtgaacctttagaaaatgctctaacagtatttactgatggttccagcaatggaaaagcagcttacacaggaccgaaagaacgagtaatcaaaactccatatcaatcggctcaaagagcagagttggttgcagtcattacagtgttacaagattttgaccaacctatcaatattatatcagattctgcatatgtagtacaggctacaagggatgttgagacagctctaattaaatatagcatggatgatcagttaaaccagctattcaatttattacaacaaactgtaagaaaaagaaatttcccattttatattacacatattcgagcacacactaatttaccagggcctttgactaaagcaaatgaacaagctgacttactggtatcatctgcactcataaaagcacaagaacttcatgctttgactcatgtaaatgcagcaggattaaaaaacaaatttgatgtcacatggaaacaggcaaaagatattgtacaacattgcacccagtgtcaagtcttacacctgcccactcaagaggcaggagttaatcccagaggtctgtgtcctaatgcattatggcaaatggatgtcacgcatgtaccttcatttggaagattatcatatgttcacgtaacagttgatacttattcacatttcatatgggcaacttgccaaacaggagaaagtacttcccatgttaaaaaacatttattgtcttgttttgctgtaatgggagttccagaaaaaatcaaaactgacaatggaccaggatattgtagtaaagctttccaaaaattcttaagtcagtggaaaatttcacatacaacaggaattccttataattcccaaggacaggccatagttgaaagaactaatagaacactcaaaactcaattagttaaacaaaaagaagggggagacagtaaggagtgtaccactcctcagatgcaacttaatctagcactctatactttaaattttttaaacatttatagaaatcagactactacttctgcagaacaacatcttactggtaaaaagaacagcccacatgaaggaaaactaatttggtggaaagataataaaaataagacatgggaaatagggaaggtgataacgtgggggagaggttttgcttgtgtttcaccaggagaaaatcagcttcctgtttggatacccactagacatttgaagttctacaatgaacccatcagagatgcaaagaaaagcacctccgcggagacggagacatcgcaatcgagcaccgttgactcacaagatgaacaaaatggtgacgtcagaagaacagatgaagttgccatccaccaagaaggcagagccgccaacttgggcacaactaaagaagctgacgcagttagctacaaaatatctagagaacacaaaggtgacacaaaccccagagagtatgctgcttgcagccttgatgattgtatcaatggtgaggagattagtgtgggcctgagtgaactggttggggaagatgtgccttcagtgttggtgggcaccatccaatcagctgcaagcccagacagagcaaatacagaagtcaaactggtctctctgggagctgggacagactttgctgctgctgccttggacatcagatctgccccagcctcacaggtctgtgggctccaggacttacaccagtggcccccactgggtcctgaggcttttagcgttggactgaagagttacaccatcaactcccctggttctgaggccttcagacttgaactgaaccacaaagctgccatcaccccagggtctccagcttgcagatggtctatcataagacttctcagcccctataaccatgtaagccaacccctccaataaattccctctcatccatccatatccatattctgttggttctgtctccctggagaaccctgattaatacagatttggtattgggaaaagcgaaatatcattcattcttcctgtattccttaagacacaatggaagagacctgtgaaactgtccccttgaaaataaaaggccatattatacatacggggctacttaatggtaaaagataaaagtttaaaggctaattattattggtgcttcaaaagcagaaaatcgcttaattgcaatggccagcacatgcttacaaaatcagtagaccacaaccactctccaaacataagtgcagcaagtgtttccaagattacagaagaaatgaaaatgcaggtgaaaaatgaaatacaagaaatctcccctgccaaattattcgatcatgtacgacttctgccccttcacacagggtcaccaattcgcgatgctaggctattttcacttctaaaatgatctttgaataagttagaagagcctgagaaatctcttcagactttcatg

SEQ ID NO: 476430 - DNA, 1947 bp, Homo sapiens
ttgtaacaaggggagttgtgccaactgttgatgtagagcttgacaaggccttagccgcattactgctccacaatgaagggggcacaggcaagagaatccctggtgcctcctgtaagtggaatcgtatagtatttgtctctcggcgaatggcttatgtcactctgcttaatgagttttatgcgaatggactccatggaggttgggccaggtttgatgcttgtggcatcgacaagtcagtgaaggtcatctctggatcctcaaccaccaggccgtattttcttcgcaaatcttgccagctgtgtcttgttttgccagctggtgttctcactcccgctgctgccattccgctcacggcagaaacacccttgtctcttgccttctgcaactgcaaagcaaaatcgtctatcacagagagaggctccaatgcaggtaatgccatcatcgcccttgtgatttatgacggaggagacctcgctgtcaatcagaggttcttagagagaggagggacagggcagctcgccattgtggatgttgtcagccaactcctgactctctgaacctggagatcagatgtgcagacatccctctctcttctctctctgccctttttctctctccccacctcctctctctctcactcctctcacctctttttctctcccctcctctttctctctcttctctcccttccctcaccttccccctctctcctgtctatccccaatctttctccctctccctctttctctctcccttctcactcccctttctctctccttcctctctcttcctcctctctctctccctcctctccccctctccctcctttctcttcctcctctccctcctcactcttcctcctctctcctcgttttctccctctccctctttctctctctccctcctctctccccttctctctccatcctctttctccctcccctctctcacctctcttttcctcctctctccctcttctctctctcctctctcttcctcctctccctttctctccctcctctccccctttccctctccactctcttcttcctcttttcccctcctctttcccccttctctcttcctccccctttccctctccccctccccctttctctctccccctcctctctccctttcctctctctctcttatcattccctgctctttttcttatttctccctgctctctttctctctcttgtctctctcccctcctgtctcccccctttctctctctcctctcctacctcccccttttctctctcccccttcccattctctctccctgccttctctccctcttctctctctccctctacttctgtctctgaaaccaacctagtagtcccatagacaagtttttttgttttttggataaacatagaagttgacccatctgatcaagttcttaaagcttgaaacttggctttgttttatctgagttcctgttttcttacacatagttacatttcttccctgctaaagaaaggcctttagtgggtcaagaagatggatttgagactgagctcccatctcagctgctgcacccgattaaagccttctccctcagcaacactcattgtctcagtgattggctttctgtgcagtgagcagcagggcctagaccaaacccctggtgttttggtaacatctctccccctctctcttgtctttccctcttctctctctttccctccctctcctctttctctctttctccctttctctccaccttctgcaactctatacagactccctactgggggctcttccccggcagttcccttagcagaggcagatgcatatctcttctgggcagttgttccagattgctactgctacccaacaaatcaaccctaagcttagcagctcacaacgaccatttttgttttgcttatgatttcatgggtaaggaatttgggaagggtttggtggggcggttct

SEQ ID NO: 476431 - DNA, 630 bp, Homo sapiens
cttgtaggtttgattccttctctaccaagtctaggaactgaatatacatgaagcacaatggttatttgtttcctgttggcagcgttccacacagccgatcgcttccgtctcattgagtcattttcttcatttggcttccaggacaccaaagcctctctgttttcctgccgcctccccagctgtgccttctccatcccctttgcttcttcctcctccccttctcctcactttctaactccggaggccataatctcctctctacctacgccccgtcccttggcgacctcatccagacttgtagcttcaagtcccatctacgtgctgatggtgctacaagtatgtctccagcccagtcctctcccagcaatctcagacacagaatccagcttcctccacttcactgatgtcctaactgtccttccagctggcacctgccctttagggctctagacaattccatctcatacactgagtagcctgatctatattcatgatcaaggagagcttgagcgaaggcttaagattttcagtgtcatatttcaaatcggattttcgaagtgtgagtagatatcagctatgtgggcctgaaagttctcattaccataccagtgacagttcagggaaatttac

SEQ ID NO: 476432 - DNA, 455 bp, Homo sapiens
acagctcattgagaacaggccatgatgacaatggcggttttgtattcctgttggactcagatactacaaccactaagtactctggttggactcagacactataaccaatgggtactcctgttggactcagatactacaaccactgaagtactctggctggactcagacactacacccagtgggtactcctgttggacttggacactacaaccagtggatactacaaccactgaagtactctggttggactcagacactacaaccaatgggtacgcctgttggactcagatactacacctgctgagtactctgactggactcagatactacaaccagtgggtactcctgttggactcaaatactacaactgctgagtactctggctggattcagatactacaaccactgagtattcccgttggactctgatactactacatccactgagtattccc

SEQ ID NO: 476433 - DNA, 1374 bp, Homo sapiens
attttggaatcgggccttatcatcaccaaacatgagaaatggaaacggctcagatctgtcatctccccagccttccctagcggagagctccaggagatcccctgggctccggtcaccgagactgggagaagcacacctagctgtgggctggagcctgcacctgctacgcgtgagagcctattctgcacattttgtcccaacttcatgttcagcgctggtgacctgtggatgcgtccagggcaaaatgctgaactgttatccttgtgctccggccgtttccctcctcaaacttcagggagaccttctggtgcaaaacattggcaagaatgtgaggagcaagtgggaccatcggggagggcccaggaccgatgaggatgttgcagccttcggtggtgtggaaacggccctgccctcgccccacgcctttccctctctccacctgcggaaacgcctccatcctggagggcacctcggacaccggctcttgcatgcacgcttgctgacgtgcccggcgtgccgctgctcctcgtgcctgcaccagcacccacagatccagccctccatgctcctcgccatgttactgtgccaggcctcacacaggagagcggatcccctctccgttctggagatccaggtgtctgcagggctgcgcccctctgaaggtgcagggaaggaatctggcccgggtccctctccagcttctggtggtccccccccccttgtggttcgacgatttgctggaaagactcggaactcgctggaagctgtgatagtcccagctatggtttatcacagggaaaagacaccgattaaaatcagcatgcaggggcagagcccacgagggttccacacactgagcgtctgctgtcctctcctgtggagctgcggacagcgttacccctctgacaatgtgcgatcatacgcacaaaacacggtcagccaggaaggctttctgccccgcccccagcaatgcagagacatgcaatgtgaaaacccaatcaacccgtcagcaagtcctggttttacaccccttcttgtcgacctggtggttggggccttctgcaggctgagtggcagagtttcttccttctggtgggttcgtggtctcgctggttcaggagtgaagctgcagacttttgcggtgagtgttaccgctcttaaggcagcgcgtttggagttgttcgtttttcccggtgggctcgtggtctcgctggcttcaggaatgaagctgcagaccttcgtgggcactgattggtgtgtttacaatccttgagctggacacaaagtttctccaggtccccaccagattagctagatacagagtgtggacagaaaggttctccaaggccccacagtagctagttacagagtgtc

SEQ ID NO: 476434 - DNA, 464 bp, Homo sapiens
cagttgccagaatgtcccgcccctctgtctcacgatccattgatccttcccgcatcataaggcatccctggcttcctcctgcctgccatgagctccacttgccctggacacttaacaacagcagcagtggcagccgcaggaaggagcgaacatcttctgagctggatgctgattcattcggaaggcaacagaacatccagatgccagatttagtggtgattgtcctggggaccccatggggctctctggacccaccagctctgcaggccaaacatattggtggcggctggagaatcccacagaaacggacgcattttcgggatgcctcagaaatacgactttttattgtaattaaaatatttgaaattttctttgaaatttatttgaaattcagccccataatagagtggtttgcttaatgactgcagagtattgtcttatctgaggagaagcaggacatttta

SEQ ID NO: 476435 - DNA, 463 bp, Homo sapiens
atatggcctctgggactccggcatcagcatttggttccccatgggtgagaaaacagggagggaggaggacggggagggagcctccagcttgatcactcctgggaggagcctgtggatttctgggcttgggggtcccacagagcccagtgcccatcttcctccagcctctgtgccatctaaaaacctgctcacgaacctgggggagcccccacaggctcgagctctggcagcaaagctcctgggaaggccctccagctctcagagtggcagccgcgtccctgctgtgtgggctcaggcgggaaatgctacctacatcacggtgcacacgctctgcagccacaacacacacatgtccccaatgcaggatccttacttccccgcacttagaccctgtggaaaggagaagccagatttcacaagatgtgggggcctaaccacgggaagcaccagcatgcactgagcg

SEQ ID NO: 476436 - DNA, 1966 bp, Homo sapiens
cacgatagacaggtgtgatttgcagtcacatcaccatgagggcacctccgccctccacagacatgaagtggcaggtccagcccagagatgaaggcttatgggacatgtttgtgaaggacatcccgcggagcgccacatcctacaccctcagcctggataagctccggcaaggagtgacttacgagttccgggtggtggctgtgaatgaggcgggctacggggagcccagcaacccctccacggctgtgtcagaaccaccccggcagctatgggggagcccacgagtgcctgacaagaggtcacgtcttcctgggacctcccagaaagccagcggaggggccggggatagtagctgctctgggctcaaggtgagcagtattgccgtccctgaggatggcgtgcaggtgaaggtactgccgatcccaggctgggcatttcttcacgtgcacaccttcgctgtgaggtaccgcaggctccagaggccaccctgggtccaggtccaggtctgctctcaggggaaccggctgcaagccagggcgctggggggttcagagagggatgggctgtgtttgaggagaggggatctcagcagcatgaagggcagggaggcctcggcgttggggcagcagagcctcagccagaagccccagacgcagagctggccttgccatgagctggaccgcactgagctcatcagtccttcagggaagccagcaaccatcacctgctggcgtcaggaccgggccaggcccgcagccagggtgtcctgccccaagcttcgggtggctgtgtttggaagggttctggctgccgtgagccaatgcctgggctttgcctgtgagaggctttctgttctggggggcttccagtgccacagaacctactccccttccaggcccatggaaggccctgaatgggacgccgggaccacccagcacccatcaagatacaatttcccgcttttctctcaagtggaagccccattctacgaggagtggtggttcctcctggtgatggctctgtccagcctgatcgtcatcctgctggtggtgttcgccctcgtcctgcacgggcagaataagaagtataagaactgcagcacaggaaaggggatctccaccatggaggagtctgtgaccctggacaacggaggatttgctgccctggagctcagcagccgccacctcaatgtcaagagcaccttctccaagaagaacgggaccaggtccccaccccggcctagccccggcggcctgcactactcagacgaggacatctgcaacaagtacaacggcgccgtgctgaccgagagcgtgagcctcaaggagaagtcggcagatgcatcagaatctgaggtcagtgtcggtgcctacttccgggcagtgaccatcagcccctacttctgcaaagctcgctgcatgtacgaaagcagcaggttgtgcggagcaggcagccttcgagcaggacagtctggtcagcaaagaggctcatctcacagcgccggcctcgggcctgtccctgctgccgctgccgggccgctgctctttcgagtatccaggcaccgtgggggtgtcatagctgtgggtggttcctgtgtgctgagcgctcgctgctgtgtgtttccagcactcactgtgggcctggcccaggtcaagttcccagatgccaaccaagggtaatctttgaaagcaggtctttttaaggctagtggtctcagacctgctctgttaactttcttccacaccagattgtttctactttttggttactgtgaacaatattccctttatctggttgagtttggacatttttaaaccactctcagaactattgctaaagtgaaaattctgcagatccgttcccaggtgctcaggagccttcctgatcggaggtgctcctctgaattatgtcctaagtgtcacacgacgcatgctgtggctatttctgtttttctgtttagaaacaa

SEQ ID NO: 476437 - DNA, 806 bp, Homo sapiens
gcatgtctctgactctgcatatgcccaggggcaggccatctgcctgaacggtgacctcggaccctctgccgttgctggcctctgtggaacctcccacccagctctctctgctgaggtggcactaggcacgtccctgagctgtccagcagcaccaaggggagctcgagccctgcaccgtccactggggctgacagcaagtgatgccttcacaaccattgtttggaggagcccccactttccacaggaccccttcctgcctcccctgcaccggcggagggcatgtggccgggacatcccctcgccctccaaggccatgtctagaccactgttcccctcttgattttctcctgacttcccgaaccatcattcccacctgctgcatcgggcaccctgccattgtccttgaggacagcttcagccccaaggaagaatctcaacccaagattgggtcccggggtcaccggctctgtgattttcctctggacctgccagacaccccctcctcagccctggcagtgcctgcatcagtcacacctccaccttccccgttctgttttagggatgggtctccctccaacccccttaacctcctgtggttccagcttaatggtgggccctctagccagcttcctgacagccctggtgatacagcggtgccattacagggagttctcaatgtccttgagttgtgaggttgtgcagggaaatagaaatcactataaaaagaaactgttcatcagtaaaccgtccacatactcagaggactctccctatcttgccgagggttccccaacccctggagagag

SEQ ID NO: 476438 - DNA, 1425 bp, Homo sapiens
agcagtgcctctcctcagcagattagggttgttacaatgcaggggataaaagcctaaatggcactttgggaggccaagctctgcactgctgaaaagctcttcgctctcccacactcacagcagcacactcacaagtctaaaagggggaaggcccccgagtgtccatccctggaggagcagacacaccagatgcgccatgaaaaggaaggcaattccgacatctgctacaacccggttgaacctcaaaaacctcacgccgagggcaaggatctggacacaggaagacaagcactgcacgactccatttgtaccaagtatcgagaggctgacccacccccagccatgggggccaactggggcccagtcacccgaatacaactggagagcacagaatctgccatggccgccgtccgcagtggcacccaccctttactgacggcaccctggcacccctctctgacagcacccttggtggccccaccatggccctcaatgggctcctctacagccaggtccatccctgagggaaagctgagccgtacctcggtggctctgagtgacccctttgaacatattttcgtgcaaagagaggcagaaataccggacactctaattattccgggcctgaaacaacacccttctaaatctgcaccagcggaaaagagcagaaacatcaggctctatgtgaagtcagggaactctttaaagtcaccagccagcgaggaggctgagcccatctttccctgccagtggcgtggagacctcagccccgacagcaatgtgttcaaggagaaagaacgctgctggacacctgaggggcttggccgcagcgtgcctggctgtccccaccactgtggccctctctggcagtggggttgggggtgcacggagcttaccagcctcgccgacaaagacctccacgggcgcgctggctgggctctcgccgatgatgttataggcgcacccaccaccattaagcaaaagacgtacccatcctatcctgtgttcagggagccccggctggaggagccgagcaaaccacctcagggagagctgcgcgaccagggagatgccaactgtctggtggtcagcaagggccacctttggggtgtgccaacagtgcagacaccagtgctgcaatttcccgtcttcaacattcatcaacatcatgcctggcgctgtactggggtcaagctgtgtgagcataggagcataggagctgctgccgtccgcgcactgggccaagctctagccctggggaaactcaacatctgtctgccccggatccgggctacacaggccctgggctgagtcctccgcacagctccccgccccactcttcagctgggatctccctggggcctgcagcccttccttgggcagttttgtccctctgttatatttgtcatcaatgtacttgtcagt

SEQ ID NO: 476439 - DNA, 891 bp, Homo sapiens
tggacacctgtgaatccctgctgtgttctggatagatgcatcagtcccttatagtttaaaccatgtacatttgggatcatgaaaaacggtgtgtgctgttgtgcaggacctgtcatagcagagggcttgtacccacggaggatcagtccaggctcctggagagaaacaataagcaacagtccccgtgaaccacagcatgtgacatgtgacatcaccacgtgtgcaggcaaatctctcagaagaaacctcaactgtgtctcaggaaactctggtggttgggtgggaggctggagtctccttaaaataaaggtcatgactttgggaaaaaggtggatatgggtgatgacacattgtctacataagaggactgagctgttgggaccaagaagacagaggggaaccaatgggcagaagttgctcaaagaaagatttcagttcagcataagggaaatcctccttatgatgtacaccctgcacgagttgacgtaaggagcaggaaggttgggtccaagaagttttgctggtggcagttgacaggtcgcaggcttgggtgaggtgacaggactcctgcccagcaagttggcacatgccgtgacctaggagggcccctggggcaccttctcctccagtctgcataactctatctggacatcatcaacgggcttttcatacgcgccttggtgctatgaagcttcacacaagaagcgttcggcaccaacattcaggtgattttaatttcatataacaaaaccatgatgctgaatggagcgtatgtattccagcttgcgtccatgccttggcatgttcccaggttgcactagccttcccgctgtgtttcatctggcaattatcacttatatttaaagctttggcccaggaactgtctcctcc

SEQ ID NO: 476440 - DNA, 794 bp, Homo sapiens
tttgcaattcctagagttgagatataaactagttaagacgccggagaaggtgagtctgattggcagattcccaccagtcctgagttctggccagctaagctcgggcagccatggatctgggggctgggagcaggattcagtcgggatgtgctggagcccacttaccccagctagtgagagctgaccctgggcacctcctcccagctccaagttcactgacgtcatattgggagcttgaaatcggctgtgccggatttacttacagcaagaaaaccacacttagtgtgctcaagaggttctctcaatggagcccgggactggcagtgtgggcatcccctgagtacctgccagaaatgcccggtccagaggcaccagctcagaaactctggtatggggcctgggaatgtgtgtcttcacaagtcctccagggcaaaagcgacggcgtttctaccctcatcaggagagactgcctctatgaatctctcgtcgccaaactaagcagttttaatccagatacagagtggagacagatgaacgcatgcaggatgcttctccagagacggcgtgttctcgctgttgtcagccatccagacaggctgaagaaatgctaaagagaagtttgtaaaattcagagcctcatctcagagggaaagatgagttaatgatctgctgcagaaggacttggcaggtattttggagcatttcatttattgagcacctaccgtgtgctggctgctgtgttatatgcatcgtacatattttgttctcacaacaactctggaaaataagcataa

SEQ ID NO: 476441 - DNA, 2226 bp, Homo sapiens
ttggaacaacctggaatggggtagatcatcctaataatacttggctgataaggacttcctgagctaatacatgcaaaccactacaaatgatgccttacactgttaactgctgctgtcatcatcattatcacaactacatcatcaccaccaccattaccagcacggccaccatcatcttcaccaccaccaccaccaccaccatcatcaccaccatgattatcatcatcatcaccatcattatcaccatcatcatcatcttcattatcatcaccatcatcaccacaaccactatcaccagcactaccaccatgatcttcaccatcactatcatcttcatcatcaccccaaccatcatcatcactaccactactaccatcatcttcatcaccaccaccacctttatcatcttcatcattatcaccacctatgatcatcatgaacatcatcatcctcaccaccaccatcattatctccacatcatcatcaccatcatcatcttcattatcatcaccaacatcattgccatcattatctttaccatcatcatcatcaccaccaacacaaatatcatcatcatgaatatcatcatcctcaccaccactatccttatcaccaccatcatcatcaccatcatcatcttcattatcatcatcaccaccaacatcattgccatcattatcttaaccatcatcatcttcaccatcatcatcaccaccaccaccacaatatcaccatcaccaccaccatcactaccactacacccacagaaatttctcatatacaatgacaaatgtggaacatacagaaacatatagggaatggtgggttaaatgctgcgtactcacaattcgacttttacaagccttaacattttgctgtttcctccaaattttttcttgtcttttaaagaaatacaacatcacagtgagcacctgctcataagaaactctcttatttgttgtatatctgaaaatgtctcggttttgtctttactgctgaatgatagtttagctggatatagaatctcaggaaaggcatttgtaaggaaatgtttgtcattgtgcttatcgcatttaataattatatacattgtgtgattatattttgtcttccagcagaatgatttttgtttgttttgttcactgtgtatccctgtccccggagcaatgccaggcacatcatagtcactctgtaaataggtgttgaataaatgaatgtgcaagtcagtgaattcctcactaggctgtctgttctccgagggcaaagtcagcttcttcctgttccgggctgagttccagtgttttttctgatgaagtaggaactagataaacatttgttgtagaaataaatgaattcacccaagatctaaaataaaataataggaatactactcttagaaactagtgccttttgaagaggcaatcttctgatcttctaggtctacattttcttaattttttttcccccactggaattagtaacaagggaactgcaggggcagactgtgggctttcatgagagcaaagccctcttttcaaatatctgttctaaggaggatcagctttccagcttaactgggaggctggctgagtcctcatttctaaacagatggcaacacatcattgctggtggctcctttaaggcagaaaggctgtcaaatcagcaaagatgacttccagatacagcctgcacagagaggcatggcgactgataaaatattcattagtgactgctgtggttgcagggagggcctgtgctgcagggaggcctgtgcacagagccagctgaggtcccagtgtgaggaagtgcattagggttttgcagtaaggcccatttaggaaggaggcaggggcctttgaggcctattgtgcctgagagcactaatgcccttcgatctggccatttataaaagagaaggaaccattaggtctcggaaaagatgcctggcctgcaccatttagaggacacaggggtcacctatgtgtcaacgaagtgaaaaggtcattcataaagccttcagtctgtcagccctagaacccaactcatcatttctgggttgaccaccatgctcctccactgtctggttatgtatgacaactctcaactggacatacggtcacatgtgtatagtcccagcagtcccaactctgggctcgttttgtggacacagatggccctctgtccccctccaatagccccctttagattggataagggaaatcatgt

SEQ ID NO: 476442 - DNA, 1508 bp, Homo sapiens
gccctcaccctcctccttccctggaacacgggcgaccactgcccactttgccgctgcggcaccctgagcgccgtggcccgtgcagaccaccagaggaaggatcccgggagccaggacagggcaaggaggatgaaccagacagaggcagcgctcagggacggaagagccacagtggcaaacacacaggggacgcagacaatcagtggctgctgtaaatatccgtggaacacggtcgatctcaacgaggggccgggctatgagcacggtctccctggagacacttagctatcctcagggcacctcgcaggggctgaggccctgcaattatccaggtgctggtttccatggcaacaaaaatcagaagggcacaagaggccaagccaacccaaatatggcatgcctatttcaagcctctccttgcctcatatctgttgatatcccactggccaaggccctttacctctcccatgggtctctccaaaagagtagctggacttcctacatgactcacagggctccagaaacacaaaaacaaagctatcaggctttcttaaggcttagacttggaactggtagaatattgcgtctgccacattctatttgtcaaaataagttccagcccaatccagatttaagtggaggggttacacaagggaatggatacctggagaagtggaaccatggtgatagtgatggtggtgatgatgaagatggtgatagtgatgctgatagtgatggtggtgatatgatgatggtgatggtggtgatgatagtgatggtggtgatagtgatggtggtgatgttgatggtggtggtgatggtgatagtgatggtgatgatggtgatggtgataatgatggtgatggtgatggtgatggtgataatgatggtggtgataggtgatgatgatagtgatggtggtgatggtggtggtgatgatggtgatggtgatgatgctgatagtgatggtcgtgatgatggtgttggtattggtgatagtgatggtggtgatgatggtgacagtgatggtggtgatgatgatgatggtgttggtgttggtgatagtgatggtggtgatgatgattatgatgatctgatggtgatggtgacagtgatggtgacgatgatggtgatggtgatagtgatggtggcaatgatggtgatggtgatgatgctgatagtgatggtggtgattatggtggtggcgatagtgatggtggtgatgatggtggtggtggtgatgatggtgatagtgatagtgatggtggtaattatagtgatggtgatagcgaaggtggtgatgatgatggtggtggtggtgatgatggtgatggtgatgatgctgatagtgatggtggtgatgatggtgacagtgatggtggtggtgatgatgatgatggtgctggtgttggtgatagtgatggtggtgatgatgattatgatgatcacgatggtgatggtgacagtgatgtgacaatggtgatagtgatggtggtgacaatgatggc

SEQ ID NO: 476443 - DNA, 758 bp, Homo sapiens
ctgcctgaaggtctccgctgtcagctaatgaatagctcgatgcagctgctgggaggttttgcaaagcgcattcagaatagcgagaatcagagcatggtttcttgcccaaaggccaggcatctgcgtggtcagatgggggagcatgagtgcccggagctgtgcggtttagggcagcctgaccttggatacctggttactgggccagtctggcggcccttgttgcttagagcggcagaacctccctgggggggggatgcggacgtgctcttttccagtctttggacaaaaaaaggcaaggggaggaggaaggagaagcgtctgagtttacccatggtattaatagcagcagggctggaactcgggtgctctgggagaggagacgtcctaccccctgtccccgtcagaacatccctgctccaggagcagctggggttccagtgtgaagcgtggctttgaaaccaggccccgctggcccccagctgtgtcgccagggccaagtcacttaacgtctgagcctcagtttccccacctgaaacaccgcagtggcacctgcggctccgtgtgtggcttggaggacgcaggcatgagacctgttggctgctgtcatgactgcagttagcagaggagggggacacactgtgacagggtccaaaggacagcgagaaacctccatctgggggtctcctttttggagcatggatgggttgtttgggcccaagtcacacctggaaccaatgtggtagggcttgtgaactttt

SEQ ID NO: 476444 - DNA, 1060 bp, Homo sapiens
cctctctgcagctcagccctgctccaaggccagcaggcgaggggccacaccacggaccatggaaatctcctcggagtcctcagacacgcctggccccgggcttgaccagcagggtcgtcagggaggcccagcatccatcagggtcgtgccctgggaaggagcccccagtgagcgcatgggctgcgctgggcaggcctgtgaggcacgtgaggggccccaactctgtggccagcacgaggaggctgaacccacggcccagcggcttcagagccgagtgcctgttaatgggggctccagaagcagccccctggcttcaggccccacagctgcctcttcccagaaccctcccggcacgcacttcggtgactcttacaagtacctgttcagcgtcagccttcgcccaggagtgcaggctggggacgagggcagtggccacctctgccggcctagcaatgagcagcagtaccaccaggccctttaatactaaggacatgtgaagtcatgtgtttggagctatttgttactcagcactagctacctgatacccctctctctagggccctggccagcagctgcccaacctcagttagcacaggccagaggctctaaaagttcccaggggtgctaagaaccaggccatggtgacagctggattccgctggctaacagtgccagagggtgccagggacagagcttgtgggagggggttcccaagtcaagtccatggcaggagctactgaagcagaagcacgagtctccactgcctttctttgcctcggtttttccccctgtgaaatgggcccatcaccctgtcctgtctcctggggacccctgctgaaaacctaaaggtctacactcttagggtaagaatgaaacggaattagccctgctccctccacacgaaagacacttggtgctaagagaagcaaaaagaaaaagttcttgagaagttagggctacaggtcttctctagcacagatttgaggtgctagcacagatttgaggtgctgccaagaatgcagagaactccaagcactcaatgcgttgtttgttttgacat

SEQ ID NO: 476445 - DNA, 717 bp, Homo sapiens
gtcttccataaaaccagtccctggtgccaaaaaactgggagccgctgaggtatgttatgatctttcttgctatactcagaaataaaagcatactttatacaacccagttcaagtggacagcttcatttttaaatcatcatgttaccagagaaatccttgcagcctactcagaacattttcttcatgatttagaaaatgattatcccaattttgtagtaaaagcagctgtggacctcgccaagacaatgcagactccactgactgttcctgtgcccgtgctccagttaccctggggccctgatggcctcagccttggctttgccccgatggatgctggggcagttgaagccagagctgccctttgggaacgttacctccacagcatgctggccatggagtatcaacaagtgagcttcacattgtacaattatgtgcacatggctgcccatttcagaaccaccaatctggacatggccagcttctatgtgtcacagctcaactgcagattcccataggataatagtgacacctttgttattaagttactttgtctattagtgcattctcacactgctgaagaacacaccaaagactaggtaaattataaaggaaagaggtttatttgactcacagttcagcatggcttgggaggcctcaagaaccttacgataatgggagaaggtgaaggagaagcaggtatccttttcactaggtgac

SEQ ID NO: 476446 - DNA, 819 bp, Homo sapiens
gtttatttgtgagatccagttacgcgttcccatttcacccaagaccttcagccagagcagggcatcaaagattcactccaaaaagtaataccaagaacatatggaaaatgtggacatgagaaattacaatttaaaaaatgccgtaaaagtgtgggtgaatactcataaatatgtcaaagtctttggtaaattttcaaattccaatagagataaaacaagatatactggaaagaaacatttcaaatgtaacaaatatggcaaatcattttgcatgctttcacacctaaatcaacatcaggtaattcatactagggagaagtcctacaaatgcaaagaatgtggcaaatcctttaactgctcctcaaaccatactacacataaaataattcatactggagagaaaccatatagatgtgaggaatgtggcaaagcctttagctggtccgcaaaccttactagacataagagaattcatactggagagaaaccctacacatgtgaagaatgtggccaagcctttaggcgctcctcagcacttactaaccacaagagaattcatactggagggagaccctacaaatgtgaagaatgtggcaaagcctttagcgtatcctcaaccctcactgaccacaagagaattcatactggagagaaaccctgcagagacttgttgaatgcttttgacccaaatgctaatagtgatgtagatgataaagtccaggctgaggttgtctcagatggagatgtgaaacttatttttaaaatggaagcagaacataaaagtttggaaactttgcacctgaccatgaggtagaatat

SEQ ID NO: 476447 - DNA, 871 bp, Homo sapiens
gggcggtgcaagatgtgctttgttaaacagatgcttgaaaggcagcatgctccagagcataaaacattcccaaaagtgatactgagaagatatgaaagctatggcattcaaaatttaaacttaagaaaagactgggaatgtgtaggtgactgtaagggacagaaaaaaagttataatggacttaaccaatgtttatcaactacccttagcaaaatctttcaatgtgatgaatgtggcaacgcttttaaccagtgctcaatccttactcaacataagagaattcacacaagagagaaaccatacaaatgtgaggaatgtggcaaagcctttaactggttctcaaaccttattcaaaataagagaatttgtactgtagggaaaccctacaaatgtgaagaatttggcaaagcctttaaccagtgctcacaccttattggacataagagaattcatactggagagaaaccttacaaatgtgaagaatgtggcaaagccttcaactagggctcacatctcagtggacacaagagaactcatactgaaggaaaccctacacatgtgaagaatgtggcaaaacttttaactggttctcatacttttctcaacataagagaattcatactggagagaaacccctacaatagtgaagaatgtgcaaaagcttttatgcatggctcaatccttactaaacataagagaattcatactggagagaaatgctacaaatgtaaagaatatgacaaaacctttaatcagagctcacaccttattggacacaagagaattcatactggagagcaaccctacaaatgtggaaaatgtggcaaagcctttaactggttctcaaaccttactaaacataagagaattc

SEQ ID NO: 476448 - DNA, 2826 bp, Homo sapiens
ttaacaaaaatggaaaactgtgatgccacagggctgtcatgctacctacctacctgtcaacctacctacctacctgcctatctatctacctacctatctacctgcctgcctgcctacctacatacctacctgcctacctacatacctacctacctgcctacctgtctacctacctacctgcttatctacttgcctacctacttacatatctacctgcctacctgcctacctacatacctacctacctgcctacctacctacctgcctatctacctgcctacctacttacatatctacctgcctacctacctacctgcctatctacctgcctgcttacctatctaactacctatctacctgcctacctatctacttacctacctacctgcctacctatctacttacctacctacctgcctacctacctatctgcctgcctacctatctacctacctatctatgtacctgcctaactacctatgtacctgcctacctacctatctacctgcctatctagctacctatttacctgcctacctacctatctatgtacctgcctaactacctatgtatctgcctacctacctatctacctgcctatctagctacctatttacctgcctacctacctacttacctacttgcctgtctacctacctacctacatatctacctgcctacctatctacctacttgcctacctacctatctgtctacctatctacttgcctacctacctacctggctgcctacctacttacctatctacctgcctacctaactacctatctacctacctgcctacctacttatctacatacctacctgtctacctacctgcccgtctccctacctacctacttgtgcacctatctacttgcctgcctacctatctacctacccgcctgtgaacctacctacctacctgtctacccacctaccttcctgcctgtctacctacctacccacttacctacttagataagcaggtacctatctacctatcttgagaagacaggaaacagctaactatcttcctacctacttttttcccccaataaccacagtctttctgtgcttatggttttattctgggaacctacacaagaactgaggcaaagccatggggccaggtgcccacactgactggatacagctttgggctgggcattgtgccttgggtcgggattttcatgatgaaatagctgagcattggcctcctgaccaaacatctgccgagtctggggagggcgatttactcctcaggaggctccaagatgaagggcaggtgcctcagcctggtggccccatcttctgtgatccagatgtgcctgccctgaggcttccttcctgcagcccccctccccacccctgccatccggcccctgcatctcctgcaatggacacgtctccatccctggttcatatgccatgtcctcctatcccggtgcctttgcacatgctgttccccatgctccaatgcccttttccaccctgtctgtcaaaatcccacccactcttcaaggcctgcctcacatgctatctgcacagtccccggtagctcccttccctgtcctcaccaggtctggacaccccctactgcagtttgcttcacaccacacctgtgtgtgcctgccccccagcactaggtttaagattcttgagggcagatacctgatggacccttaccttacacccagcaagtgccaatcaatcttcaataggagcgtgagatttattcaaaccttagtgctgcttcttcatagctgtttgaccttggggaagttacttgacctctctgggcttcagtttcctaaatatacatatgtacgtatatatatatatttgtaatatatattacatataaatatacatatgtatgtatatatatttgtaatatatattacaatatgcaatatattatatacatatatacataaatatatttatatacaaaaatgtatgtacataaatatatatattatgtatataaatatatactacatagtacatatatttgtatgtggaaatacatatatgtatatattacatatatttgtataaggaaaatgaatatatatttaggaaataatatgtatagaattctatatgtataaatacatatagaaattatatataatttaatgcattgtatgtatttttatatatttatgtatatgtttatatatgtatttttatatatatttctatacatagtgcatacaatttagtgcatacaatgcacattttataaatataatttatatatgttacatagatatgtatatatatttatatataatttcatgcctacaatgtgctgggccctgtgctgaatgctttatgcacattgtcttgttcatataattcctccttgtaagattgggacaatcacaggaccattgtactcggattttgggagaatgatcatccaataatcctcagacgctccccatagccttgggcaatttcctgtccagctggaggataagaccctcacaagaagaggtggttactcaacggtcctcaatacaagggtaactgccaaatggtgatcttctaatgctgtcattccttctgcaattatttgctgactttctacagtaagaaagagctttatgaaatgaaagaaaatctaaataagtgaaaacacttatttagaacattcttgttcatgaatcagaaaacttaatattgttaagacagcaatactctccagattgatctataaattcaatgcattccctatcagaatcccagctgatgtatgtgtgtatgtgtggttttattttgtttttgttttgttttgtttttgcagaaattaac

SEQ ID NO: 476449 - DNA, 576 bp, Homo sapiens
tccctggcagggctctcataatgcctggcagctcctgctcacccctcactgagccagaaatgggccaatggtgggagaaagtctgtgctgtgatttcagctgggttccccaaactcgcccccgtgcttgcacacggccagcagaggtgtgttgtcctagaaatccctttgccgttcgaggatttcttggatgctgcggccaattttcattcctgccacgaagcttctccgcagaccctgccaggaacatctctttttcatttatttcgggcacaggagaagcagcaagaggaagaaccctgcagacgtctccgtggaagaaatttagaacaaagaactgtcagagttcagtgctcagttcccccttatctgaggtctacctgccagcagcaggtccatttggcaggagcccaggtttctgaaaaactcaaggacatctttggttcccatcaggaactaaacatcttgtgatttccttggctattgctttaagctactattacctttttggttatcaagttgctcatttactgctcaggactagctaggtgcctgaactttcccttgaaggaactca

SEQ ID NO: 476450 - DNA, 606 bp, Homo sapiens
gacttagttcctgctgaaagagaatgaagacagagggcagaaacacaagtgcccaagggcattttgcttggataacaagagagacagcaaattcatttaagaaaatgttcataaacaaatttctctatgctgaccttttatcccctctaacagtaaaaagggttgttgttctgttgagtgaaaggattcgagtgagaatgggatccttaagtattcgatttgtctttcttgttttctatgttgttgatgtatttggtgcagcttgtgactggagcctgcgaaaagtaccatgtttctataaggaaatacggtcagaactaggctccacagctcgaactctgcaacctctggagaagtccgaacgtggggaggcaattgatcctggggagctacgaacccaaagtttcacagtaggaagggggaaaaaagaaaagaaaacatttttcctaatgtaacaatgcgaatgctagaaaatgacaagactgatcggttttaaaccattctgaagactgactgagcgtggaagttgctcaacaaaaaaaggaacgggtatattggtaagtagtctttgctttgtgtctaattatagtgactgtccttttgcac

SEQ ID NO: 476451 - DNA, 634 bp, Homo sapiens
tgggggtcagcggcttcattcttgaagtcagctctccaagctccactccagtcacctatcacaatgatcgctattccctataggtcaagcagcaaggaattgaatgccagggactgggtgcttacaaagtgtcagaagggttggaggaagggtctaagctgggcctctaatgacaactcctggagcaccaggaagggtgctaccagaaagactgaattcagaacccactgctgtagcaataaccccaggatcagaagctgctgccattactgctgctataattgcctcccaacgaaaggagctgggggaaaacgaaaaacaaaaaaacactggaatgtgattggggagaaaacacaaaaatttatatttccataccctgtcactatcaataaaagcaaaaaggtgtgtgaaaatggcctctcacttctgttttctacatgggatacaaagccatttactctgcactgcaaaatcctagttgcaaagaagtcttggtgtacatgaaggcaactagaagtgaggacagaaactgaaaataccctctctaaaatgtactactttctctacatctcacagttgttgggttattaacttatttgcttattttgggggaggggaataagcatctgtaatc

SEQ ID NO: 476452 - DNA, 734 bp, Homo sapiens
tcaggaagatagaagaccagaagacaacatggggcatctagaaaaaggaagagttagagacattaatgaggaacagccttcttactcttcacttgtcttcaaaatcaacacttacattgtaaagattttcttgcacattaaggcaaaaagctggcagaacccctgcaatgccttcctgactggtagggtgagagccaatatggtgggaaaagccaaatggaagcctttagagctgcctctacctagaaaaatagtgaatcaaaaacaatattgcatccctgcagggattgcagagattagtgccaccatcaaggacttgaaagatgcaggagtggtgatttccaccacatccccatttaactctcccatttggccggtgcagaagacagatggatcttggagaatgacagtgggttatcgtaagcttaaccaagtggtgactccaattgcagctgctgtaccagatgtggcttcattgcttgagcaaattaacacatctcctgatacctggtatgcagccactgacttggcaaatgcctttttctccattcttgtccattaggcccatcagaagcaatttgccttcagctggcaagaccagcaatattttttactgtcctatctcaggggtatatcaactctctggctttgtgtcgtaatcttattcggagagatcttgatcacttttcgcttccacaagatatcacaatggtccattacacagatgacattac

SEQ ID NO: 476453 - DNA, 641 bp, Homo sapiens
tgtccggtccctgccttaactgatgacattaccttgtgaaattccttctcctggctcatcctggctcaaaagctcccccactgagcacctcctgttagatgatattgttgtcctatatgaagactttgcacactgtcaaagcactaagctggaactgtcttcccagaaatcccttatatgtatgttttcaggtaacagttggaaacaagacatttttgcaagttttggaaggcacgaatgtggcaataatgaagccattatttattgtctgaaggttggtgtagggcaggtgcttttgcagctcacgctcatgatcccagagagtctagctgcccttgttgtgtggcaacagccgccacatctccagcgcacactgggctggcttcttcagcgtctccaaatcctggccagattgaagagattaaatgggtagatagccaatcaaaaagaatcaaactctgtaaaataaatgaatggatttattctgagccaaatataagtgaccaaggcccaaggcacatctcaagaggtcccaagaacatatgccaaaggtgaatgggttacagcttgattttacacattttagggggacaaaagttacaggcaaaaccaataatcaatacatgtaccctatacattgg

SEQ ID NO: 476454 - DNA, 1973 bp, Homo sapiens
ggaaaccatcgtctcagcaaactaacaccggaacagaaaaccacacactgcattttctcactcaaacgtgggagttgagcaatgagaacacatgggcacagggatgggaacatcacacattggggcctctctgaggaagatgttgaagatgtaccagcttcaaagaaagctaaaggtcccatcagtttcttccagtgtgtctacttggatgggtacaatggctatggatttcagtttcctttcactcctgcagaccgccctggagagagctctggtcaagcaaattctccaggacagaagcaacaaggacagcaattaagaatatgcaacccagagaatttctgtgaaaacattttgctctttggcctgaacaaccgtgctgtggtggagagcccaccggatgaggagtccacaaacccaaggtcagactttaactctaggagtaactctggtcatttatcttctctgtccttcaatacttcatctccaaatgaaaataaaagtgctacagcagcaaaaggactttcatctttggcaaggaatattatggaaatgtaccttgtaaagtgatactattgctaagatctttcaaatttccttccagttttgttattaaatgatccaaatgcaacctgcattttagacctagtgttgccaagtggaattagccaaagcggcgaataaaaatcagagctacacgaaccaaatacaaaaatgggaacattacactgacaaaaacaattttgcacttaaaaaatttagttttgtgtcattttcacagagttgctataaatcagtgacagcagaatatccttcaacccactgaatcagaacacatggaccataattttggactcttgattcttggctactatacttgatttttgattccttgaaatggattcttttttccaactagctttagtaattgttttcagcaagaggattagtttgataaaattactgcatcatgcttttttactttccatgacgatacgattgaataacatgataatggtgaagggccatttactatattttagggaattagttcattaaagctgtatatttatgccatatttaagatgtccacggctttctaaatttttttcaatttctttgacgttttctagtctgttttattcaataattttcaatggtgtgttctttattttcacctttaagacagcaattccttgatgtgtagtatttttctattgacctcaagttgtacatttttctttaataatctttcaaacagggaacctcaatcaaatggtgttttcagtagagggagtatgaggacaatagggatgttataaataagtactgccatgcattttattttattttgtttttggttattttagccattctaataggtctgtagtgatatcttattgtggttttgatctgaatttctttaataattaatgatgttgaacatcttttcatatgcttatttgttatttatatatcttctttagtgaaatgtctattcaaatatgttgcacatttttaaatgtttttattttcttattgattcttaaacattctgtacacattatgtattcaagtactttaccaggtaagtgctttgcaaatatattctccttgtctgtggcttgtcatttatcttcttgatggtgcttttcaaagagcatatattttgatgtagtccaatttatcaataatttttatagattgtgattttgtggtcttatctaaaacactcttgcctgactcaagaccataagattattccatcatattgttctctagaagttttacagttttgagttttacatttaggtttgtgatctattttgaattaattcttcatatggtgcaaggtatgggtcagagttcatattctttttgcaaataaacaccaattcttctacaccattggttgaaatactaaattttccacatagaattggttggtataacattttccaaaatcagttggt

SEQ ID NO: 476455 - DNA, 721 bp, Homo sapiens
acttccttttttccttccccacagctgcaagctcccattgatggggggtaggggcaagaattactcagtgaagatgcatggaaatgccttgatgcctaggcaaaagtttgctgcaggggcagagccctcatggagaacctctgctagggcagtgcagaaaggaaatgtggggtcagagcccccacagagaatccctactggggcactgcctactggagctgtgagaagagggccacagtcttccagatcccataatggtagatccactggcagcttgcactgcatgcctggaaaagccacagacactcaacagcagccaatgaaagcagccaggattgaggctataccctgcaaagccacagggacagagcttcccaagaccatgggaacccatcttttgcatcagtgtgaactggatgtgagacctagagtcaaaggagatcattttggagttttaaaatttgacatccctgctggattttgcacttgcatgggccctagactggcttaaatttcagtacacaatcaatgatggaaataaatttataaagacttcataaagaaaacagtttatttatttttttaaaggcaatctgaaaggtatgtataccttcctgcctccaaaaatagtattctttattatgatcataatagaggctctgatttttctccatcataaatctagtgactcaatcgttgatggcctgaaatattgctttat

SEQ ID NO: 476456 - DNA, 1707 bp, Homo sapiens
ggaatctggcagtgggtggaccatgtgcaagctgagttgcaaggcagggaatgcagacacctgtgagagtcctcacttgccctgcaaatacctctttgtccaagggcattccatagcaaatatcgaacactatgacaggccaagaaagaccataaaagaaagcaatttttcccaacctgttgtgcagctttgctatgaggatgtgaatggatcttgtattgaaactccctattctcctgggtcccgggtaattctgtacacggcgtttagctttgggtctttgctggctgtatttggaaatctcttagtaatgacttctgttcttcattttaagcagctgcactctccaaccaattttctcattgcctctctggcctgtgctgacttcttggtaggtgtgactgtgatgcttttcagcatggtcaggacggtggagagctgctggtattttggagccaaattttgtactcttcacagttgctgtgatgtggcattttgttactcttctgtcctccacttgtgcttcatctgcatcgacaggtacattgtggttactgatcccctggtctatgctaccaagttcaccgtgtctgtgtcgggaatttgcatcagcgtgtcctggattctgcctctcacgtacagcggtgctgtgttctacacaggtgtcaatgatgatgggctggaggaattagtaagtgctctcaactgcgtaggtggctgtcaaattattgtttctgctagtatatattgtcaaaatcatccaacttttttgatttgcgttgtacctcctgatgggtcacactatgtacctctcctatttggaccggagactgactcatcgggagcacaaaggccagtcaccaggaattgcaaacaaatgcgtagtcagagagagagggctcactgcccatttgtcatgtggatgcagacacattgcagatgtgttcccagagcactgaaaatcaggaacaatcctgtattttttgtgataatcaacaaggacaaaacttctccatatgtaaataacagcgttatgagcagcaattcatccctgctggtggctgtgcagctgtgctacgcgaacgtgaatgggtcctgtgtgaaaatccccttctcgccgggatcccgggtgattctgtacatagtgtttggctttggggctgtgctggctgtgtttggaaacctcctggtgatgatttcaatcctccatttcaagcagctgcactctccgaccaattttctcgttgcctctctggcctgcgctgatttcttggtgggtgtgactgtgatgcccttcagcatggtcaggacggtggagagctgctggtattttgggaggagtttttgtactttccacacctgctgtgatgtggcattttgttactcttctctctttcacttgtgcttcatctccatcgacagcaaggaatttgcaagattagaagccatgtggaatatacatcaatgagaagcattcaggtattcatccatgttttttccatttaccaaacatgaaacctgtgcctatattgtatggaaatcagtgctagatgccttagacacaggcataacatcccatttttgtctttaataagctgtgactctggcaagaagcaatgttggtcactgaaaattttaaaaagggcgaacactagctcaaccaggagggaaaggatgggaagcgattttcaggcatgagcaaagaaa

SEQ ID NO: 476457 - DNA, 622 bp, Homo sapiens
ctaattcatgtatgtaggatatttactccaggcttcatgccatccccatgttggctgcatgccccaaaatatatttggtaaaaataaaagtgcttggactgggcagaggtggggtttgtgtgagttgggtttcctgaagtgtgaaatggagggggtactgctgcaaaggcgcaaaaaattgcaccagacaaagttaaagacaaggaagactttactgcagacaattgctacaggggagaaaggccagaactcaactcatctgagctcaacttcactgaaacaaagggctgaaaagtttttgaaagttaagggagaggaggttgtagaccacttgtgtttgctaatgggccccaccaaaagggaaagtgaactttcttatatcttcatgacaggaggaaatagaggaaaaaatgagaagtggtgctagaaggtatacttccatagaaggaagatagtatgccatattgaaaaggcaaataaagtgaaagatcatgtactagattctcactcaataaatgtttatttatggactactatggattttgcattgaattgaatgttctaatagcaaatacaaaagaaataaaataatacttcccataatctcatctgtggttggtga

SEQ ID NO: 476458 - DNA, 654 bp, Homo sapiens
ctggaaaattccctggcttataaaattggagaggagaaattagttctttaattagcgatgtctgctatgggtgttggtgccaatggtctcagcaaacttgcaagcaatgtgcgccgtgtgacaatccagtacaggggcatacacagccagcgtgattcaccctggaggatgcaggataatcaccggagcagtgaagcctgctgcttccacagtgatgttgccacgacgaacagctttgccagacacattcttgacattaaagcccacattgtctccaggaggagcccactcaaagcttcatggtgcattttaacggacattacttcagttgtgatgttgactggagcagagtgtttacgctactggtttgagaacaccagtgtccacttggcccacagggatagtgccaatatcccaaattttgtagacatcctggaggggcagacgcaagggcttgtcaattggatgagttggtgtttcaatgatggaagtattttatagattgcgaatgctcttgctcctggaacatatattatttctcacatattaagatgcaccctctcttaccccatattcaagaatcaattcaaaatacattaaagatgtaaacattagaactgaaactacgaaagtattaaaaaaaacatatggaga

SEQ ID NO: 476459 - DNA, 850 bp, Homo sapiens
gaggtttgagcaacagcagccaccaaacagacaagccacacctccatctcacaccctgcaaggagggggtcagggaactctcttgtttcagagagcatcagctgcagtagtatagagaggatcaggcagtgggtgaggctatagagctcccaagagattatgtcctttgtctttggctaccagggtaggcagagaaaaaccatcagctgtctccaggggcctgcagcagcactccgcttccttcaaaggatctgtgaattctctcagctttcctggtatgttcttgtggtagttcttggagcaaaagttcatgatgtgagtctccacacgctgctctgtcaatccaagtgggagctgcaagttaagaagtggggcattgctataaagatacctgaaaatgtggaagtgactttggaactgggtaatgggcagaggttcaaaagtttggagggatcagaagaagacaggaagatgagggaaagcttggaacttcctagagacttgttgaatggttttgaccaaaatactgatagtgatgtgaatagtgaagtcctggctgaagtgatctcagatgaagatggggaacttattggaaactggagaaaaggtcactcttgctatgctttagcaaagagatggtggcattttgcccctgccctagagatctgtggaactttgaacttgagagagatgatttagggtatctggtggaagaaatttctaagcagtaaagtattcaagatatgacctagtggtttctaaaagagtacagtcatatgtgttcacatagagatggcctgaaagtggaacttatgtttaaaagggaagcagagcatgaaagtttggaaaa

SEQ ID NO: 476460 - DNA, 805 bp, Homo sapiens
ccagcagtgggaggaggaaaaaattcatatgttccgctgactctttttgacacaccatgctagctacaatgtgcaattgtcctgtctgggaaatggaaaggccagcttcactcctgaagccagcaagaccacgaacccaccacaaggaagaaactcctaagacgtccgaacatcagaaggaacaaactctggacacaccatatttaagaattgtaacactcaccgcgagggtccgcggcttccttcttgaagtcagtgagaccaagaacccaccaattccagacacagcaggacaagctggcaggaaccggaaaagccatcctctaggtctatacgtgaaaatgcaatttgagcaaagacacgtgaggagtttcctgggcctagggaagctgcagtgtggggagggggtggatgggctggtgtgtggcctaggggcagccttgctggagctctccaccagtcagatactatctgccagcacagaagctatggcgtggcctccagggcacccaagactgccctgcaagcaggtctggccaggctgggaccccagaaaggccagcagaccaaggggtgctcaggtcgaatcagccctgtctgatggacaagaccaccctgcagagatcaggatggacagttcccctagggctaaagtctcctatgggagcaagtcaggcctggggagatggctctccctggctgtgctccactgcaggtgctcccacatcaaatcgtcctggctccacatcagcttgcttgccctcccacgacttctctaaggagctcttcttgccaacttgagtgt

SEQ ID NO: 476461 - DNA, 653 bp, Homo sapiens
ccggccatttacacttcttttgtggtggaatgtcatcacttaaggtggggcagggcatattcacttcttttgtgattcttcagttacttcaggccatctgggtgtatacgtgcaagtcacagcggatgcaatggcttggcttgggctcagaggcctgacactaaccttccttttggcttcagaaaagttgataagctacaaaatgttcctccctgacactgtaaaggaagaaacaaataactcagacacaatttggaagatggtcacctatccatctcagatggatgtttggtatgactgtacctttggttttcattcatctggacattttttactgagcaactccgatgtgccagacattatgctagaaataacagatggttttggagacatgactgatatggtttggatggttttttcccctccaaatctcatgttgaaatgtgatattcgatgccagagttgggcctgcattacagctgtggttaactgtcaacaaccctcggactcagtttcatgtctgcagagaagcaccatcgcccatgatcctacccatcctccacacacaaagccacaaaggaaagcagccagagttctgtacgtatgttttatttgaacatccacatttcttagcttagagacaattatattcc

SEQ ID NO: 476462 - DNA, 1137 bp, Homo sapiens
atcatcacagcaggaaggaaaagtaggatccccagcaactagagtttctctttgccagactagactaaagaaggagcactaatttattctgataaaacaggtctatgcagctaccaggacaatggaatctacgttgactttagcaacggaacaacctgttaagaagaacactcttaagaaatataaaatagcttgcattacagggtctctctcctttgggatctcacctcaccacaacctctgtttcccaggctcaagtgatcctcctgcctcagcctcctgagtagcttggaccacaggcacatgccacaaggctcagctaagtttttgttcttcttgctttgctggtgatcatgtcacttggattaggcctggggcttggactcaggaaactggaaaagcaaggaatggaccagacttattgtaacaagatggaatacatgactgattattttcccagaataaacttcttctacatgtacgaagggcctgccccccgcatccgagctcataatatacctcatgacttttttagttataccattaaaaacatttgtgatttgtgggaggtcaaaatatcatcattaataggagtttggaagaagttgattccaaccctcctggataactttgaagggttcatgacttcagcagaggaagtaactacagtcgtggtaaaaatagaaagagaactagaatcagaaatggagcctgaagctgtgactgagttgctgcaatctcatgagaaaactggaacagatgaagagctgcttcttacggatgacaaccaccattttgatcagtcagcagccatcaacattgaagcaaggccctctacgatcaaaaaagatgacaactcactgaacgctcagaggatcattggcattttaagcaattaagtaatttaaaattcaggtatgtagtttttagacatagtgctgttgcacacttaaaagattacagtatagtgtaaacatatttatgtgcactgggaaaccaattcatatgacttgctttattgtggtggtctggaagtgagttcaaaatatctccaaggtatgcctgtggagtaaaatctctgaggatggagtgcaaaggactgacgataaacgctgagcaaagagtggttaatataat

SEQ ID NO: 476463 - DNA, 1005 bp, Homo sapiens
agtgtgtcatagagctgaaatgaacagtaacaggaaaagaatatgcccccttttgaaatatacatttaagaatgcttagaacacttactctgagtcagacactgtatgcactgctcagagtacagcccccaaggaactacctgtgtgaatttctaaatgtggggagaggcagtgctgctctgatccaaggcagcgaaggtgaagccctgtctactgtcccttcctgggaggcaactgagggttgtgtagtttgtgaatccttaggcttcttggggccatggtttgacagcacaattataaactttgctcttttgcgctgttatgaattgaattgtgtcttacaaaacttatataaaggctctattagatttgggctagactacgtcacagatgatgtgttttacttcatattgcatctcattaataggcccacaatatctggttgtccaccagtgggatgctgagagagaccactgagagtggggataacatcttgaaccctccattgcaagaagaaactaatctctgtgtggttatcatggcctcatataggtgtctagttccctacccatcattcatctaatagtgtcaacaccagttcatggcctgactggttgatttaattgttgccaaatgattatttcctaattctgtcacttcacatgtgttgattggggacattccttattaactggagctttctgtttaccctgtgatacagtccctgcttaaaagaaggatgaattgtttattctttcccattactcacaaattttgagaataaagaattagtttaataattattttaattagtgatatgtgatatcctttttttctgacttccccttttgttaatgtcattataaactctgatttttaataaatttaatgaatttcaaaaaactacaatcagggcaggggtggttgttcaaatggtcacaaatgtaatcagaagacactttaagctggcttctgagtccctttgataggactccattaatcttt

SEQ ID NO: 476464 - DNA, 800 bp, Homo sapiens
agcagttatttacttagtgtttaatcattttcttattcaaccaaaatgttccaatggagtcaggaaatctactacattctagggatacagtttttgagcaaaaataatactgactctgattcatggaatttacagcctagtgataagatagatattaatcaaacaactgcccctgaaaggagggacaacctagactctcaatctagaaaagtggatgctccaaatgcctggagatatgtccagggtgagccaaatacctggaaatatgtcccccagagaggaaaggagtacctgctgcagagtggagtaactgctgctacaacaggatcttggcgagggagtggggagtgggtgtgggggtgggaagaggcagctcaggctcctatttcaggcaagcagaattggtgggttcttggtctcgctgactttaagaatgcagtcgcagaccctcgcgtaatgaagctgcagacctttgcggtgagtgttacagttcataaaggcggcgcatccggtgtcgttcgttcctcctggttggttcgtggtctcgctgacttcaggagtgaagctgcagaccttcgtgctattgcaataattttgaagttcactgtgctttgcaaacccgatattacttccattctgtgatattattatggaaattaaagagcagaagtcagatctggaaagcaaagatatgggaaattatttaacatatcaaaaggaacccacgtctactctaattttcctcttggttatgccaacaatctttctcattttggaatgtcttttataagctttgtaaa

SEQ ID NO: 476465 - DNA, 686 bp, Homo sapiens
cagcagtccctggagtaccatccatcctcccgctgaccttccagatgactgcaggtgcatgagcacgcccagcagggatcagctgagcaaaatcacctcgccgaatcatagtagatgggacttaacaggacgatacagcaggggcattctgcactgacagttagatctccagtggacccacaactcccaatggacaaagtcagagcaggatgtggggaagatggcagcaaggagaataaaaataaaagaatgcaagaagaaaagaaaggagagtttcagaaagggaggaggaagaaaagtgtgaaagagagtgatgaaggtgaagaaggaaggaaaggcaggaggaggacatcatggataagactagcagcctattttttagatgcctttgagctcatctgtatcagtttcctatggctgttgttgcaaattaccacaaacatggtggctattatataccctgagatgatgaatacccctgtgacttcttcatgcagtaccctctcactgagacctgtatcacctgacttgtaacctggttaacttttcatcctcctttatagttaaccagcaaataacttctaggaagaattccctgaatttccaaactgctttgaatatcactttccattttcatatttctctgtatcgacctctattattgctttacctgttgcattatcatt

SEQ ID NO: 476466 - DNA, 519 bp, Homo sapiens
agccaggaaaaggactttcacaaggataatggtctccagctgcatccatgttgctgcaaaggactgggtcgtttacaccttagcacaaacttggcatctgagattaagatcaattgacgtcaaacttacttgcccaaggatctgggcaaacagggcccaccagagacttgtatccaaatgtagcaggaaagagcacctctgggaaaaggaaaatgaaggtggctggttaaaaagagagcatcagtttgtaaacagctgtctgattgctgcgtctgcttgtgaaaaggagagtgagagagctctctggggtccttttataagggcactaatcccactcataagggctccaccctctgacctaatcacctcccaaagtctccacctcctaataccatcacattggggggtaggatatcagcacataaattttggagggactcaaacactcagccctaaacactccccatctattttcccctctcttttcttcttttcataaccaaatttctcaagacggtg

SEQ ID NO: 476467 - DNA, 640 bp, Homo sapiens
aggaggttattgcaataatagtttcaaagaacatcttgatgtctgcctcaggaccctcagctgcaggtctattggagttcgctgaaggtccactccagaccctgtttgcctgggtatcagcagtggaggctgcagaacagcaaatattgcagaacgacaaatgttgctgcctgatcgttcatctggaagcttcgtctcagaggggcacccggctgtatgaggtgtcagtcggcccctaccaggaagtgcctactagtgaggcgatgcctcaccctgctttggctcacactccatgggctgcatccactgtccggcacccacagtccggcaagccccatgcctctgaaccactggtcactacacttcaatgggtggtgtcagccaaattgtttcagtgtggtgacagcgggatccatccctgtttgcatgtgccagcagcagtggtagcagcagctgcagcaggatgctagcaggtgttatgccctgggaattttcctccgaataccggatctatcaaattgtaggaaattgaaggtacctcactcattttcaattaggttcactctttcaacaaatgtttactgaagaagccctttatgagttgcagtgcttggaactaaaatacaatggtacagaaagc

SEQ ID NO: 476468 - DNA, 714 bp, Homo sapiens
cgattattgaatatagtggcacaagacagcacatatgctatgcgggaaactctcttactggggctcctctttgtcccttgcaaaacatccaactttgggtctgccacaccagaccgccccccccaaacaaatcctccaccttaccccactggtgctggcaagcactctaaggatggctcagaggagaggaaggccatcaatttggatctaagccttttggtgtcagctcagcaagagagagatgcaatcagtaacattcagtgtccacgtgatcagatgagccagttgttcaggagcagcactactattcccggtatggttcctgaatatgctttgggctattggtctcctccacccccacacccatgtcatgcccaggacaggaaggagctctctctgtctgatgatgggcactctcatcctcaagctctcttggagctacccctctcattttcccaaaagttgacaggataacacttagaaaattttcagagtgcctcagtttccttcttacatacagagaaggggagggtgaaggagatttagttttttacgatacgaatacaaagaagaaaaataggataacatccagattcttaggattttgcagcaaagcgattggcttgagaggcaggcattgtggaaagagaaaggcatattgaagtgcctttggatcctcgtgtagtgcatccgcaaccaaacctgcagacttat

SEQ ID NO: 476469 - DNA, 797 bp, Homo sapiens
ccagtaccatgctgttttgtttcagaaggaatggtaccagttcctccttgtacctctggtagaattccgctgtgaatccatctggtcctggactccttttggttgagtctccttgggtgggacttgctatggctgctgtggggaatggcagtgtggttctcaggccagtggagttatgttcccagtgggtgatggctgcctttgctgccagtaaaagaaaaccagctgactgcaggtttctccacagttgtatttactaccagaggataatggagccgtttctacaaagtgtgcatcaagaattctgtcttttgaaaaatgagaaaagggataaaaagtcccagtttcttgttactatagcaatagctacacacactaatgtgaattacctggatgcattctgcagcgaggaccattttattggtcaggtgggaggcaaacctagatggttggtcatcctcattactacatcccaaagcagggccccacagaaaccaggactagactgcctgtctagtgggagctggagccacacaggagattcagcagctgccagtgaagctgtcttagacaaaaggggtgacatctttcccctccccgctctctcatttcctatctgtgcctcctgttggccaaaccagctgcctgtcagctgatattttagttatccatggagaaaacagcactaggcatagattctggactcgaggggccttgtgtctaccacacaataaatgtagatctttggaaccctgagttgatacagagctggctgttaaagtggtgttaacagtatc

SEQ ID NO: 476470 - DNA, 1841 bp, Homo sapiens
agcagttcctccacaggtctggatcgtatctcctccagtacataaagatgtttctgctgagcaactgtggaaagggtatcagccaattatcccatgggtccacttccagggtctcacatgagatctgcaacattgatcagcaggtgaatttcaaacctcagcttcaatgggagactcagaaagtagacagaagacaggcagctacaggagctgggacaccaccatctcctgcccttggacatcagacctccaggttctccagccttcagactctggagtttgcagcaggaacagctcacgagggagcctggtttttgcaaggtctgggaaagaggtctgtccgtaaggcaattgacaagagttctaagaaagatagaatgagaaagactggtacagagcatgaaagatgtaagccagactctttttgtaacctcattgtggaggtggcatcctatcacttcattgcattctatttgctacaagtgagtcactaggtccagcccacactcacctaatttaaaaatcagacaggccaaatgactttatgtaaggtcacataactcaatctccaaatgtctaatccagtgattatgccaacacattcactggttcttatgaaaattattcccatatataactcttccattccaagttttcattgacactctaaaccatatttgcatttgacttcttttatatatatgtatctctgaaatatatatatttacatgatatttttctgacatactataagatggtggctgtaactgcttccctcctgtattttctattgactttcatgtaagcacataggttacacaacatgccaatataagccaaaaatattgctgtgaaaatcaaggacaagaacaccatattattctcaatgctcattagcttgaaagcaaaagcacaatatagtatatagtttgaggagggaacttgtagtttgtccatgtattaagattcaaataagtcataatacaatggaaatattaattcatatttagtgagtatgtgataactaatactttttaaagtactggtattcagaaagcactgcttattcctagaagcagctggagggcatttttcaaaattgcatgtagctatacctgtagaaaactcaaaagaagtccaatgccaggtcaaagttttgttcataggacacttagtttattttatctattatgtttttcacaattcccctattgacggaattttactcctgagagattcagtgactttcccagagccagatatttatctgtgaagaatttccacctatcattttgttaattattgaaattaaattcaattcaatatcctttttggttacttcttatggctaaatcccacctgatcccttaaagtcatgaattgagctctctcatcaataagaggaattatgcatgagcaagtatgactaatacctaaataacactttctgattgcatctaagagtaaattaaagagaaagtctaactgtaagaacgtatgcctttgattttgtgggtaaaatggcaacctgtaatctctatgtttttaagtgatgaatcataacccaacataggtgtctatttgaaatttataatgggtttttataaatactgtcttgcttaaaggtgtctattttggaggtccctttatttcagggcctcttaagggctatattgttagtttcaaatgttgcttttattgaacagatgataaagatataacaatcagggctttaggcagaacaaaagaaacatgaaaagagtgttttttgtaccttcaaatttccatttttttctttaaccaaaaccattaataacacctctccagtgtacatattttac

SEQ ID NO: 476471 - DNA, 933 bp, Homo sapiens
agcagttcctccacaggtctggatcgtatctcctccagtacataaagatgtttctgctgagcaactgtggaaagggtatcagccaattatcccatgggtccacttccagggtctcacatgagatctgcaacattgatcagcaggtgaatttcaaacctcagcttcaatgggagactcagaaagtagacagaagacaggcagctacagggcaaagctgccaactggaggatagactgaaagtttatgtgaagctcagttacaccccagatcccctctccaggaacctggccctcttctacctctatggaacagatttacctttggagagatttacagctgaaaatggacagtggggtggcattggtgaaaggcaacacagaaagaagctacaacccaaaagaaaagccccacagatgctgagagctggtgatcctcaggaaaagactccacctctggctgaggaggactctaagggtaagggacaggaagggcctgaggaggaaagagcaccgtgaatgccaatgtcagtaaatttggtcactttacataatcctatatttctctaaggctttgatcattttttaaaattctgttttcttgatttttgtctgactgggtgaattcaaaagaccagcgttcaagctctgaaatgctttcttctgctttgcctagcctattgttaaagattccaactgtatttttaaatcctttagggaatgtttctattccagaagttctatttggttttttcttaatatagctgtcttgtcttttatatcttgaatcatttttctggcttcttcttattggatttcaactttctcttggatctcattgagtttccttgcaatttatattttgaattctttttctgtcatttcaaacttttcaatttgattaggatccattgctagaaagagaatgcaatccttc

SEQ ID NO: 476472 - DNA, 731 bp, Homo sapiens
cctgtgtgctgacactttcttaaacagtgagtgtctgaggagttttgtctgcagctggccctgctacatttcttggttccctgaccgggaagcaaggtgattggcgaatggtcgaggcagctccttaggtgacttaagcctgccctgtggaacatccctgcaggggactccaaccagcccaagccatgcggatcctgagagcactcccgggtaggcatttgcccacacttgtaccacccttagaatttccggtaaaccagagccagcctgaagatcacgttctcgtcaaaaggtggaaagaagaaaaactcgagccagcctcagaaggaccctaccttgtgctgctaaccaccaagaatgctgttcatacagcaaaaaaggatagactcatcatgcccgactcaagaaagcgccaccccctccagagtctgggcccaacctccaaaccatccttaaacagcagtagactgagagctgtacgtggatgggagcagcttcaccaacccctgcaaagtggctctgaagaagataacaagccctgcttcagtcacacctggaagctgactggtccatgcacggccgaagcatgaggaaactcatcacgggactcattttccttaaaaactggacttgtacagtaaggacttcaactgaccttcctcagactgagggctgttcctagtgtatacatcatgtcactgaggagaccacagcaaaactctcctcatctc

SEQ ID NO: 476473 - DNA, 642 bp, Homo sapiens
gacagcctgcgcactgagagaatggggtggagccacggaagttcacacggtttgcagcgaggaggaactggcccttcttattctgaggaagaagtaagtggggccgctcttcttgcacttaatgatcggatggttcagcaactggtaaagaaaattgggcaccaggctgttctgatggatttaattaaaaaatacaagcagaacactcaaggactgaagtccccagaaaaccccaaaaaggcagccctggtcatgcaaacagaagcagctcgagaggcaacagccttggattcaggcctgcaaggccccagcagccctatgagtgcagagaagagcagcccctttgatgaggagctcctgcaaatgggctttggctctgggctctcctctccgctctttttccctctcttcaaccttggacctcacctctagccccacagcctcagtgcctcaagatctcccagtgttagggcccactgactcttgtttggggtggcaaccaagaaggtggaaggctatgtccagtagctactcttgccaagataaagaaggtaattcccaggttactggcataattaactcagaagcagaatttctgattcacttgtagtttggtaaagtttgttccctatttggaaggga

SEQ ID NO: 476474 - DNA, 2408 bp, Homo sapiens
aaaaggagtcaaacgctttagtttagagagtttatattgtaaattttcatgatactcagtatggatgcaacgagaacacgggaaaaccttgatgcaggatgcggccccctccctgtgagtggatttctattggagacttgtgaagaagatgaactgttacacagagaaacaaaaacagcatacagcctgaggccaattacaccatcgagcataaacctgggagttaacaggaaccatggggaggacttgagagtgtcaccaatcagggagctgggcatggagttgaatataactgacttgctttctcaggccagactttccacttctctttaccatacacacccctcctctgaggacctctgttttacagaaatgcttcaagatcttggtcctacttgtttaaaattttcattgaaagctctgctcttgtctgtaactggtctgggcacattggttttggcacccacagagtggaaagttttctcaaattcaatttttcagtcagaattgtgatttgatctgagttgatctgaatagcccagtctgcaacgctatttacaagtttgattccccaccctctacccctaccaatgattaaccacttgcctaaaaacatttgttgaaaaacatatgtcacatttatgttttacccaataaatatattggtctgtttctgacctatttttctgttccattcatttctcattattcactgtgattaacggttagacaccaccacaagaaggctgactatcctcatttcctttgttggcctctgtaactaatagccttgattttcaaatggtggcctagaacatgctcatgcattgctcatcagaatgtaaaatagtacaagctttatagcaaaacattcagttacatctaaaaaaaactatgcatttatcctttaatgtagaaatacaacttctaggaatttatcttgaagttacaccataaaaaatcaaaattcatacataaatattatttattatagcatctatagttgcaaaatatagaaacaaactaaatgcctaggaaattggttgaataaacattatatgtttacacaacagagcattgtgaagctgtaaaaaagagtgaagaaggtgcatatgaacctataaagatttctaggaaacctagttaaatgaaaaatgtaaagtgcaaaagagtttgtataatatactgccatttgtgtaagaaacaagactacacgtatgtatctgctgaattttgcaaagagaaacacagaaagaataaaccataaacttataaaattggtttcctttagaggttggtgggaacagggcaaaccatttagtatttcaaatattcggaatgtaaaattaaatataaaaagacaagaagtgaatcattaacataagtaaaccaaatgtgaattattaaaacaataaaataatcacacagaaataatacgagtaaatttgaacacagtactctgtatactttcaagaggatatagtctaaggaaaaacaactgtaaaggattcttgaatttactcaataactaattgttgctgctagtggtaatagtatggtaaatctaaaactatattgttggtatttataggatagagaaaatgagtaaatatcttaattttattggaaaccagggttcttactataggagaacagaggtataaaatatgacattgggaaaggagaggaacacatagtcccaagatatttttcctcagattacttattaattgcatagggggaaataataactttatatggagaacctgactgacaccactttaattaagggatcaaagtcaacatcaccaatattaggacaaactgacatcatgtgcttataatacaaggcactgaaaagaacacaagatcatttctgtaatatttctgccaaaaatgcatggcctgcatctaataataaggaaacatcagatatactgaaattgaagaatagcgtacaaaacaactgcctgtatccttcagaaataccaatgtcatgaaatgcaaagaaactgagaaagttttccagattaaaggaaacaaaagagccatgataagtaaatgcaaattcataacctatcatagatcctagaaaagggggaaattgggacaatttaagtattgattgtatattacatattgaaatgtattattatttaattttctctactttataaatgaactgtactgtgatcatagaagttcttaggttatgcacactgaatatttgggggtaaaagggcaataatgtctgcatcttattcttaagtggttctaaaaataatatatgtatgtatatattcacattatgtctacatatacatatatacatgtatgaagagagtgtatatgctaaagaaagtatgagacaatgttcacaattggtgaatcagaggtttctaaaatgt

SEQ ID NO: 476475 - DNA, 927 bp, Homo sapiens
gagtgggcggaatgagttcagcaggccagagcaaaactcagtcaaaggtgcacccaccggccatagaggtttcaggctggcagagtgacaccgcgaagatcccagaattgtgtataatatccatcctgctcttctctttttccttattaattccacctcttggtattttgctctgtgatctgacatcttttccctatggaatttctgcactactaatttgcttctcaacagtaaatgtagccttaggcttccccagaagccatggttacccaaggcaaggttccgagtctatcaacttaaccactcagctaccttatcacaacagcaaaattgacattctggaagtggtaacattatgggtaattggtccctacgttgatactgatgtcaccaagaatgaagaccaaggtagtggtagaaaggaagaaggggagttttttctaggaatggcaatggcaagaatggataaagacttacaagggatggttgttattctcctgcatcccaagaccaaatgttctgtaggatgcaggagaataacaatcatcacttgtaaggatcataggggtagcaaagccctcaagggagagtctggctacagtgagaggaaaaaggtttagagaagaattcaaagacatagagtatttaactgagacaggcaatgagtgtcaaaatgcaaaatgggtagctggcctgggagggtggaagactgtgcaaaattagagactcatatgcagataagaatcccagagataatgaaggataatctagaaagtctgtgtgtatttcaaactttttcattcttattatgtctgttatgatgatctgtgatcagtcatctttgatgttactattgtaattgttttcaggaaccatgaaccacccctgtataagacaatgaacttgataaatgttatgcatgttttg

SEQ ID NO: 476476 - DNA, 612 bp, Homo sapiens
tcctacggcttggaccacatccaatttaccttgcattgccaccctgcccagcagtaggtgcctgtccccggaagcgcagtcatgatgtcataaacctgacatgttaaaacccttttactctttacctgtgattgttcatcagacccctcagctgcagatctgttggggtttgctggaggtccactccagaccctgtttgcctaggtatcaccagtggaggctgcagaacagcaaatattgctgcctgatccttcctctggaagcttcgtcccagaggggcacctgcctgtttgaggtgtctgtcggcccctactgggaggtgtttcccagtcaggctacacgggggtcagggactcatttgaggaggcagtctgtctgttctcggagctcgaatgccatgctgagagaacaactgctctcttcagagctgtcagacgggacgtttaaatctgcagaagctgactgctgccttttgttctactatgccctaccccaagaggtagaatctatagaggcagtaggccttgctgagctgtggtgtgctccacccagttcgtgcttccaggcctctttgtttacactgtgagctactcaagcctcagcaatgcagac

SEQ ID NO: 476477 - DNA, 525 bp, Homo sapiens
gctgcagcctgcctcttcacagtagcttctccagatgggctgctgttgctatcatgtgcccccaccccatgggaaagaggaggttaggattgcatcatacctggtggaagtttttgtatctttaagaattggctacccaactgttgcatcagtaccccattctatcatcaacgggtacaaacgagtcctggccttgtctgtggagacggattacaccttcccactcgctgaaaaggtcaaggccttcttggctgatccatctgcctttgtggctgctgcccctgtggctgctgccaccacagctgctcctgctgctgctgcagccccagctaaggttgaagccaaggaagagtcggaggaatcacacatttataatagtccttcctccattactatttcttcattgagcaaggttcggatatttggacacctgaatagatttctcagtagagtattactgtcattgaagtgttaaaaaattccttctgctcttcattaattttcaaagcacacttataaaagcat

SEQ ID NO: 476478 - DNA, 705 bp, Homo sapiens
gctcactgaggcctccccagaagcagctgctgccgtgcttccttttcagcctgcagcgtcgaggaaaaaatggttttgtgggcctggtccaggaccccctgctgtgtacagcctggagacttggtgccttgtgtcctagctgctccagttgtggctaaaaggggccaaggtacagcttaggctatggcttcagaggatacaagccacaagccttggtggctttcacatgatgttggtcctggggatgcacagaagatgagaatcaaggagtgcctaccacagtgcttcattggggcaatagaagtgggatccttgcctgcatctacataccagcaggagccatggcatggtgaggtacatgtgcattggcaggggtgggccatgggtgagggtgggaggccagcatccatgcacatgctcacactggcaacagcggtgcagcaaggtgcccacatattggtggggtggcatgcccatgggggcttggcagaattatccatacaagcacatttgtgtcagtggcagtggagcaatgtagtgtgtgcatgcatgctggtggagaagacgaggcaaagtccacctgcgtgttccagcaaaacagtgtatggggcaggcgttggtgagcgtgcatctgcaaagtgcacgctgcgttgcatctgcacgagcgtgcatctgccaagtgcacaaaggcgttggtgagcgtgc

SEQ ID NO: 476479 - DNA, 622 bp, Homo sapiens
aagttgcagtgagcccagatcatgccactgcactgcagcccaggtaacagtgcgagactccgtctcaaaaaaaaaaaaaaaaaaaaatttatagtatccttaacaggtgtggggtgttatctcattgatcagtgtggaatgtggataaagaaatctcagaatgacctggggagatctgttagcaggctcttgggtattgcagtgaaattattttctagcacagcaagacatggttccactctgaggcgaattttaagatgccgatgttattctatttggttttgcaagctcagggcacacatatacgagtgtgtggagtgtgttgaaaaatgtcttccatgtcccttgcatctgtatcaccctggatggagtatcgaagctgtccctaaagaggtcacaattaagcagaaacctgaaagaaatgattgagcatatcagacacttacctggatcactgaaaaaacaaattacttatattctaaactttttcactgagtttgcttctggggaaattcaaactcagatacaagtcaatctcatctgcatactgtatttagtgtttatccatttctatttggtgtcacaacatattttggctatcgcttctgaatgtttttatttg

SEQ ID NO: 476480 - DNA, 530 bp, Homo sapiens
cggctgcagccctgcccaggacagtggggatcctgcctgctccatggaacaggaggccagggtttacagccatggtttgggcagtgtcatcaccccaactcggaaggaacagggctcccacttgtccgcagctccctttggcttcactgataatgcagccctagccattggagctgtgagaagaggtctaccatcctccagaccacagaatggtagatccactgacatcttgcactgtgtacatgaaaaaaccacaggcattaaatgccagcttgtgaaagcagccacaggggctgtaccctgcaccaccatagtggcagagctgcccaaggctgtgggggcctaccctttgcatcagcattccctgggtgtgacacatggagtcaaaggagattttgaagttaagatagactcagcccctaccttgcttgaagacaatgctcagacttcaaatgggctccttaaagaaaacttctgcccttctcaagttcagggcaaggccataccatcttcaacagataactagagag

SEQ ID NO: 476481 - DNA, 587 bp, Homo sapiens
ccagcaggtcagtccaggggtcctcgctgcttatgctgctgttctcccctctccttccccttttcgatggcttcagcagtatggtaatggaccttgaagacagtcatccaggacaggagattaacactgagaaggctgccaggaggaagtcaatttcctggccctcaatgattaaacgtacccgaggctcattgcactcaccggcgcagcagcagaaacaacccctgcccaagagcccacaatggtccctgaaccctgctgatcagaatagttgtgctcaccaacgcagcagcagaaacactagttttcctcccagaccacagggaggaccgaggaagatgtgtccggagtttcgtccttctggtgggtttgtggtcttgctgacttcaggagtgaagctgcagaccttcacagtgagtgttacagctcttaaaggaggtgcatccggagttgttcattccttctgtgggttcatggtttcgctggcctcaggagtgaagccgcagacctttgcatgggttcctggtcttgctggcttcaggagtgaagctgcagaccttcgcggtgagtgttacagcttataaagg

SEQ ID NO: 476482 - DNA, 1603 bp, Homo sapiens
aaaccatatcaacagggtaactatgcgttggggaaagggcaatgatcagacatgtcagggactactggacacaggctctgagcatatgatgattccaggggacctaaaacatcactgtggtcctctggttaaagtaggagcttatggatttcagataggcttatgtgaagatacagctagtgtattatatggtcaaatgcttagtccctcacctccctttgtgaagtttgggtatgattttatgtgggatctcatgttactgaaaaatacactgaaatccttggatagtgatgctggtgaaagtccagcaggcaatagaaataaaaacaagtcagaattatctgtgattttagaaaatatgatttgtatcctgcatatggcattgtatggctctagaaaactatgtgcctgtcatggttttactattggcatctacataaactctatgtagcatcagtttctaccacagatggatttaatgctctaaggtttgctaggttgcatggcccaagtgataggatactacaccatggacctactgcagagtctttttctgctctgggctctagtcaaagctgacagccatttatgccagctggcataaaactagaactatgtcctagcatggaatatattgtctacaaaaaccgaggaggtctaaccggcattatgttttctgatgagatgagtcaaatgtcatcatttatttggggaaaggaggagaggggtggtatagcatatcccagaccaatggacatctgataatgttattggatctttgtaaagctcataaggtttaactcctatcttctgaagtccatgtgtcttaccaaggcattcaatgtaatagccccttcttgaccaactagccctaatagaatgacctcatcaatcttgcagaccatgtggtgctttgaaagaagtacagttgatccaaatttagactatatgattagatggcaaaggttgttaagtgctatatctggggtgagtgctcccatagcaatacactcttctttatagtctacttctgtgtattcagcactctcagaatctagtccctcactccctgccaagtcttcagagaattgtagcattgataagataggcctcctctgtttgacagttcctggccagcagagtccatgagccagtgtaataaaatggttgttttatccaactaaattttgttgtgattagttacacaggagtagttactacaacataatttggcaactgaaatatatggctttatctttgggaccaaatgctggtgggatgctagaagttatgaggtgactgagagcctggacgaaactgttgctgagggcttatagtgaagagagtgattaaaagctggaggaaaggaaactcttgctatgttatgggaagattagccaaactcttatctgcgttaatgtagaaaatagaaaatgtaatagtaaacacatggattcggttaaggaggtttccaagcaaaatgctaggaatgccacctggttattttagctttatatgataaggtacagatagaatgacccaagctgaaaaagaactgttccattttgaaacaaatttcagagaagatataaattactattcc

SEQ ID NO: 476483 - DNA, 555 bp, Homo sapiens
ttataaattctatgggtttggacaaatttataacgacatgtatctactactacaaaacagacaaatccataatattggttggagatgccatcatcctggtctcaataactgaaagaacaagtagacagaaagtaagtaagcatatagatgatttgaacaatgctattgtgtcccatctgggtcgccaaaatgtgtccaaaattggttccttccggtgggttcttggtctcgctgacttcaagaatgaagccgcagacccttgcaagttgtttgttcctcctggtgggttcgtggtctcgctgacttcaggagtgaagccgcagaccttcacagtgagtgttacagttcataaaggactgtatgttgaattgtgttcagccaagttttggacagttgagaatatatatcctgccacatctcactgctcaactaatttctcttctttggctgccactgcttataacttcctatgccaacgagtttcagaattgctcagtctctatggataagaaaagcaccaacaaaatatacattacatttacgatttcatttctt

SEQ ID NO: 476484 - DNA, 4499 bp, Homo sapiens
ttttttctgcctcttcagtgcttctttcagcgatatgaagttaaaaccagctcacctgattgatcatttgcatgtatatgtgtgtgcatgtgtgttgtttgttaccacaataccaggggtttggtctaggtcctgctgcttgctgcacagaaagccaatcactgagaagacaaatattgccaagggagaaggctttaatcgggtgccgcagcaaggagatgggaaaatgggtctccaagttctggaaggtttcagtagagttttcatctatacttggaatctgaaaacagaggacatctgtgacataatatccactgatgaagtctggagaatagacaatgtaccagagcatctctatgccctgtatgtgggtagcagaataaattttaatgttcagtatgtaggcaaatgggccaagggcacctcttccgagtttcagtatgcttcggatgaggattacacccagctggggcatagacttcatcagggaagattaaaggacttatagaggctctgcagctgttattgagggacaacaaaacacctaccttcagccattgaagctgattgctcaaagaggaaaggacagattcttgcagatgtagcttaagcaggtgaagactagggagcagaagcccctaccagagctttgaacctaggagcataaatatcctagtcctcatagtcctcaatgagaagttttatagcttgaaccatagacctttttactaattttaacaataatttatcaaggtgaaattcatataccgcaaaattaaacatgaacaattcagtggcatttaaagtatggtatctagttccaaaaccatcatttccatcactggaaattaaaaccattacccatcaatcagtttctctccattccttcctgcactcagcccctggaaaccaccaatctgtgttctgtctctatggattcatcagttctggatatttcatatacatgaaatcataaaatgtgtaactttttgtgtcatgcttttttcacttaaccaattttggaggttcattcatgttacagtttgtaccatatatatcagtacttcattacatttcatggctgaataatattccattgtataggtatatcgaaattagatgatcaattcttccattggtggacatttgggctgttctaccttctgagtattgtgaaaaatgctgctatgaaaatgggtgtacatgtacttgtgttagtacctgttttcaattattttgtggatatacactagagagaaattgaggaatcatgtcatcataactctatgtttaactttttgaagaaccacaaaactcttttccacagtggctgaattattttgcatttctactagatctttcttattaagcagctatttctaaagaccttgagaatattatgtttaatttatttttctattcagaactgatgcatactaattgcacatatttatggagtacaatgtgatgttttaatgcaggtatacatattataatgatcaaattactatatccatcacactgaaaaccaaatagataaagttgatgatcataattatctcaaatatgactcatagaatatggacgtaagttgaacatttttaacactgacacaagtatctgtcaatctgtatctcttcatctgtcatctattaatttgtcatctatgtatctatcactcatcatccatttattgatctgtctacaagcactatttattagaggtgaaataataagaaatttgctttactacataaaacaaaataaacattaataaaaacctgtatcacaacataatactactgagaaaattcctagaacttgactaaaaggtatattaagaggctgataaatttttgtcaaatcctctgacgacaactggtagaaaatgctctttgaatctgaaaacaatcattgattcttgaaaaaccccaatttcatagaaacactccatataatttttctaagcattttaagaaatttagatttatgctgcatctataaaaatatctttgtttagttcagacaggagattttttaaaagtaccaaccagtagttacttaaaaaataattttagtaaactactttatattcatagtctcacttacactgtgaaacttcaatgaaacagtgacgagcatattttttgtagagtatacacaagctgataacaaaatttctttcttccttactcataatcttatgtcctgttcattttttcctttaacttaggtggcagtaaaaaatgttttccaaatatggctatttactgaaataatagggtaattagtttgattaaactgatgaccaactcaggcaaacaaattctgtcaacacaatctgtttattaacttagggaatattcataaattaatgcaaattgtgtccaaatgcaataatttatgtagatagatccctggccaaccatggaaagctaaacaacttttcggaatatgcttagaaaccaattaaaagataaatttgacaaagaggaaagaaagtcaatcatggataagaatccgattcgtgtacattaatttcttttacgaaagatgtgcaacttgatttgaatctgaaaacatgactgacaaggaaaacagatgtgggaagcaaaataatagcccaccaaagttgtccaatcctaatcctcccacctgaatcctgctaaatgttatgtcgtggcaaagagactttgctgacgtgattagggtaatgaccttaactaacctggagtatctggtggacccaatctgatcactatgagtcctttagaagtggaagatggggcaggagaagacagtcatattgatgccaggtgagatgaacttgactcatcattgctgaccttaaagggggatgtaggtcaaggaatatgggaagcttctagaacctggaaaaggcaaggacacagagtgtcccctggaaactccagaaggaagtggaacgttgctgacaccttagttttagcccagtgaaacctatgtcaaactcctgatctagagacttgtagaataataaggcactaactttgtagtaacttgttccagtagcaacagaaaactaatacttcaaataaaacagcagtgagtcaagagtgcaaattctaagttatgccttctttgtggcattatattcattatgtaactactttatttccattataacactctaataaaagtaacagcattcgcacatccaaggtttacccctgtaaaaaaattaacaaaataaacaaactagggaaacctattaatgtaaataaagaaaataaaaacaatcataaatataatacattgcgcaaaattgctttcatgattaatttgctaaagttgaaaacatcaatgaaatggatgattttctaaataaatatgtgattttatatactacacagagaagtcagtgaatcaataactgacaataacattgagaaacttataaaaatgtttattaatttttacggaattattttattttctcacagaaatgaattaattggcattttataaactgttcaggtcataagagataagaagctacataaatcataatatgaaaaaatagatatgaatcctataaataattagcatggaaatagaagcatgagttaacaatgatcagtatactaattttcaaaaagaagtataaagacaatcaatataagcagactacttaaacaatttataatataagtaagttaaataaatacatttcattctcatacagtgtgaccaacttgattggatatgctagaacacaaattggtattcaaaaatgttataaggaaaattaacaaaagatgttttattttcaaagtaaatacactttaaacaaaatacattataatgaatgatggaatatcaatatgtattaaaattatcaacttgaggaagatgtctgttattatcactatttgtaagattccttttgaaagttatgtttcatgaatttagaataaaacagaaataagagagctacagtggaagaagactaaaaggccattattttatacaatgtgtatatgcactaaaataccaaggaaataaattgaaaaactttggacacaaagaataattcagtacaatgcctgataataggaggtctataaataggttttctgaggcagaaaatagattgctaatattgccaaacagaaaaacactcagaagtcttatctataggaaaagggatgtatctttcttacaatacaacagaaaaaaattatatagaaagcaatatcatgatgtttttttttcttcacatacaggatttttgtttgtcactattaaacatctgaattttaaacagattcttggactggcagttcatatccataagcttttcaagaactactaccttcaagttttcccagttcaaactttgaattttctagtgaagacatcattgagagtataaataaattggcaaatctttttatgaccttttaatgagtttttcaaagctgcgtgggatccatttattaactgcttctttcaggaaa

SEQ ID NO: 476485 - DNA, 580 bp, Homo sapiens
aggacatctgcctaagagaatcttggtggagataattttaactcaattatggttattcttcattctccgttttacttcattgctttcaaaatgaggaatttcggttgtgtttacgtttttcagtttatgggtcatactttatttctttggctatctcataaattttgttggaaagtggacattttagatgatatagcaactttcttgggtgctctgaaggataaatgctacattttcttcaatatgtatcttgaaataggctccatgatcaattctcaacatcatgaaaagattgtttcaaacacctacactacagaaaaattcatcttttataaattgaaaatggaaacatttccatggcaaaagaaccttgaactgaaggtatctaatttggaatttgcttatagaatctggctgtcacaggagtataaaagattagctcctacaagccacaagtttctcgttatgattgcaacaaattgactgcagactgactgcagacatgctagacttcagattttatgatctttaacacaatatttactttttacaaaatatattgtgggcactgtattagctc

SEQ ID NO: 476486 - DNA, 634 bp, Homo sapiens
tataatgcttcagttaggcaagatgaataagctccacagatctgctgtacaatgttgcgtgtacagtcaacaagacactgatatagctgtcatagatagtgattacattgatgaatctgggcaaagtaaattgaaaaccttctggaaaggattcactattctcaatgctgttaagaacactcatggttcaggggaagatgtcaaaatatcaacatcaacaggaatttggaagaaatggattccatacctgaaggatgactttgaggggcttaacacttcagtggaggaagtaattgcagatgtggtagaaatagcaaaggaaccagaattagaaacggagcctgaagactcatcatctcagtcattgactttctatgcggcaaacggcaggacctataccaaaccccaggaccctgaagtgcaaaagtagtgattctggcaattcaaatatgtcaaaaagaagccatcaagtacttcatttaaatgaaaaggtaaaagttctcaataaggaaaaaaatcatatgctgatgttgctaaaattagcagtaagaacaaatcttctatccatgaaattttacacaggatactgttttagtcattctatagcattactagttattgcttctaatatcct

SEQ ID NO: 476487 - DNA, 628 bp, Homo sapiens
atcttggataatgacagtggattatcataagctcaaccaagtggtgactccaattgcagctgctgtaccagacgtggtttccttgcttgagcaaattaatacatctcctggtacctggtatgcagccattgacttggcaaatgcctttttctccattcctgtccataaggcccagcagaagccatttgccttctgctgccaaggccagcaatatacctttactgtcctacctcagggatatatcaactctccaggtgaatcagagcagaggcctctaggattttggagcaaggacctgccatcttctgcagataactactctccttttgagagacagctcttggcctgttactggactttggtgaaaacggaaagtttgactatgggtcatcagatgacagaggaagagaaaaatagggcctgattcacagatggttctgcaagatatgcaggtaccacccgaaagtggagagctgaggcactacagcccctttctaggacatccctgaaggacagcagtgaagggaaatcttcccagtgggcagaactttgagcagtgcacctggttgtgtactttgcatgtaaggagaaatggtcagatgtgtgattatatactgtttcatgggcc

SEQ ID NO: 476488 - DNA, 552 bp, Homo sapiens
tgattgtgaggtctccccagctatgtggaactgtcttaacaaggaggattttcaagagggtggagacaaatgcttccattctgtaggctctgcaatgtggtgttcctcaaatgacagcaagcaagccagcatttcttgccaaattggaatgacacttagagttgggcagactagaattgcagtgcacagatacaagaatgttgcctgctttggagccaagactgccttccggataaagggcccacagagagctgagagctgtgtaatacctcaaagactgaagaaaagagttagacagccatctttccttagaggattttgctgcagacagcttgaactaccagaaggttatatactgaccatgggtagagtaaggaagaaatacatccttcggaaaggacaatgaagatctttacagcagggtgagtaaacaggccagtataagttacagaccacagtgtatagcacattgcaagacctcaagaaattaacatgatacagtatgtgaataatgcaaagaaaaccaacaaatcaaaatattccttttgaaat

SEQ ID NO: 476489 - DNA, 667 bp, Homo sapiens
cctgaaaagattgtagggctgtgttagagcatccaaagaagagtccccatccccatgactgagctccaaaacttgctggaaagagcatggcttggcacctaaatggccaagaaatcaccgtagtatcacactggaaagacttgctggaaatcaccctttggaccctaccacatcttccttctgtggtgccaagaagagttgttcttaaggaattaccttgctggaggcattctgctgcaaaaccactcaaagaagttgcaggggaaagctgtttgccattgggtgctgctgtccactgtgtactgaattctaccaacaaccacctgggtttagaagagggccctgaaagctcaagaatggaacattgcccagccaacagcaagactgtagccttgtggaacccagaaaaaatagctaggctaagctggactcaaactactgagacaatatatttcttgtctccaagagacaataaatatatcagtttaagctgttgtttgttgtaatttattatacaacattgatcttcaatcgctgatagcttttcctctgcttgatcgattcggctattgaaacttgtgtatgcttcacgaagttcttgtgctgtgtttttcagctccattccatttatgttcttctctacactggttattctagttagcaattc

SEQ ID NO: 476490 - DNA, 2442 bp, Homo sapiens
tgcttttttttttacaagtatgcaataattataccatagaattctgctgacactgaaacagaattccaaaatgatctcctttgactcgctgtctcatatccaggtcacactgaagcaagaggtgggctctcatgaccttgggaagctccacccctgtggctttgcagtgtactgcccccatggactggtgatgagtgtctgcagcttttccagtgtactacccccacggactggtgatgagtgtgcacggagcaagctgtcagtgaatctatcattctggagtctggaggacagtgaccctcttttcacagcttcactaggtagtgccccagtggggactctgtatgggtgctctgaccccacattttccttccacactaccctagcagaggttctccatgacggcttcacccctgtggaaaacttcttcctggacatccaggcatttccatacatccctggaaacctagacagaggttcccaaaccacaattgttgacttctgtgcacccacaggctcaacaccacatggatgccaccaagtcttggcgtctgtgccatctgaagccatggactgaggtgtactttggccccttttagccagactggagcagctggaacgcagggcactaagtccctaggctgcacacagcaggaaaaaatctgaaatctgctgaaagctttgaatgtgatctgttttttatcttttgctattgttagtattttctttgtctaaattttcacaatttgattataatgtgtcttagtgaacttctcttttggttgaattttactgccagtttctgagcttctatatctgaatgttatcatctttacctagatctggagatttttcagccattattttcttaaatatgccttctaggcctttatatctctcttctccttctgaaactcctattatatggtggatagtttttgcttgatggtgtcccataatttatgtaggtcttatttattctttttcattcttttttctttttatttctctgattggataatttcaaatgtcctgtctttgagatcattactctttcttctgctggatcaagtctgctatttaaactacctattggatttttctcagttgttatattctttatctctaggatttttattttttaatttttacatttctttgttaaacttctaattttgttgatgcattgctttccaaattttatttatgtttctatttaaattttcttagagctttctgaatttctttataggttgattatttggaattattttttggtcattttatagatctccatttcttccaggtctattactggagcttgtccatgaaatcagttgtaatgatccttctttcgtttgtgaaatggtaattcatgtcttttccctacatttttgtgtgttgatatttatgtcccccaaagctctggctttgtggcgatcagggctaggaaaggactggttacccctgacgtagaagtttcatggaggctgttgtgcttccaaataaacaagcccagccacagctttcccaggctcacctggggaagatgattccactgcattagatcttgggggtggaggaccctttacagtatggcgaagatgagcagacatacctttgccttaagtacatctgcttgaataatgctctaacaacacttaagctgatttatctcctagcatctctgaataatttgctaagctgttcctggttactgccaagaacagttttcctcatctatgaattgtagtgcacaatcccccatgtagcctcttgatgttgcctgaatataccaaaggaagtttgtaacatatgctgaaagttcaataagtgacatccatgtttcctggttggaatgtaacagtttttcaaaatgcattaaatgaaaaaatgaaacaccagaactaaagtgggaagaggtcattgtcagccaggggaattaaataaataggtcaaacctgcagttcctgcaataccagcttgcattttactgtttcatgatgatttctctaactaaatgcttctccagcaagtttcctctatacttacatactatcagcactagtctgattttcacttatgtttatgtttgcttagaagtatacattagttatgctctagaatatcaatttgatagcaggagcttcatcatatttaatttcccttgagctttatagatgctaaataaatattgtgaaaaagttacaacatatacttgaatattacaaaatgttttacattacttaaaatcgctttcataaaagggggagaggaaccttcagcacaatattgaataaaagtagtgagagtatgtctccatgtttggttctaatttttaactgaatgtttctaatcaatcataaagtatgctgcttactctggatacttttagtagatatactgtattatgataagaaagttctcatgtattcttaattt

SEQ ID NO: 476491 - DNA, 572 bp, Homo sapiens
ggagcccacctcttacatcagcattggcttggcacggcggctgcgctgagctccagcccagctttcggaaaacagaagcaatgctgttcaaaggattaatcagtggcccatacacaggaggcctggggccactcatgtacaaagccctaaaagttggtacagaaaacctgtgccttccatccttgctgtcttgcaattccgtgaaggcggcggatgatcgtttggagataaaatggtctaaagtaatggcagaggtatttaaaagcttaacagatggtaatatctgtggctacccaatgggcatccctgggttggatgagggcctgggagtctggaaagttgggagatcagcaaaagctatgaacctcagtagagcatctgcacatgaggtcattctgggggtgttcaatgagtgcttggctaaaacaaaaatgggatttcaaaatgttcaaaaagaagattgctcatatggttatatactctaggatagaaaaaaacattagcaggaaataaaaatgacattttctcactttcaattatgaataaggccaagatgtaaaaaatgggaagga

SEQ ID NO: 476492 - DNA, 572 bp, Homo sapiens
ctcccccttcgtctttagccatgattataagctccttgaggtcctcactggaagcaaatgctggcatcacacttcttgtactgtctgcagaactggaagaggctgagagagagactgcagtgattgctattgctcttctgggcctagccacccagtggggctaccaggctctggtgctgaggagtatctgcaaagagtcctgtgatgtgattcgtcttcaggtcttccagccatggataccagcacctactctggtggaggtggcaggggagtgtaatacaatgtacaccaaagcaacccttggtgtcatagatcagacagaaattgtgtcccttgtcaatgctgatgacatccataaatctagcagggaaaatgatgagggggagacactctctaagcttgtgaggactggtggattgatgaagagcaaacacactggtcaatgtatccagcatctagtactttggagctgccacccatttcagatgcttcttgggaccaggagccatggctgcgctcggcacggaaacagccaaacattaactcaaaatggataaaagatttaaatgtaa

SEQ ID NO: 476493 - DNA, 1064 bp, Homo sapiens
tgccttgcttccccttcgctttctgccattattcagaaggagtctctcaccatatccagcatagttgggaatgtgctggatctcccctgaagccagcacatctgagagttccacccaagaccaaagacatagttcctgggtgttactgctggttattcaaagcccaagggctcttcagttagcagatgatgagtgcttccaggactgggttcttctcttcaaggcaacaggtttccttctggcccaggcagatgctgaatccgtcaccaagccctgtaccacaaaggaaatcttctctttatccctcactatgtcctgtttttctggtgaaaacctagaaataagacatctctgtaacataaaagtacaagatgaaacagtaagtgctgatatagaagctaaagtacaagatgaaacagtaagtgctgatatagaagctaaaatacaagatgaaacagtaagtgctgacatagaagctaaagcaaattatcctgaaaatctagccaagataagtgatgaagtttgttacactaaacaacacattttcaatgtagatgaaatagattcacattggaagaagatgccatctgggactttcatagctagagaggagaagataatgcctgactttaaggacagactgactcttctgttgaggctaatacagctggtgattttaaattgaatccaagcctcatttacagttgtcttttcactctatggactgtttcctttgctgtgcagaaacttcttagtttgatgtagtctcatttatctatatttgcttttgttgtctgtgctgatggtgttgaataagacattaaatgtccaatgtccaatataagaccaatgtcctgttttcgtcagaagctttaaatgattatttcaaaataatttttaccagttatgtttgttttctgtagagaggtttccagagcttctgataccttcattccagaagctttctggaatacctttaaaaataataaaagataacaaaatctatattgtaaaataattgctgaaaaattgccaaatttgaagagaaatttggacatccataa

SEQ ID NO: 476494 - DNA, 3028 bp, Homo sapiens
tgcaacaaaccaccatggcacacgtatacgtatgtaacaaacctacatatcaatgccagctgcaggcattgcagttttggtgcatctcattgatttgctgatcgtatttctcagatgtgatggtttcaccaggattcagaaagctgtagtggatcagactggcagtagaccatcaaagagtgaccatggcctttttgtgatgcaagtttggctttgggaagtgctttggagcttcttctcagtcgaaccattgagctgggaagtgggctcccctgtggcccagggcaggtccagaaatgccatccaagattcatgtcctggaattgcaaaccccaagagcccacttggtgctctattcacctgccatcaacatagtacttgggtattgctgctggttattcagggcctaagggctcttcagttagcaagtgatgaatcctaccaggactgggttcttttcttccataaagcagattcccttctggtgcaggtcatgtctaaaaatgttgtttggaagcaacggctcggaaagaagacctcatgactgactggtgccctatcctgttgtggctgagctgatatgcaagatgcaagatgcagtgctccccactcttccttctcctctccacaagtggaaggaaggggttgtttttggagccacaagctgtgtagcttggggttatgggagagtctggtgttaaaatgtaaaaacagccgtctatttgtacaagcacacagtcataagtaatgtgagtctgtaacatagaataacaaattatttaaatttaacatatgaatatttgagatattttatgtttttatactttctaacgattttagagatttaagtagccaaattaggcaaataaaagttactctgcagggtggttgtgaagctggaggtttcctcaacctgcagaaaatactgagtatagtgactgacaaacggtaaataatatttatgaatgatcataactgaacttctggccataatgagattcattagctgaagaaaggtgctttcaatgggaaaggatatatttttatattttctaaaatctttacctattttctaatttctccttaagtgtaaggatgacagcttctatatactgagcaacgaccatgtctaacattttgttgttattgctttacattcatgatgttgtggcagatttcttataatacaattccccacaccagagaatctagatacttaacaaaaaaaagcaacatgtataattgagaaacaattggtcattaattcttaggcttggttttaggggaaacagagttaatgcactttaataagtcttcctgtggtacatatgtgttgtaagagagctctagagacttaaagcctacaggaggtgtctagtgtgaattaaactacatttgttaacatcatttttctgacttatttataatgattaaatatactcgattattttgcccataacccaagaattaattgacctgggcatttaaaaaatatatatatatatatttgtttcaattaaacaaaacagataagttaaattgtttttatgtcctgtgaacactccacctttgttcattatagtaaatgggggaagtacaagtcatttgattgctctttaacctttcattatatcgacaatctgttattgtctagcatcaattccatccttctcagaaggtggcttggcatttttgtggtattttcaatctagggaaataaatctgcatctccatctggattgaccagatgaggctcccttcagagccaattaacactttaccaatggggtcacctcagcatggtaggaggtgctttgcacctccagggcgaccataaactgtctccacaatgcctccagatgctccaggtctggaaaccaatcaatcttttacataagtgtgttggaattcttccctaactacttttttattattattgttatacttggaggaatgtttgcatttaaattcaggtttataggtgaagaataaatcatgtcagttgagaagtttataattattttgtagattagaaaggccccaatacatagacctctgctctaaccttctagttcttgttttgttttaataagttattttctaataattatattagtgccatgaattatatgtgaaaaaggaagtcatttgattaccaaaactttatacacctcattctataaggtagaacaatgtttccaacttttctggacttgccttctgtggatatgttctctcttcttgtatggtgtttatgagaagagaaatatttccatggaagtttcagcaactgaatatggctcctactgcatacttttcctgaaagtctgtgattactttttagtattcaaaagttattttgttttgaagtagccatcacaatgcaatcttcagcacattgtggtaacacaagtgtttctgttgcttttttcagctcttatgggaactgccatgtcccacagaatcaacacatgtgcgttctgagaatgttatatcactgattacaaaaattgccagtactcctaggaaatttactgtctttgttttcagaaattttcctgatttttttgttatgaggtttttttaaaaatgaggctggtttgggctgagtttcgtttaaggctttggataccaatgatataatgtggggaggagcttcctttttgttgttatatattacactactaaagttatcctgtttatagaaaatctgtattttgtttggtgtatgttgagagaacagcaggaaaaagtgttcccaaaatgaatggattttggcaggcacatgacctgaatatcattactagagaaggaaaaacttactctgatattacactgctttttatgagagtactgttcttcctagtcatctttttgtatgtgtcaaagtagccttgtctgagacattgaatggaaactttgggtcataaaaagcagaaattcctttctccacttgttagatatgtttatgaagtaaaattatttggtgggctgctagttttcattacatgtaacatataacttactc

SEQ ID NO: 476495 - DNA, 2676 bp, Homo sapiens
tgcaacaaaccaccatggcacacgtatacgtatgtaacaaacctacatgttctgcatcaatgccagctgcaggcattgcagttttggtgcatctcattgatttgctgatcgtatttctcagatgtgatggtttcaccaggattcagaaagctgtagtggatcagactggcagtagaccatcaaagagtgaccatggcctttttgtgatgcaagtttggctttgggaagtgctttggagcttcttctcaggaagtgggctcccctgtggcccagggcaggtccagaaatgccatccaagattcatgtcctggaattgcaaaccccaagagcccacttggtgctctattcacctgtggttgtgctggtacctgaggagggcattggctgagtttggtctggttttgttttctgctataacaggggagttcaatgccttaaaattgctgtgttctccgtctccccagtgcacaaaaacactctgcaccaagccactgatgctgagagggatggagaagaagtggtggcggagactcaagactgtttttcctacttcttcagtgcctctttcagcaatatgaagttaaaaccaagtgcttgaaatagtcaaggtaaggaaaatttccttgccagccttccttgagcatactgaagcagcagtaacagaaatgattgtaccagccctttcactgtgtaaattcaagctgtagttcagagaacatcaaaggggtcaaagggatagtaggggtttttgtgtcccaacttgtccctattctttttgtggtagctgatcccatctgtctccaagagctgattgtagcttatgctttgtgagtattgttcacaagtcacctaagtaaagattaaacttgtggctcctttcccatgtgttcagtctggtgttaaaatgtaaaaacagccgtctatttgtacaagcacacagtcataagtaatgtgagtctgtaacatagaataacaaattatttaaatttaacatatgaatatttgagatattttatgtttttatactttctaacgattttagagatttaagtagccaaattaggcaaataaaagttactctgcagggtggttgtgaagctggaggtttcctcaacctgcagaaaatactgagtatagtgactgacaaacggtaaataatatttatgaatgatcataactgaacttctggccataatgagattcattagctgaagaaaggtgctttcaatgggaaaggatatatttttatattttctaaaatctttacctattttctaatttctccttaagtgtaaggatgacagcttctatatactgagcaacgaccatgtctaacattttgttgttattgctttacattcatgatgttgtggcagatttcttataatacaattccccacaccagagaatctagatacttaacaaaaaaaagcaacatgtataattgagaaacaattggtcattaattcttaggcttggttttaggggaaacagagttaatgcactttaataagtcttcctgtggtacatatgtgttgtaagagagctctagagacttaaagcctacaggaggtgtctagtgtgaattaaactacatttgttaacatcatttttctgacttatttataatgattaaatatactcgattattttgcccataacccaagaattaattgacctgggcatttaaaaaatatatatatatatatttgtttcaattaaacaaaacagataagttaaattgtttttatgtcctgtgaacactccacctttgttcattatagtaaatgggggaagtacaagtcatttgattgctctttaacctttcattatatcgacaatctgttattgtctagcatcaattccatccttctcagaaggtggcttggcatttttgtggtattttcaatctagggaaataaatctgcatctccatctggattgaccagatgaggctcccttcagagccaattaacactttaccaatggggtcacctcagcatggtaggaggtgctttgcacctccagggcgaccataaactgtctccacaatgcctccagatgctccaggtctggaaaccaatcaatcttttacataagtgtgttggaattcttccctaactacttttttattattattgttatacttggaggaatgtttgcatttaaattcaggtttataggtgaagaataaatcatgtcagttgagaagtttataattattttgtagaattgaaaaggactctttgttaacatgaaagctatttcattttgtcaagccaagaagaaacaaaagatattcaatctcttcttagtttaatacatatttttgagagctgtttcaaatggaggagggaagagaagcatgtatattttttgtttttacaattatgtctgtaagccatctagcattaattttgtgtatggcattaggtgtgaatcaagtttctatttattctttatctagttttcaatatctagtggtctaccaccactcatttaaaatatttttcttttcctatggaattatatcagagactttgttaagaaaaacatttgtttgcatatgtatgcttctttttcaattctattctgttcccttgatctatttatttattatctatctttatgccatgttgtatggatcactataactttatagtaagtattgaaatc

SEQ ID NO: 476496 - DNA, 654 bp, Homo sapiens
taccatactaactgaagattttaaaaatagaggaaccaggtttatcatgaactctctggatggcctgatagtggtgtcactagggggagacaagtttcagggaaaagaaacatctggatttaaagccatgcagatgtttcagctctgtgctgtaattattcccattatgcccccaactttcagtaaagtgcccatgccagggagaatcagaccagaaaggaaacagcagctttgtcaagaagagatgagaagcagtgaacaggcaattgagttgagagcagaaattttaatgggcaagggcaccgggatttatgcagcaccaggaatggggctcgggtcacttttcttggatattgaaccgttacaccagaaggctggagaattggaggctaccttggttgtaatcggcttagggctgtttctaggtgtagaatcagcaagaggtcttatttatggtacagctgtctgtgtaaaacctgacacccaaggacactttaaagctctctatgtgattatctgacatcaaagcattgtaaccccataggaacactgaaagttgaggaattgcattgaaaaattagaatccgtatgcagcaatacgaaggtttttactttattagaagtaaattgactagtgaggaattcagaatcgtc

SEQ ID NO: 476497 - DNA, 1026 bp, Homo sapiens
taatgctctcattttctttagctatgaggtgcccacctggcagcagctacagcccctgcagcagcccctgcccagacacctgcagcagcataaacaacccgagggactgccccaaagcactgccctgtgctgagagctgtgaatgtcagaaaggccacatcttgagtggaacctcctgcgtgccccttggccagtgtggctgcactgacccagagggctcctaccactcggtcggggagcgctggtacacagagaacacctgcaccaggctctgcacctgctccgtccacaacaacatcacctgcttccagagcacctgcaaacccaaccagatatgctgggccctggatgggctgctctgtgtgggagtgtgtcagctcccaggggagtcccactacgtgagctttgatggtagtaaccattctatcccggacgcctgcactcttgtcctggtgaaagtgtgccaccccgccatggccttgcccttcttcaagatcagtgccaagcatgagaaggaggaaggtggaactgaggctttccgccttcatgaggtctacattgacatctacgatgcccaggtcaccctgcagaagggccaccgtgtgctaatcaacagcaaacaggtcaccctccccgccatctcccagatccctggggtcagtgtcaagtccagcagcatctacagcattgttaacatcaagatcggggtgcaagtcaagtttgacgggaatcatctcttagagattgaaatccccacaacctactatggaaaggtgaggaaaacatctggctcttctcgctggggaggcagccccagggagattgcaccgaaaaaccactctcccccgccaggtctgcggcatgtgtgggaacttcagtgatgaggaagaggacgaactaatgatgcccagcgatgaagtagcaaatagtgacagtgaatttgtgaacagttggaaagataaggacattgacccaaggtagtggtcccctaagaccctctaggttttctttctttttctttctttg

SEQ ID NO: 476498 - DNA, 2044 bp, Homo sapiens
cgccctggaggatgttccagccactgagtggagacagacacgctgcggctgcaggctcttctggaagaggcagtcgtggtctgctcctgtgtggatccggcctcccctactggactttggggctggtgtctcgggtgacagccaagaatgaggagcagggacaggaaggcgtgtcctgcctgagcaaagtctacgtgaccctgcccgagagcaccgtcaccctgcttaagggcagacgcactctggttgggggtcagcaagttactctcccagccataccctctaaaggcgtcttcctgggtgcaagcgggcggtttgtggagctgcagacggagttcggtttgcgggtgagatgggatggtgaccagcagctgtatgttactgtgtccagcacatactctggcaaactctgtggtttgtgtgggaactatgacggcaacagtgacaatgaccacctgaagttggacggcagcccagcaggagacaaggaggagctggggaacagctggcagacggaccaggacgaggaccaggagtgtcagaagtaccaggtggtgaattccccgtcttgtgattcatctctgcagagcagcatgtcggggccagggttctgtggacggctggtcgacactcatggcccatttgagacatgcctgctgcacgtgaaggccgcttccttcttcgacagctgcatgcttgatatgtgcggattccaggggctgcagcacctgctgtgcacacacatgtccaccatgaccaccacctgccaggacgcaggccacgctgtgaagccctggagggaaccccacttctgcccaatggcctgcccgcccaacagcaagtactccctgtgtgcgaagccatgccctgacacctgccattcaggattctccggcatgttctgctcagaccggtgcgtggaggcctgtgaatgcaatccgggcttcgtcctcagtggcctcgagtgcatacctcgctcccagtgtgggtgcctccaccctgcaggcagctacttcaaggtaggggagcggtggtacaagccaggctgcaaagagttgtgcgtctgtgaaagcaacaacagaattcgctgccagccctggaggtgtagggcccaggagttctgtggccaacaggatggtatctatggctgccatgcccaaggtgccgccacctgcacagcctcgggtgacccccactacctgaccttcgatggcgccttgcaccacttcatgggcacctgcacctatgtcctgacccggccttgctggtccaggtcccaagacagctattttgttgtgagcgccaccaacgagaaccgcggggggatcctggaggtctcctacatcaaagccgtccacgtgacagtctttgacctcagcatctcactgctcagaggctgtaaggtcatgctgaatggccatcgggtggccctacctgtgtggcttgcacaaggccgggtgaccataaggctcagcagcaacctcgtcctcctctacacgaactttgggctccaagttcgctacgacgggagccacttggtggaagtgacagtcccctcctcctatggcggccagctctgtgggctgtgtgggaactacaacaacaacagcttggatgacaacctgcgccccgacagaaagcttgcaggcgattccatgcagctgggggccgcctggaagttacctgaatcctctgaacctggctgtttccttgtgggtggcaagccctccagctgccaggagaacagcatggcagacgcctggaacaagaactgtgcgatcttaataaaccctcagggtaagacatgtccctgctggccctttttcctccctgaaggacaggaggctggggagggagtctagtcagggagggagaaacaacaagaccagaaacagatggaaaagcatgaggaaggcaaatgggaacacagggccagccagcagtcaccttcttgggacctatgactgatgggtctgtatttgtgtctcaggcagtagataaatccgggatttctttttttttttcctattaaaaatgttttaat

SEQ ID NO: 476499 - DNA, 1295 bp, Homo sapiens
ctgcataccaagagccaggggccatgttgaactgtgccggcacagctgttgtggatgagtttgtggcaaacaaccattatcagccacaactcatctcagaactggctcagatctggaaagcagcagcaggattgcaatttcccattgtaacagccggccagtacacaacaggccggggctcctcaggagtggggcttacggcagctgtgctgagagactccgtgagtggagaactgaccttagagggtggggccctggtgctggctgaccagggtgtgtgctgcattgatgagttcgacaagatggctgaggccgaccgcacagccatccacgaggtcatggagcagcagaccatctccattgccaaggccggcattctcaccacactcaatgcccgctgctccatcctggctgccgccaaccctgcctacgggcgctacaaccctcgccgcagcctggagcagaacatacagctacctgctgcactgctctcccggtttgacctcctctggctgattcaggaccggcccgaccgagacaatgacctacggttggcccagcacatcacctatgtgcaccagcacagccggcagcccccctcccagtttgaacctctggacatgaagctcatgaggcgttacatagccatgtgccgcgagaagcagcccatggtgccagagtctctggctgactacatcacagcagcatacgtggagatgaggcgagaggcttgggctagtaaggatgccacctatacttctgcccggaccctgctggctatcctgcgcctttccactgctctggacagctgaactccgggactggccagtgttgagaggcggagacttgggcaattgctggacgctgccctgggcattgcacttgtctcggtctgacagtgccggcccaacactgcggatgctggggggaggggggattccactcctgttttgcacgtctgagaatggtggatgtggtggagaaagaagatgtgaatgaagccatcaggctaatggagatgtcaaaggactctcttctaggagacaaggggcagacagctaggcggctctggatgaatatgaggagctcaatgtctggcaggtcaatgcttcccggacacggatcacttttgtctgattccagcctgcttgcaaccctggggtcctcttgttccctgctggcctgccccttgggaaggggcagtgatgcctttgaggggaaggaggagcccctctttctcccatgctgcacttactccttttgctaataaaagtgtttgtagattgtcatcttct

SEQ ID NO: 476500 - DNA, 962 bp, Homo sapiens
acattgccagtgccccacagatcctcgggcatctcaagaaggcctggtggagggagtggaatgatcccagcgcaggcctcgcctccctggcccgtttgccagtacacaacaggccggggctcctcaggagtggggcttacggcagctgtgctgagagactccgtgagtggagaactgaccttagagggtggggccctggtgctggctgaccagggtgtgtgctgcattgatgagttcgacaagatggctgaggccgaccgcacagccatccacgaggtcatggagcagcagaccatctccattgccaaggccggcattctcaccacactcaatgcccgctgctccatcctggctgccgccaaccctgcctacgggcgctacaaccctcgccgcagcctggagcagaacatacagctacctgctgcactgctctcccggtttgacctcctctggctgattcaggaccggcccgaccgagacaatgacctacggttggcccagcacatcacctatgtgcaccagcacagccggcagcccccctcccagtttgaacctctggacatgaagctcatgaggcgttacatagccatgtgccgcgagaagcagcccatggtgccagagtctctggctgactacatcacagcagcatacgtggagatgaggcgagaggcttgggctagtaaggatgccacctatacttctgcccggaccctgctggctatcctgcgcctttccactgctctggcacgtctgagaatggtggatgtggtggagaaagaagatgtgaatgaagccatcaggctaatggagatgtcaaaggactctcttctaggagacaaggggcagacagctaggtgagtggtttagtgaaggacaaagctgtgtcactttgtcttctgtggccatgtgtctgaggttggcctcaattctaacactggccaccattgttctctgttgatgtc

SEQ ID NO: 476501 - DNA, 859 bp, Homo sapiens
agggaggagaagagggactccagaatggctgaggagaagaagctgaagcttagcaacactgtgctgccctcggagtccatgaaggtggtggctgaatccatgggcatcgcccagattcaggaggagacctgccagctgctaacggatgaggtcagctaccgcatcaaagagatcgcacaggatgccttgaagttcatgcacatggggaagcggcagaagctcaccaccagtgacattgactacgccttgaagctaaagaatgtcgagccactctatggcttccacgcccaggagttcattcctttccgcttcgcctctggtgggggccgggagctttacttctatgaggagaaggaggttgatctgagcgacatcatcaatacccctctgccccgggtgcccctggacgtctgcctcaaagctcattggctgagcatcgagggctgccagccagctatccccgagaacccgcccccagctcccaaagagcaacagaaggctgaagccacagaacccctgaagtcagccaagccaggccaggaggaagacggacccctgaagggcaaaggtcaaggggccaccacagccgacggcaaagggaaagagaagaaggcgccgcccttgctggagggggcccccttgcgactgaagccccggagcatccacgagttgtctgtggagcagcagctctactacaaggagatcaccgaggcctgcgtgggctcctgcgaggccaagagggcgcttgccctggccctgagacgcctcctcctgggggccctatgaattgctccccacatcccacccccacctgactggcttccctcctcccacaggaagccctgcaaagcattgccac

SEQ ID NO: 476502 - DNA, 534 bp, Homo sapiens
aaccagcccagcaggccagagcaaaactcaggcaaagtatgctaaagaattgagtgatggttggcagctcccaggcagcttcaggatgggggctggccatcaaaaacactaaggcaaaattagaagagcacgtgaaaggaaatgaagtgtgtgcagaaaaagaggacattgggatggccaaggttaagaagatgccaggaggagaaaacggaatgctgaaaggaagagtggaagaagtcaagaacaagtgcagttacttgtgtgtgatgttgcttaaacaccacctaagaggtggggaaaacataggacagttcctggaactcaaaactagcttgagagatggcagctcagttagagcaactgtcgagaagaacccagaaaacttgagaggtcaagttagatcagggaaacgccctccttattcatcttctgccattgtatttaatatcccctgtaaatcggccattttctttctaaaatctaattgggcaataacattcttctaaacaagatcttttaatagctccccaaggt

SEQ ID NO: 476503 - DNA, 737 bp, Homo sapiens
tgcttcaaagcaacccacgcatgctgatgttgggcagccatccccaggtcatcgtgtcatcctccacccctcagtacccttctgtggagcagcccaccccccaagccctttatgtcactgctcaccaggcttacccaaactatgccacacagcttcatgcccaccagctgcagccggctatcacacctactgggaaccagcctgcagcccccagtcctgtccagcatcaggcgggggtggctccacacctgggcagtggacagccacagcagaatctgtaccacccaggggccctgacaggcatgctgccctctctgccaccgggaccttctgcccagtcccctcagagcggtttcccccagccagccactgtgtatgccatccaccacaagcagctgccccacggcttcaccaacatggcccatgttccccaggcccatgtccaaactggaatcacagcagccccactcgccccaggtgatgctgctgcacccaccccagatgtcatccatattgtcaaaaaatgacaggatttccctgttctcgtcttcatttttaattacaaaaagcgcatactttacttacaatgaatataaacaataaagaaaataattatgccgaggccatttctgcatctgtaggagtcatgatttccctttgcctgtatgtcttttcttcttggtacactcgaaattatttttaaggattagctgtcggccagcaaggcatactaaacc

SEQ ID NO: 476504 - DNA, 1038 bp, Homo sapiens
tgccagttccgagagggcagctgcccaactttattcctctctgttctccccatctgcagtgggctccacccagtttgagcttccctgccactttgtttacctactcaagcctcagcaatggcagatacccctcccccagcctcactgccgccttgcagttcaatctcagactgctgtgctagcagtgagcgaggctctgtgggtgtaggaccctccaagtcaggaaagttcctggttggtgcgtttaacaaagctcttgtaagacagaaacgttcccccagtccccactggacccaggaattccagctggcttcacctctcatgagtactgacttatttgtgtcatttttcactgaatcctgggttctccagagaattgcagccttgccagggactcaccagccacagcatactcaaaggtcaagtgctcacccactgtgcaaagtaactcccggtactcccaaaagccagagagatcagggaactcagtgcaaatggcagcagagctttagacttgacaggaccctgtctatgactcttgggggtctgtgaggaagacagaaggccccccaaaatgagtgtgtggtacctttttctgtgtttttcaagaacataggtctcagggtcactagacatcccgtctagatctcttcatttgatatcgaaggaagcaaaagggagagaagagtagaagtaaatgagaaccagtttgggaaggttttaaacttccaaaaacatcaatgaagttttacatttttctcagcaaaaatcatgccaacaagaaaggaagtgaacagagagatgtaacatatacattttaaaaaagggttttaattgactgaaaaaattcccaggggagaaataggatccaaaagagaaaaagcagaaaggttattaaaaatacagcctgaatatcagcttttaattttgactataaagctcttttaaaatttgttttaaatatccaagcagcaagtgttctatcctacaagcagtcagccttttgccagagccgagagtgtgatggctgcagtaggg

SEQ ID NO: 476505 - DNA, 1099 bp, Homo sapiens
cacagacagtgggggatcgttgcactttgcatgcttggagaggacaccagaaaagatacaaatgtctgtaactgttgtaaaaaatgcaaagttctatatagtacaagtaaatcatgctccctactatggacacaagaagggcaagagagtgctagctcctccaggaaaaacaggaaaaactgtgaatgagcatgacctctggacaattattttgtcacaagctccttttcccaggctgaagaaggccttccccagtaccaggttagcctccatgggtccaggctttaggctggcccctgtggatacaggctccaggcctgtccctgtagacccaatgagcaggcccatgcaagtggaccccagtgccaggttggtctcatggacccagggtccacccactccagcagacccaagctgcaggcctgtccaagtgaaccaaggctctgggtcctaccctgcaaacccaagtgccaagcccgcctacctgctgacccagacacccaacttgcccaggcctggccacataccatgccagatggcctgcccagaatctcttcaggcccctcttccacagggcagctgtggtttactgggtgaccactccagacccaatttacttgagttcctcccatacctggagaggggcaccaagctgatgccagctggaacactcttgtatgaggtgtctagcgacccccattgggaggtctcacccagtcaggaggcacaggatcagggaccgtctggctgcccattggctgagcaggctgtgtctagcctgctgctgctagctgcaactcgagcagattgcacagctctctgtttgggacccaaggctctggtggcataggcttacaaggggatcttctgatccatgggatttacagatccatggaaaaagtgtggtttcccagcctttgtgcaccaatgtattttgtttctgcatgtggtctaaatcacataatatagtgttttgaattttgatttaaccaacttattttcttttaaagggttttcaaaaatttcaaaagctttcatgtttacgtattatttccagtgttcttcatgcttaattatacatcaaaattttcctctggaa

SEQ ID NO: 476506 - DNA, 841 bp, Homo sapiens
tggcttgcagtgggcacaggagctggaatgggaatggagtggaaagataatcttcccccggagttccaccacccccggccaaactcttctctaaagtcccgccatcaggtcatttatctgacatccagctgctgcttctcttctttccttctctgccgctcctctctgctctcctgccagtggtgcttggggtttttatgggtacagggtaggaagtggggtaggccagggtggttttggaaaaggcaacattcagaaatagacctggaaaaaatgcagcgagtgatgaattttaatccaatctgccaatacaaatctgggactttccatttttataagaaacgcagcagtgagatgaaaataatccttaaaacatcactgaaaggccctgtaattataacctgctccctggaaattaaaggaaaactaaaagaagtatccagaaaaccccaaacttggctgtacttatcacagacattgtggagctttccagaggctaacaggtgatatcagtgctctaaccgctaaaagaaccaggtgcttgtgtacttttgtgtttaaaaaatttctctgttttaatatggtcagtgtcaataactgtgatccacataagcctttgagatcctctctggatctcacacatgacaattacggatggtttttatgggacacaagctcagtgttccaaagaaataacttacaggtggacttttagaaatgccattcataaacagtggatctgttgtttgcgtacaaaataagatgttaaattaaaactattctcttgccaaatttcagcagaggcccctaaaaccaataagtgccaagaaacctgagattc

SEQ ID NO: 476507 - DNA, 474 bp, Homo sapiens
acatcaaagaccaaacgtagataaatccatgaagatggggagaaaccagtgcaaaaaggctgaaaattccaaaaaccagaatacctcttctactccaaaggatcacaactcctcgccagaaagggaacaaaactggatggagaatgagtttgatgaattgacagaagtaagcttcagaaggtgggtaataacaaactcctctgagctaaaggagcatgttctaacccaatgcaaggaagctaagaaccttgaaaaaagagaaaaaagaatgaaaaggaatcaacaaagcctccaagaaatatgggactatatgaaaagaccaaatctacatttgattggtgtacctgaaagtgacatggagaatggaaccaagttggaaaccactcttcagtatattatccaggagaacttccccaaactagcaagacaggccaacattcaaattcaggaaatacagagaacaccatgaagata

SEQ ID NO: 476508 - DNA, 1412 bp, Homo sapiens
ctgggctgcattcccagacagagatggctagttttgccctaaaacatgcacttccctttatgtaatgtacagttgtttctgggtggcgtctaaccaggtgatgcatttgctggttctcatcttgtatccagacgactggatgcctcctccacgtcttcttctcttgcctgccaactgggagaaaaccgaagaagactccaggatcctgggagatacaggtggaggccacagatggaaaaaaaaccaagtcctggattcactgtatggaaaaaatatgaccacgggaacttcaagtcatgcccagggctgcctcagccaagaaacaaggcaatgctatgactccagggccaatagcaagtctgcagggattggagttttcaacgaaagcttctgtaacggtacattaaaattaaattttgctgaggcatatcctaaatgttccccgctggttgttacagagtgcaatactggcttcaataggcaccatcatagcagaagaaggtgggtcatttacaagccacatttccagtttccagtggattgggcatggaagtttaattgcattcactaagcttgtgctgaatgtggacagcaaattttcagtatacagtgcaatactattaactacagtcttgatgttatatatcggctctccagacttattcattctgtataactgtaactttgtacactttgacttccatctccccatctccccactcccccacccctggtaaccactgttctattctctatttctacatattcaagtgttgtttttgtttgtttgtttgttttggatttcacatatatggcttggatttgtgtccctgaccgaatctcatgtcaagttataatccccaatgttggaggaggggcctggtgggaggtgattggatcacagggagcagatttcccacttgctgttcccgtgatgtttgttaaaaagtcttgtcctacggctctcaccaaggtcactctcggaccatttgagccgtttccccaattccaggcagagtccgaaatttccctttgaaccaatgttgggtcccagtgagcctcttccttgacttcccccatctctccccaggggctgtttttcaccactcgccgtctgtggaagacacagaaggcgaaacatggggctttggggctcaatgttttgacctgtgggaagagggggacagaactgagtctctgtgtgtttctttcccttccacgcctctccttccctcaggacgtcttatttattttcgtgactgcatcgcaaactccctgttattgctgaagttgaaaagagggagctgagagtccagggagaccacagtgactggagttcataaggcagaatactggagaggagagagctgcaagaactctgaagatttgcagagatgccccctcaagcacct

SEQ ID NO: 476509 - DNA, 816 bp, Homo sapiens
accccactctgtttttctgctgtccatatgctgacacttgatcctcctcctggctctctcctgcccagtcctcccagttccatccaatatttagctactttcccagctccacatggtagatttggttctctgaactcagtggagctttttcccatcacagaagcagctctgaaaacaaccagccttcaaactccctgtacctgtttatggccttcatgccggctcaccccaggcatggccctgttcactctgccctcttggccttctaaccagtcacccatgggagaaatcagagacagcaaacagctactgcccggcatgatcagatggcatccagaccagtgcccctcgcagctggtgcaagtccacaattgcttgttactggcccacaaagaaaagagcagaaactgatggcaagcatgtcaaactgtgatggcattgccaccatagccgagtgcagaaacaccagacttgtgttgttgtgcaaggtattgacaatttcaggtggtagttcactatgtacagagaaacctttaggccaaacttaaaatatgtaaggatgcagctttaggctaaacttgacttaatgtctgtaaaccaaaaacaatattctaagcaccccctggctgactgaacagaccccttcttggccaaggggactgcagataaacctgaaaaactgaatccccagccatgatggggaaattggacacaactcattacaccccctccctttggagtttaggtacaactgtccagcattaacattaaaatagagatcataagactgacaaaattgactctttgtggcaataa

SEQ ID NO: 476510 - DNA, 834 bp, Homo sapiens
atgggggtgaattgtgcagaaatgcatgggctgttcaagttgacggggtgggagtgtttctgtttttctctccagctgtgctgccaagagccaggtgtgatgaataaacctggactgtcagcaatgcaggaagaaaaggccttcagttactggggcaatcggataactctgtgcacagaccaaggtaagaaaggccatgggagccggcaaagtatttccttggtggtcaggaccaaggcaagaaaagcttcaggggcagtgaagtattctttggttgggatataccaaggcaagaaaagccaccggggcgcctccactggtgatacctgggaaaacagggtctggagtggacctccagcaaactccagcagacctgcagaagaggggcctgttagaaggaaaactaacaaaacagaaaagaatagtagcaacatcaacaaaaaggacgtctactccgagaccccatctgaaggtcaccaacatcaaaggccaaaggtagataaatccacgaagatggggagaaaccagcgcaaaaaggctgaaaactccaaaaaccagaacgcctcttctcctccaaaggatcacaactccttgtcagcaagggaacaaaactggatggagaatgagtttgacgaattgacagaagtaggcttccgaaggtgggtaataacaaactcctctgagctaaaggagcatgttctaacccaatccaaggaagctaagaaccttgagaaaagcacgagaacttcttgaagcatacacaagtatcagtagacgaattgatcaagtggaagaaaagataccagagattgaagatcaactcaatgaaataaa

SEQ ID NO: 476511 - DNA, 702 bp, Homo sapiens
acagctggacagagatgaggccggacaatgggcagacctcctggctgactcctggggctgcagccactatgtgtgcagaaggtggtcaggacagggacccagcatcacggtcctcggagatccccaccctggcaggtgcttcagtgtcctgggagattcgttccacccccacccaaatctcctctgccctttatccgcccccagcctttgctcacacttggcctcttcggcagcgccatccctgggtttatgtgaactctcttttttccttccagaaccgctttctcgggggcagagcagagcatggcttcccaaatcccacagacctgatctggaactcagcttcaccgccaaccgcctgtgtgaccttgaggaagctatgtaacctctctggggctcagctgactcaccccaaaatgagagaggtggctgtgacgttaaaggagagtcttgtgctggaaggtgacagccgggagagccagcccctgtcatcctccagcccttctgcttccctcactagcttccaccttgcaccacggggggcttcgtgtgcccacctgagggtgcccacctggagcgtctaagctcagttcacaccctccaaactcagcaaccccttgattgaaagacaaagagcagcctggaatctccttcctccacatgattgctgtggtgtttttttatgtttaatttttagagacc

SEQ ID NO: 476512 - DNA, 566 bp, Homo sapiens
gaaggcatggggaacctcccgtgaggcttcggcccctgcatgggtgctgtggctttgccttccttttggggaatggatggaaggcccgtgttgccgtccacagagtcattggtccttggagcagggtgtcggccaggcctaggatttgcgtcctcagcacagggtcatcaaagccttgacgaggccctccggcggcttgccagtttccgagaggaaacatttttggaagccctctacatgtcagacaccattttagattctggaagcacaatgatggaccaaagtcagatagggcttatggaccgaacaggaaactggcagcaatctaagaattgtgcaagtaaatgcaaggagagaaaagacaaaaacactagagggtcaacctacgaggagacatccattgaaaatgagtttcagaagagaagagagcaaatggagatgcagtcaaaagggaaataaaaaataaaaatttggagttgcccccaccccctgactctttgtcccccattcctggttctctggccagaaagacaaggcatttcctccaaccacttcacagctccagg

SEQ ID NO: 476513 - DNA, 1189 bp, Homo sapiens
ccagttctggaacccccatgtcctggctgtgaaaaaggtgcagccgctcccagggttgccagaaaaacagagtgatggtggaagccggtgccaggcagggtccctccaccagccacgctgtcccgggaggggccccacccttctgcgatcagcagaggatccctgggagagtcgccgcccctccagctccaagcccctgggcgaccccctcatgatttatgcgggggccactgtccgaaggcccccggctgatggctcctgagcggaaaaatgaaatgccaagacccaggcatcttgctgggctaattactctcaatgagacccagctggctgtgggagccggcggcgccggggcaggcccggatccctgtacccagctccctggggctacaaaggcctgtcccaaccctgcctcctacccccatcctggtatctcccagccagagaccattgagggcagaggtgaggtgttactggtgttattgatcaccctctctgagcactggtacagaggaggcctagctgcagggagcagctggcaagcagatgcctgtggcctgcagtaccttggcgctggcttggttctgcggggcacaaacaggtctgacaagttcctcagcagcagagacagggctcgggtctgaattctacccctcaacccacagcctccaatccttggctccagggacctgctcccccaacctcagccacccgattccagggtcacaccttagacctgctcttctcttccttaaacactcggttcttgtttcttacttttctttcctttccctccctccttccctccctcccttccctccctccctctctctctctttctttctttctttctctctctttttctctctctcttgctttttttctttttctttctttctctgtcttccttcctccctcccttcctccctcccttccttccctcctttcttttcttttcttctctttctctttctttctctcttcctcccttcctccctccctcccttcctccctccctcccttcctccctccctcccttcctccctccctgccttcctccctccctcccttcctccctccctgccttcctccctccctcccttcctccctccctgcctcccttcctccattcctccctccctccattcctcccttctcccttcttttcttctttcctcctttcctttcc

SEQ ID NO: 476514 - DNA, 826 bp, Homo sapiens
cctggcttgggtaacccagaaagctctgccctccaggcaccaggacagtgtcacccataatgaatgccccagagcacctaggggaagccagccagcagcacatccaagcagcaagcctccctccctgggtgtcgctgccgcccacccggctgcacagggaaagcttgcgacgcacaccttgtaccaatgtggcactggcctttagcaggcaaccttgcctgagccctgcagaggtgcatccttgcctgcactggctggttcccaatggagctgcggctgccaccaacccccagaccccaggcctcctgctggcatctccaaggcatcccctgcagacacagctccaacctccgcaggcatcgggccagggctccctgcaggacggccatcaccccagcgggcaccaacctccttcctcttcagagctgccccaggtctccagggactggatccaaggctcttgcgtcttagagaggactggagacgccctgtccttcatccccacctcctgcctcagcgcagccctggatcctcagatccttccccaggataagagatggtgccatcacccccttggggccccgctgacccatgaactctccgtggctcccggaggcgccatcaccctcatcttaggggagggcgcctcgcggggccgagagtcaatggaacaggaaacaaagccccaaaatgtacaccaaaacatagtggaatttagcatatgataaagagggccttacatcagtgaggtaagcatgggctttttaataaatggtgttggtaaaaccaggaaaccacctggaaacaaataaaactgaatctgttc

SEQ ID NO: 476515 - DNA, 709 bp, Homo sapiens
taagcccaataagagtttcttgctgctgtttttaatggagatggtggtagtggcagtggtagtggggtgtgggggtggtggtggtggtggtggtgatggtggtggtggtgatggtggtggtgctggtggtggtggtggtggtggtggtgatggtggtggtgatgatggtggtggtggtgatggtggtgatggtggtggtggtgatgatgatggtagtgatgggggtggtggtggtggtagtgatggtggtggtggtgatggtggtggtggtggtggtggtgatggtggtgatggtggtggtggtgatgatgatggtagtgatgggggtggtggtggtggtggtagtgatggtggtggtggtgatggtggtggtgatggtggtggtggtggtggtggtgatgatggtggtggtggtagcggtgatggtggtggtggtgatgatgatggtagtgatggtaatggttatgatggtggtgatggtggtggtggtgctgatcctagaaatgatggtggtggttgtggtggtgatggtgatgattgtagtgttggtggtggtaatggtgggatgctagaagtgatggtatctgcccgtggcaagtgacgattactctttctcagttgaaaagactgtcaaacattttaaattacaattgtcagtagtgagacggtgtttcatcatgtgaaatgatctaaagctgtgaagcataaa

SEQ ID NO: 476516 - DNA, 1914 bp, Homo sapiens
tgtccctgctgcctctgaaacgagctatgcttccaacatcctggattttacatggtacctccttatctacaccttcttctggatggagagatacagcatagaaaaaaacaaggtgatgcgatggcgaggaagctcagtgtattggaagtccttctgatcatcttctgcttaattgtggtgaccatagatatcctcttgctgcttcttgtgttggaggaaacttcagatacttcatttactccagagtgcccagagattccccagtcggaaaggatagactgcacacctgaccaggaggtgaccgaggatatctgcagatggcaatataagtgctgctggtcgcctgtggcagatgccaatgtccctaggtgcttcttcccctggaactggggctatgaagccagcaatggccatacaaatacaagcacaggatttactgcccagttgaaaaggttgccatcaccatctctgtttggaaatgatgtcgccaccacccttttcacagctgaatatcagacatccaatcggtttcattttaagatcactgactttaataacatacgctatgaagtttcccatgaaaatattaacctggttgatgggattgctgatgcctccaatttgagctattacgtggaggttactgataaacctttcagcatcaaaataatgaggacaagcaacagaagagtcttgttggacacgagcatcgggcccctccagtttgcccagcagtacctgcaactgtctttccgactgcccagtgccaatgtgtatgggctgggagagcatgtgcaccagcagtaccgccacaatatgacctggaagacttggcccatcttcacccgggacgctacccccaccgagggcatgattaatctgtatggagctcatacattcttcttgtgccttgaagatgccaggggctcctcttttggagtatttctgatgaacagtaatgccatggaggttacccttcagccagctcctgcgatcacttatcgcacgattggaggcattcttgacttttacgtattcctaggaaacactccagaacaagtggttcaggaatacttggagcttgttggacggccattcttccctccctattggagtcttgggttccagcttagtcgcagggactatggtggcatcaataaattgaaagaagttgtaagccgaaatcgtttagctgagataccatatgatgtccagtactctgacatagactacatggatggaaagaaggatttcactgttgatgaagtcgcttactctggtctcccagattttgtcaaggagttacatgacaatggacagaaatatcttattattatgaatcctggcatctccaaaaactctaactacgagccctataataatggaagcctaaagagagtgtggatcttggggagcaatggctttgctgttggggagggatatccgggaccgacagtctttcccgattataccaatccagtatgcactgagtggtggacagatcaggtcgctaaatttcatgatcatctggagtttgatggagtgtggattgtaagttattattcctgactcaaatttcctttggaaacagataacgccaaattttcagatgagttttgaccttgatgtcaaataaatgtcaataaaaaatagtttgctttatgtagtagtattcaaaattattttacttaaggctgagtctatatccagtgaattaggctcctaagagccttaggttcttatcctgcatctttcatcaactggttatttcattttgataaagtttttgctttctccattaactggttgtcagcttaaaaatactgttttattaaaacagtattataattgctactatttgtagcattgattcataaaaatttaaattaatcattagagaataatttaatgagg

SEQ ID NO: 476517 - DNA, 537 bp, Homo sapiens
tccttttttcaaattgaagttttgactctgctgccagtgtgaatgtgtgcatggacactggctacccacacctccccttcactttgccatggccaccagtgtgatcatgcacacagagggcagcaggccctgccacaggtgcaaatgcaagcacagacctcggcaaccctgtccccacctatgactcactgctggcatgagcatgtgcaggaatgtcacagccccgcttctgccagtatccccctgccccagccaacatgcatgcatcctgctgtgctgtgccacggctgccagcacaacccgtcggatatagtgccttcaaagattgaagaaacatcagcccacacagtgagaaagaaccagtgcaagacgtctggcaactcaaaaagccagagtgtcttcttacctgcaaataactgcactagttcctcagtaatggtttttcgctaggctgaaatggctgaaatgtcagaaatagaattcagaatatgattaggaatgaagaacatcaatatccaggaggaagttgaaacccaa

SEQ ID NO: 476518 - DNA, 646 bp, Homo sapiens
acaggtaccagacccctgccatgcatttccacatggcttgtcctgctgacctagagctagaagtcaactcatctgacccctggttgctggctctccatttgacaatggagaggacatggaccctgagggcctctcccacacagactgggcctcacctctccacagaggaattcagctcaggactcatcaaagctggtgaggacccagctaaggttgtttgctgctgctgtgagctcttgagtagtaattggggtgtggtgagggagaaaacaaatgcctcaagggggcagccacagcccctaactctaggcctgacagagaaggcagggagctcggcagccatctggaagcaagaggcttatcttggcccaggaccagagctgagccaagagaagaggagaggtcggagcctgggaggcactgaccttgaggagcagtaacaccagagagagagagagataacagcattagaaaactaatacaaatgcatactggatgctggcatcatattctataatgatgattccatggcaagggagataagaagcttgctctcatacatcataatgcttaatgagggggagacagatgtaacaagaacaatcatcgtgaatgtcaaaggaaaagggaggtagagaagcatgtc

SEQ ID NO: 476519 - DNA, 733 bp, Homo sapiens
gcaataggtaaactggaaagtgttgaggagatgccggtggaggaacaaccctcttcctgggctctgcctgaattttgtccctttcctcctacagttcccatagacactgaagttacccagacaccaaaacacctggtcatgggaatgacaaataagaagtctttgaaatgtgaacaacatatggggcacagggctatgtattggtacaagcagaaagctaagaagccaccggagctcatgtttgtctacagctatgagaaactctctataaatgaaagtgtgccaagtcgcttctcacctgaatgccccaacagctctctcttaaaccttcacctacacgccctgcagccagaagactcagccctgtatctctgcgccagcagccaagacacagccttgcagagtcaccgctttcctgtgcagaaaccttcggggcctgccaggaagccgtgggggccacggagggctcgggtgaacatttcctccaagagccccgaagaagcttcagaacatcatagcacctgctaattcatccatgtggcaactttacatcctatgacatatttagagtgtgggtttccttttgcctgaatatgtcaaatgtagatatttaaagaaatttggattggaaatacactaaatcagaagtagcaagtgaaggatagcggttctgtaatggaatctttctcagattctgttttccctagtctcatgtttcttttttaaacccagt

SEQ ID NO: 476520 - DNA, 1686 bp, Homo sapiens
acctggaaaaggactgtacccgaagaattgggtgacactttcttagctccactcagggagtgaccctgaggagggtgctgccagccagaggggctcaggtcctgagtcctgttcccctatcaccgatgcacagacccagaagacccctccatcctgtagcacctgccatgagcatcgggctcctgtgctgtgtggccttttctctcctgtgggcaagtccagtgaatgctggtgtcactcagaccccaaaattccaggtcctgaagacaggacagagcatgacactgcagtgtgcccaggatatgaaccataactccatgtactggtatcgacaagacccaggcatgggactgaggctgatttattactcagcttctgagggtaccactgacaaaggagaagtccccaatggctacaatgtctccagattaaacaaacgggatgatgagcgggtggatgaaccaataacaggaacactccaggaaccaaacccaggagtgtgtttggcaactcagagtgcagcagacaattctttgccccgtgcatttgggataagactggagacagctggaaaagctatggactggacgttctgcactctcaatgcaggactctctgaaatcccacagattaatgtcaggaaagacaatgagctcaccttttggtgctttgtgttggcggagctgttgacacatcctagagaacatgcccagcagacagaggagcggctgtgggatgaggagataaactcagagatgcagcatcacacaggtgctggagtctcccagtccctgagacacaaggtagcaaagaagggaaaggatgtagctctcagatatgatccaatttcaggtcataatgccctttattggtaccgacagagcctggggcagggcctggagtttccaatttacttccaaggcaaggatgcagcagacaaatcggggcttccccgtgatcggttctctgcacagaggtctgagggatccatctccactctgaagttccagcgcacacagcagggggacttggctgtgtatctctgtgccagcagctcagccacagcactactgctccagtgtcagcttggttccctaggaaatggggtttctagaacctgaatgctgacaaataagagttgtatatgtgtataccatgcaacctgcgtttaaaaatgtatgtacatagtgcaatgactaaatctagctagttaacatatgcagtacctcaatccttatcctttccagtggtgagaatacttaaaatgtactctgttagcattttcccagaatacaaaccactgttgctaactctagtcatttgttgtataatagatctttgtaacatcttcgtcttatctgagtgagattttgtatctgttgaccaacatcttcccaacagtccatctctactccagcctttgctaattactgctctagtctttgaatttgaagtaatttccctgaggtctttagctcaacaagatgggggaattttctctataatgatgcttacgttatttttgctttgtttttgtttcgttattttatgtcttgcaatatagtgtttattgtaaatataaataagtatattgtaataaaaatccttcacctctctttgggtaaagctacagttcacatattctaaatttcatgctgtgaccaacgctgacataattatggatca

SEQ ID NO: 476521 - DNA, 832 bp, Homo sapiens
ctgcagccagaagactcggccctgtatctctgtgccagcagccaagacacagccttgcagaatgctgagtgacccagaccctggtcatgctcttgtgctgaaaggaaaccagcacatggggaggtgggtcctgggcggggccccttgtgtggatttcaaggcccatcccctttccactggagcagtagcatcagctttgtccttctctgcaggtccagtgaatgctggtgtcactcagaccccaaaattccgggtcctgaagacaggacagagcatgacactgctgtgtgcccaggatatgaaccatgaatacatgtactggtatcgacaagacccaggcatggggctgaggctgattcattactcagttggtgagggtacaactgccaaaggagaggtccctgatggctacaatgtctccagattaaaaaaacagaatttcctgctggggttggagtcggctgctccctcccaaacatctgtgtacttctgtgccagcagttactccacagtgctgcacggctgtctcctctctgcacagaaaggcaagggaaggtgctgccctcctccgcagcacagattcagcgatgcccttggtcctagcaccgaaaactttggagccccaatgggcccgggcggtgcgagccttcatctgtgccaggtgcctctgcagtcggtctcggccaggcctggatcggtcccaggacctcagatgtcttccttgttgccctccggtctttcctctgaggtgtccttttgggctagtgccaggggtttcccagctctgactttcctagtcattcacctgagtctgaggcctcctaggtgaaat

SEQ ID NO: 476522 - DNA, 1021 bp, Homo sapiens
gtaatctacagacacaagatcatgggcagcgttgggctgccactatcatccacacagagagggcagtcagcagcgtgaggtggttctgcctgctgcggtctcaccccaggcacagaaagcaagagccctgggtggagctgaagacccagaagacccctccatcctgtagcacctgccatgagcatcgggctcctgtgctgtgtggccttttctctcctgtgggcaagtccagtgaatgctggtgtcactcagaccccaaaattccaggtcctgaagacaggacagagcatgacactgcagtgtgcccaggatatgaaccataactccatgtactggtatcgacaagacccaggcatgggactgaggctgatttattactcagcttctgagggtaccactgacaaaggagaagtccccaatggctacaatgtctccagattaaacaaacgggagttctcgctcaggctggagtcggctgctccctcccagacatctgtgtacttctgtgccagcagtgaagccacagcgctgcatggccatcacacaggtgctggagtctcccagtccctgagacacaaggtagcaaagaagggaaaggatgtagctctcagatatgatccaatttcaggtcataatgccctttattggtaccgacagagcctggggcagggcctggagtttccaatttacttccaaggcaaggatgcagcagacaaatcggggcttccccgtgatcggttctctgcacagaggtctgagggatccatctccactctgaagttccagcgcacacagcagggggacttggctgtgtatctctgtgccagcagctcagccacagcactactgctccagtgtcagcttggttccctaggaaatggggtttctagaacctgaatgctgacaaataagagttgtatatgtgtataccatgcaacctgcgtttaaaaatgtatgtacatagtgcaatgactaaatctagctagttaacatatgcagtacctcaatccttatcctttcc

SEQ ID NO: 476523 - DNA, 1145 bp, Homo sapiens
cctgtcaaagttttcaattgctagaaaatacgcagcaaggccttgtagcaactggcatcaccccgaggccactctatgatggtcatcaccacgtagccagttgccctgtgggagggccctggagctggaagaagggagcttaggaacttcagaatgcttactacagagacaccagccccaagctaggagatcctgccatgggcttcaggctcctctgctgtgtggccttttgtctcctgggagcaggcccagtggattctggagtcacacaaaccccaaagcacctgatcacagcaactggacagcgagtgacgctgagatgctcccctaggtctggagacctctctgtgtactggtaccaacagagcctggaccagggcctccagttcctcattcagtattataatggagaagagagagcaaaaggaaacattcttgaacgattctccgcacaacagttccctgacttgcactctgaactaaacctgagctctctggagctgggggactcagctttgtatttctgtgccagcagcgtagcacagccctgcatgagcatcagccttctgtgcaataacattcctgccccactcaggaagtgacgattttttaaagtttttagtaacaatatttaacatgagatctaccctttttatagacttataagcacacaatacagttttatactctgtagtcataacgttgtacagcagatctctagatcttattcatcttgcatgattgaaattttatacccattggcagcaactccccatttaccccattccccagaccctgaccgctaccattctagtctttgcttccatgagttggactattttagataactcatgtaaatgacattatgcagatttttgtctttttgtgattggcttatctcatttagcctaatgtcctaccaagtatagtggtgacagttttacttctatcttccacagttcactcgaatagctccttgaccaactgtaacccagaatcataaagataaaggcattcttagaaatataacttcttgtcctggctaagttaacttaacacaacccggtacgggatggattctcccaggttgaggcatctggtcacatacgagtttcaacctatcatggtctccaggatccattttt

SEQ ID NO: 476524 - DNA, 1112 bp, Homo sapiens
tcctgctcccctttcatcaatgcacagatacagaagacccctccgtcatgcagcatctgccatgagcatcggcctcctgtgctgtgcagccttgtctctcctgtgggcaggtccagtgaatgctggtgtcactcagaccccaaaattccaggtcctgaagacaggacagagcatgacactgcagtgtgcccaggatatgaaccatgaatacatgtcctggtatcgacaagacccaggcatggggctgaggctgattcattactcagttggtgctggtatcactgaccaaggagaagtccccaatggctacaatgtctccagatcaaccacagaggatttcccgctcaggctgctgtcggctgctccctcccagacatctgtgtacttctgtgccagcagttactccacagcgctacaaggccgtctcctctctgcacataaaggcagggaggttctgccctcctcccccacccaagactcagggatgccctgggcagagatctctgcgccaggaaccttggaacccacagtggccccaagtggcctggacaggctttcccagctcctacttttctactcattatcctgagtccgaggcccccaggataaaacaggatttgcatttcagatccatctagactcccgtctctccctggtgaccctgttgcttcctctctctaatgtttcccccagcccccaccctcatgttttctctcctgtggcccacctttcccatctgggcagtcaccctccaaggcgttgctgggtctctcctccccccacctcctcgcccctctctactgcagccatgaggggagcccctgttctgtgcctccttccttcccatcacagagacttcaaaggccatttcctctgcccttgcatggagccttcctttctgcagtagccagctcctacctgtccttcatatctcagcatgatcaacccctcttgtgggaagcgctccctcccctcccatctgaaatcaactttcctctcataagctgtcacagattcatgtgtctgttagtaacctttagcacagcttggctttctcagatacttgtctggttatttttgtactccacccaatttttaagcccatgagagct

SEQ ID NO: 476525 - DNA, 1756 bp, Homo sapiens
gagtctctaacttggtggcaaggtgagagacccagaagacccctccgtcctgcagcccctgccatgagcctcgggctcctgtgctgtgcggccttttctctcctgtgggcaggtcccgtgaatgctggtgtcactcagaccccaaaattccacatcctgaagacaggacagagcatgacactgcagtgtgcccaggatatgaaccatggatacatgtcctggtatcgacaagacccaggcatggggctgagactgatttactactcagctgctgctggtactactgacaaagaagtccccaatggctacaatgtctctagattaaacacagaggatttcccactcaggctggtgtcggctgctccctcccagacatctgtgtacaaagtcacaaagaggggacaggatgtaactctcaggtgtgatccaatttcgagtcatgcaaccctttattggtatcaacaggccctggggcagggcccagagtttctgacttacttcaattatgaagctcaaccagacaaatcagggctgcccagtgatcggttctctgcagagaggcctgagggatccatctccactctgacgattcagcgcacagagcagcgggactcagccatgtatcgctgtgccagcagcttagccacagcatggcacagtcgcctccttcctgttcacaaacctcatccttctctctctttgcagctcccagagatcattaacagaggcctctctttgctcctcacttttcctgggaaagaggtagatttggacctcggttgtcctttgggtggaaagagaccacagattcattcctgaaacacagtgactgcaaatgtaagtggtgaaaacaatcacgtcccactgcactctaggagggctcggagccagctcactgctccaaacaaggagtgggtgtcttagccttggccttcagagcagacatgcatcttctataggtcttggaggctgctgtgttgcccacatacatgaggttgtcataggcaggaaacatgcctcttcttcatatgttggggcatctggaaggtctgaggctacatccccgagaagatctttcttctgaagcctcttctatccctgtcaccttggaagttttctgccacaaaatatcaaacctctcttcctgtttgaagtaaaggtctttgcaaatttgtggtccttacttgataaatacaatcatggtaacaataacacttcatttcttctgcctactttaagccaagagtatcctttattttatttccatttgccattgctgctgtcctgatagacagaagcatgcatcaccaccgctgccacttcaccttgattcactcaggaaatctgattttcagactctgagtgttttgattgttgtccaactcatttgatttgaaataattctcccaaggcctttaactcaaaaagtgttttatttataatattgaatctattcctttttattatattttttcataatatatagtgttatatagcacttgttagaaatagaagtacaatgattatattgcaatagaatcttccatctgtctgtgggtgatgctgcagtttgtatctatgaaatggaatgcactggtcagagctgatgtgattatgcattatgggtttcggggagtcctcagcgacagaccacttctccaagtctgggactcagtgtcccagatgcaaccctgatagaggtgccctgaatctttcatagctaggaggggcatcatagtccttccaaattcactga

SEQ ID NO: 476526 - DNA, 1937 bp, Homo sapiens
tcctgttcccctttcatcaatgcacagacccagaagacccctacgtcctgcagcccctgccatgagcatcgggctcctgtgctgtgtggccttttctctcctgtgggcaggtccagtgaatgctggtgtcactcagaccccaaaattccacatcctgaagacaggacagagcatgacactgcagtgtgcccaggatatgaaccatggatacttgtcctggtatcgacaagacccaggcatggggctgaggcgcattcattactcagttgctgctggtatcactgacaaaggagaagtccccgatggctacaatgtatccagatcaaacacagaggatttcccgctcaggctggagtcagctgctccctcccagacatctgtatacttctgtgccagcagttattccacagcgctgcaagcctgtctcctctctgcacataaaggcacagaggctctgccctcctcccacccaagactcaaggatgccctgggcagagttctctgcaccaggaaccttggaacccagagtggccccaagtggccaggacagtttgcatcaataaaacagggccactacaagtttgagagtgtaacagatttatgatcagaattagactttatgcatatgtgggaggagctgaggaagacaaggtcttgaggagagaagtcagaagaatcatgttttggctctttggtgctcagatcagtggatgtgcattgtacaagttgatcatttcctgtacaagcccattgctgctcttaattatatccatccttattttgtgcattaggtactgctccctacaccactgcttattgccgtgtaataagtctcattttgtgtatttcagttttactttttattattacacatttgacttcatcttctgcttatctatacttttggggtaacattgttatttttggaggacatttttgtttatctttagtgattcagattaaataatctctttatacttcaacgtctgtcttttatttctatttaaaaccaaatattattttcttttattcctctcattctgttcctctttctttagttgatagttttaagggagaaaaatttagactataactggagctacgtgataagagttattcagaatgaggctgggatattaacattgttaactcaaagcaacagtcagcattagaactagtgttgggatgagggtttagggaagctgctcataaaacctgcagaatggtacttctggaatattctctcagctcactctgcagacacttcccagcattccttgggccattgcagaagcaacaatgatgaaacatcacttactggccataagatggcactgtggtccactgggatctaaagggctctggggagtctgggagagcagcctaggagggaaagggttaagaaaaattagggcttagatccagtattatgcagatgttgcagcagttttcagttttgccagactacctacagctatgcgagaggtgggaagtccctctaaactttaatgagatctacagttgaataattttggctggacagctttggtgtcagggacaggtgcagaggagcaactgcctcagagaaagctaggggcaggatgtgccctgagcccagtgcatctgcgctgcacctcatcttccctgcaggtcttgccaggcaacagctttaacctgctcaagtgatctgggattctataagtttgtaagtcgtactgataacatcatcttggctgagattccattgggcaccaagcacgtgtactctggaggacaaaaaatattgataacagttctaaaacactcaagtaaacaaactactgaaggaaaatgttaatagatgcaccaaactgtactgttagacttgaaaataatcaactaatagaattatcaaaaagagactacaaataaatctttactaagtatttgtgggcatc

SEQ ID NO: 476527 - DNA, 710 bp, Homo sapiens
tgcctcttcttcatatgttggggcatctggaaggtctgaggctacatccccgagaagatctttcttctgaagcctcttctatccctgtcaccttggaagttttctgccacaaaatatcaaacctctcttcctgtttgaagctgagagatcagaaggatcacatcctcagtattctcctctcctggactgagtgtggccactctccatctcagtccctggaagttgtccagagttccctgagaatccctgctctggggcagaatcaccaaggctcatcctcaccagctccccacaggctccagcagggctttcctgccaggtgtgcaggagcaaatccttggagaggaaaatggtccagttcagctgtcacgggagacaggagaaagcaaagtcatctaatccacagtcccctggctgatttgcttccttatgatactattttgcatcagcgtgtcctcatctcccgctgctcctctgcctcttccagtgtcatctcttccctgtttgctgctcagatcagtggatgtgcattgtacaaggtgatcatttcctatagcagtccctttgctactcttagttatatccatccttattttctgcattaggtataaacttaagagtggaaatactgacttacagtgtagatgtgtgtgctatgcttgcgtgtcctcacaaaagctcatgttgaaatttgtcattgtaatggtatt

SEQ ID NO: 476528 - DNA, 643 bp, Homo sapiens
tgcctctatatctgctggtcactgactctcactgtccaaccacgataacctgccaatttgacactgatctggtaaagcccccatcctggcctgaccctgccatgggcaccaggctcctctgctgggtggtcctgggtttcctagggacagatcacacaggtgctggagtctcccagtcccctaggtacaaagtcgcaaagagaggacaggatgtagctctcaggtgtgatccaatttcgggtcatgtatcccttttttggtaccaacaggccctggggcaggggccagagtttctgacttatttccagaatgaagctcaactagacaaatcggggctgcccagtgatcgcttctttgcagaaaggcctgagggatccgtctccactctgaagatccagcgcacacagcaggaggactccgccgtgtatctctgtgccagcagcttagccacagcatggcacagttgcctccttcctgttcacaaacctcatccttctctctccttgcagctcctagagaccctaaacagaggcctctctttgctcctcacttttcatgggaaagaattacatctggacttcagctgttctttgggtagaaagagaccacagattcattcctgaaacacagtgactgaaaatgt

SEQ ID NO: 476529 - DNA, 1176 bp, Homo sapiens
tcctccacttctccgtggtgatcaggctttcagagatcagacaccacgggtagtatggtctgtgtaccctacagcactgtagatacaagcatcatggtgttggcaatggggagcagccatggaaatgaggagagccagaaggaatcaaaccctgctgcttggttcagtcgacagaaggacctggtggaaggatgttggctgggtctaagagaagatgatgagctcagaaaacagacaaagagaaatcccaggcgaaagcttctgaaaccctggaggaatcacaagtcaaatttctcccagaagatggtggcagtgactcaccttcagaggagacctgtgaactgggaaatgagcagcaacagcaccaccacagacacacactcgccaggcacagggagaggacagatcctggcctcttgtagcaccagagctctgaacgccctctacctgctcagtctcccatgggatctaggctcttctcctgggcgctggacatgccttggtttctcaaaaccagatcacgcagatactggagtctcccagaaccccagacacaagatcacaaagaggggacagaatgtaactttcaggtgtgatccaatttctgaacacaaccgcctttattggtaccgacagaccctggggcagggcccagagtttctgacttacttccagaatgaagctcaactagaaaaatcaaggctgctcagtgatcggttctctgcagagaggcctaagggatctttctccaccttggagatccagcgcacagagcagggggactcggccatgtatctctgtgccagcagcttagccacagcatggcacagtcgcctccttcctgctcacaaaccctcaggcacttacttctccttccagctctcagaagccctgaacaaaggagctgccctgctctttcctcagcaaggagaatgaatgcatttggaactgcaggtgttcttctgatactaggaggtcagaaaataacctctgaaatacaggaacagggaatactgggtagtaataattttgacttatggatttctgggattccttatatatagttcaaatttccataattaggatataacagagcttagtctcatggatagtgactaagtaaatattcttttatagaactatgaagtttcagcacatttatattaaactactgtt

SEQ ID NO: 476530 - DNA, 1567 bp, Homo sapiens
gagagtgagctatcataaacaggcagccaccttgttctctgcatgaggagcatggaggtccagatgcttccaggagggatctggggcaaagctctaactaagcaacacattattttgattttgtgtgtctgggatataaggatggccgagcttatagatgctagagtcacccagacaccaaggcacaaggtgacagagatgggacaagaagtaacaatgagatgtcagccaattttaggccacaatactgttttctggtacagacagaccatgatgcaaggactggagttgctggcttacttccgcaaccgggctcctctagatgattcggggatgccgaaggatcgattctcagcagagatgcctgatgcaactttagccactctgaagatccagccctcagaacccagggactcagctgtgtatttttgtgctagtggtttggtcacagcgctgcagaatcacctgctccctgtgcagaaaccctggtgcttcctcttctcctccagtacccagcagctctcagcagcctttcttgctcctcccctagcacaggaagtacataggtttcgtgttccacatgtcctaggcaaggcaagaacaggtcataaggacacatcacgttaggaaacttttggtaggaagtcagtgggtgtgatggttcctgggattccacacatacttctcacaagggtgcctgagtccaagtttgagggcgagtgtcacagactggagctttcaagtgattgagtgagcttaaaactgtgcagccattgcacatggatgcttatctcctttgctgctttccgttatggcttctttgccatttcttttctcttctaccttaaaactttcaacatctttgatgacttccaacatcaatattggcttcccagttttttcacttgctcacttcaaatgatcatttccttcaccttgtgtcagatattcatttccactttctttttctagattccaatgacaaattatttgaattacccccaaatagtttcctcaagcatcccattgtctcatgcgggcttctcttttcatctctggtactacttctgcagcaattcttcaacccatcaggaccactaattgacttctcctgcaaatattgcaccatatatcatctcctcatgtactatattccttatctgacttagactatgtgttccaaggtgattgtgaaattttgcctatgtcttcagctcttttctttttctgtttcttacctggaaaataaaatggggcctactctgtgcccctttcaatgacacagagaacataaaatgtcccttacccttgtcaagcagtattataacgatacagtgtgtcttgaggtctgtaagtccctctatgcatataaaattatatacttttcttctattaaaataatttgttaccttttaatgagttcatcagtttcatctttcaattatagttatacttttgacaattatagaagtactaaaaaaagttatgcacccagaatgtatgattctatcacttttatgtgtgtgcgcacttcacttcatacgtacaaaaaagttaaaagaatgcc

SEQ ID NO: 476531 - DNA, 623 bp, Homo sapiens
ttgtgaacagaatttgaaccacgatgccatgtactggtaccgacaggacccagggcaagggctgagattgatctactactcacagatagtaaatgactttcagaaaggagatatagctgaagggtacagcgtctctcgggagaagaaggaatcctttcctctcactgtgacatcggcccaaaagaacccgacagctttctatctctgtgccagtagtatagacacagtgaagcacggatgtcgcctctctgtgcataaatgtgcccaggataagaaatttttagaaaaatatgagtccctgtccagaatacacaagccttggctccacgaattttcttcgaattatttcctggattctgtgtttagctttggatttcttcttctacatagcctatgggagtttgactcacacagagtcccacagaaaccaaaatactaaaacatagagatggaaaagacagttctccctgaaaaggatctaaagaacattaaaacatggtatcatgagaactacaaccagtcattgaaactaatgttttctgacggtagtaagtaaaacactggaaatgagatggctctaagctacttcactttgaacgttcagaccatattcacagatgcct

SEQ ID NO: 476532 - DNA, 873 bp, Homo sapiens
ttctgccagtagttagaagacaatatcggctgctgaattaatcacagcggacaacctaccacccaacagacctggacccttgtcaaccctttgcaacacagaacaggggtttagacaataagggtgaacgtgaaagcgtggagatgacacctggcccctgaccaaggtggaactgactggaacaagatgggagccaattctgcagtgaacacgctgctgcttttcctgctctctccttcctccacaggctccacggacaccaaggtcacccagagacctagacttctggtcaaagcaagtgaacagaaagcaaagatggattgtgttcctataaaagcacatagttatgtttactggtatcgtaagaagctggaagaagagctcaagtttttggtttactttcagaatgaagaacttattcagaaagcagaaataatcaatgagcgatttttagcccaatgctccaaaaactcatcctgtaccttggagatccagtccacggagtcaggggacacagcactgtatttctgtgccagcagcaaagccacagccaccttcatcaggtctatagttctacaacacagagtgtcagtagtagggaacgttgttcatgtgagtgcagggaatacttgggattctgtagtttctgctcaactttgctgtggacttaaaattgctccaaaaatacaattcactaatttaaaaatggatccaagtattcagatggagaattaccatattggaggcacgaaatgggaacatactgttgaatctgttgcaatataggaagagtgtttaatgacataaactttttcattatttactcctttatctaggaaataggacactatttaacactgactacaatgagga

SEQ ID NO: 476533 - DNA, 637 bp, Homo sapiens
gggtccttgactgcaactcccttcaaagactgcaatgcattggctgtgcaccaagtctggggtgggcagaacagcctctccacaccctgtaaaccagccaggcagagattggaacagtttggaggactcagaagaagacaggaaaatgtgggaaagcttggaacttcctagagacttgttgaatgcctttgacaaaaatgctgatagtgatatgaacaataaggtccaggctgaggtggtttcagatggagatgaggaaattgttgggaactggagcaaaggtgactcttgttatgttttagaaaagagacagatggcattttctccccaccctagagatttatggaactttgaacttgagagagatgatttagcgtatctggcagaagaaatttctaagcagcaaagtgttcaaaaggtgactcgggtgctattaaaagcattccattttaaaaaggaaacagaacataaaagtttataaaattcgtagcctgacaatgcagtggaaaaaaaaccattttctgaggagaaattcaagacagctgtagaaatttgcacaagaagcctaatgttaatccccaaaaccatgggaaaatgtctccaggccgtgtcagagaccttcatggcagcccctccc

SEQ ID NO: 476534 - DNA, 678 bp, Homo sapiens
tgagcagggagcttgaggaccctggggaaagtaagatgggtgtcccagctgtgggagaaggtcttcaccatgcctgccctgcccatcagccgcatccaggtgagactgggagagcacaacatcgaagttctggaggggaatgagcagttcatcaatgcagccaagatcatccgccaccccaaatacaacagttggactctggacaatgacatcctgctgatcaagctctccatgcctgctattattgtctccttctctggcctgatctacacttctactttctttgttctcttgctgatcctcacagccaactatccagatgagctgcagtgcctggacactcatgtgctgacccaggctgactgtgaagcctcctaccctggagagattaccaacaacatgttctgtgtgggtttccttgagggaggcaaggattcctgccaggtgggtgactctggtggccctgtggtctgcaacggacagctccaaggagttgtctcctggggctatggctgtgcccagaagaacaggcctggagtctacaccaaggtctacaactatgtggactggattaaggacaccatagctgccaacagctaaagcctctggtacctctgcagtctctataccaataaagtgaccttgctttcactgtctgtgtctgtgcctgctccctca

SEQ ID NO: 476535 - DNA, 1067 bp, Homo sapiens
tggtgaccctcacctcacagacacctcctctcccgatcctcgggagataaaaagacgggtcctccaccaccagtcaggcacactctaccaccatgaatccactcccgatccttgcctctgtgggagctgctgttggtgtctcctttgatgatgatgacaagattgttgggggctacaactgtgaggagaattctgtcccctaccaggtgtccctgaattctggctaccacttctgtgttggctccctcaacagggaatactgcatccaggtgagactgggagagcacaacatcgaagtcctagaggggaatgaacagttcatctatgcggtcaagatcatccgccaccccaaatacaacagctggactctggacaatgacatcctgctgatcaagctctccacacctgccatcatcaatgcccatgtgtccaccatctctctgcccaccacccctccagctgctggcactgagtgcctcatctctggctggggcaacactctgagttctggcgccgactacccagacgagctgcagtgcctggatgctcctgtgctgagccaggctgagtatgaagcctcctaccctggaaagattaccaacaacgtgttttgtgtgggtttccttgagggaggcaaggattcctgccaggtgatttgaccccttcccatgctgaggcttccactgatacccaggcttcatctgggaaaaacatttgaactcccaagttggtggggctgagtctccctgcattgccccatggagaagtgaggaaggctcccttgggctgcaagctgtctgcttaggaagaacagagaatgggccactgtgagaaggatgtggagccacagagctggctggaaaggggtcttttaaggttcagagtaaatgtagctatattcctcctccatctctctcttcatacaacttgttccttcttctccccagggtgactctggtggcccagtggtctgcaatagacagctccaaggaattgtctcctggggctatggctggcccagaaaaacaggcctggagtctacaccaaggtctacaactatgtggact

SEQ ID NO: 476536 - DNA, 530 bp, Homo sapiens
tagggtgatggaatgtaggccgccccttctatccaggaacaatgtgcgtgcccagcctccaccaggagcatgtccactaaggtgggtgagccctgaaaggtgtgttagtgacatctcccagagggagaacaaggcgaggctgcatgagggtctgtatgagagccagagcaagctggtgcgtgcatgcttgctggtcacaggccctgcaggcgccatgtgccgcgctagacagccgaggctggcagccgctgctgagagacatgagcagttggctgtcagagtgggagctggttccctggcggctgtgccacatgtaggaaatgacctgtcgaggagccagggctgggcgggtgtattctggagggagaaggatacattccaagactcccctagtgcaggggttcccaacccccaggcgacggactggtactggtctgtggcctgttaggaatcaagccacacagcaggccccggtgtgtgatgttcccctccctgtgtccatatgttctcattgttccactcccacttac

SEQ ID NO: 476537 - DNA, 674 bp, Homo sapiens
gtctgcgagtctgaatttccgtggctgtgggaagaaccctgcctttagcttgaactaaggaaaagtcctgcaacgcttttgatgcccaatgtgatactcaagaaccatggctcagtgcagggtccccgctggctggcacaatggactcaagctaggctatgagaggagaagggagatgtatgctctgctctcgcagctgtggaatgctgcagaggtgtgcatagaatccctaaccttgataaaagggccgtctgcattggttatacatcaaattgggaccaaagatcagactagcagaggccgcagtcacaaggcaattcctgcaggcaggcctagtcacctaactgcggggacctatgcaaagaggcaaatgtggtggggcctcctgttcagagggaagggagcaagtgctgtgaagcccttgccctgcacatctcttccatctgactatccctgagtctcatcctttataataaactagtaataggaagtaaactgttttcctgagtcctgtgagctagaatagctgacaagttagtaaacttgaggaggcagtcatggaacccctgatttgcagcccatcagtcagaagtcagaagggagtcctggatttgggatgggcattgatgtgggggcagtcgtgtggggctgagccctgaagttgtggggtctgc

SEQ ID NO: 476538 - DNA, 3242 bp, Homo sapiens
tgggtttgaagacactgtcccagggtgttagagactggaatgagagagtgggttaatgggcagaatcgtcccccagcccaatggctccctccccagagctccacccttcaggaggagcttgcagtgcagcccaggaaagaaaggggagagtgagggggcatggtcatccctcccggccaggtcctgaagggacacagcattctgctcattgacgactggatacagggctccctgacggcccctgggtgcaaggacaggccgaatgtagcctgcctctgtgcccaggaagaggaggcgggcttggtgggcttcgccaaggcagaaatgcggagagactgggacacaggggagcagaggagcagcaatagtggcgagagtggagggtggtgccaacaggaggctgtgattccaggagaggggctggacagggtcaaatgtggaagcaaagggtgcacatcatgggtgaagcttggagcatctccatatgggggacgccagggggccttttgtaaggactggcttgtgtgcgtggctttaggtgggccttgcaatgtgggaaatgcttagccatgctaaatattgccagtattcaggagttgattctgtaattggcagctgttgttagccctcagatgtgtgtcacccacagtgtgttctgctcccccagctgcagctgaccaaacacacctggaagctctcatgcatcaatcagcctccttggtgcatttctctagtatccaactcatttacctgttgagaaattatatccctaaaaatcagcactcttggttgtttgaatctttgttaaaaaaaagtgtgcttttgtgaatatggaatccaaaattaatacagatgcttgtcgacttaccctggggttacgtctagataaattcattttcactgaaaatattgcaaattgaaagtatatttttggacttacaatattttcaacttacgatgggtttacctgaaccccattctaagttaagaggcgtacagaatgtttatgtttttgtaccatcctgaagtaaaaaaatcttaagtccaaccgtcctaaactggggaccatctattatgtaatcgtaaagctggtggatcccagtaaagggctcccagcgatgcgatgggttactactgccacctgctggtagaacatttctttgtcgatgcaaaaataattctggagttagtggtaacattctgcgtcttgaggggagcttggattgcgcatgcaaatacatttgtcagcttacagatacaattcttcctagaaaccaagatgccaccaacaatgaagacggcgcctatttggggattgacttgttggttaatatatgagaatttccttgaggtgaggtctccagtcatgtagtttctggctccctttggatcagctttagataggaacaaaacaaatgtacaataaaaagaatcagagcagtagttgcatcttggtaaacattgtactggacctgcttaactctgaaagctaaaaaataatgagcttaagtaatgaaaagtaaaagaaaattattccaaatgatatgtactaataatctttaaataatgaattacttaaattattcattatctgttttctgtaacctgctgtgaacagcatagccccattccaggtggtaattgtccatatagttcatgatgcctgggagtccatctcaaaaaaactgaaaaattaaaacataaataaatatttttacctgtcaattaaaaataaataaatatatgtcaattaaaataagcatttatctgtcaattaaaataaaaaaatattttcaccaacctgatgctaaaaagaaaaaaataagtcaataaataaataaaacttttctagataagctgcacaccagcactcttagaaacatctttgatacatgtgtcctaacagaatgtattacaatagctaagagtagttaatatcccttccctgaattcacacattctgaattacttgcacaacttaccaagttagacacgtgtttaagatatgtgttttaagtctactagatggagtttgagtgatgaacacttctatttactgaaataaaactgttgtaaatcaagcatataactcatacccttagaaacagtcctggtaagtgtgtcttaaaagaatgtattaaatgaacttaagaatggtgaacgcttctaatcaatgaaaaaaattattttgagtcatgcaggcaaggacttgtgttagaaacttattttgtacatgtgtcataccacagtagtattaagtgcctcaaacacatctttaagctgaaattacacagttcttaatcatgtgcacaaccagcactcctagaagaaagtttacatgtgtcataatggaatgtaatagattgagttttgagtgttgagcgcttcttttcagtgaccctgttgttctgaatcactacacagctagaaacttagaaacatcttttgtatacttatcttaaaagagtattagatagacataaaagtgaacacttccataaaataaaaatattctcaattgaatacaactaacactcttagagatatattttatacatttgtcataagagcatattacgatataaaaatggtaaatattcccattcactgaagcaacgctgttctcaatcatacatgcaacactcctagtaaagtcctttacatatgagtgttactaagtgttttatgtggagttaagagtgattaacacattcattgaaataacactttcagaatcacatgtgcaactagaactcacgagagtacttttcatatatgtgatttaacatatataataaattttaagatttaagagtggtgaatacattgaaatcaaagtgtgctgaatcacttgtgcaactcgcattcttagaaatatggtttgtggatatgccttaacagagcacatttatacagaattgatgagcatttcattccctgaaataacagtgtcctgaatcagtcatgcaactagcagtcttagaaatgtattttgcacatgtgcctagcagagtatattagatgacataaaagtggagagaccttccattcacacaaaataacattgtcctgaataatatataaaatagaattcttagaaacatctcatgtcttcacagagtgtattaaatacagttgagtgatgaaaacatctatccattgaattaacattgttcttaatcatttacacaagtagtactcttacaaatagcttttacacgtgaatcttaatagagtgtgtt

SEQ ID NO: 476539 - DNA, 2103 bp, Homo sapiens
ctgcccagctttcccccagcacagcagcaggggtttgtgtgcagaacatcctgcccatgctgccccagcagcttcagttggcacctgccccagtccagcctctgggacccatgcagcggctcccagcagccctgcacccaccaccagcatccgtttcacctgcagtggaagatccgtgaggtgcccagaagatcatgcagtcatcagtcccacagagcagcccgcgaggctgaggctcctcccactggactgccccccaactggcaccactgctgcccctgcccctactctcagcctcatgtgactctcgggcagaggcagtggtagggcagcttcagagtctgagccaggctgtgtgtacccccttgtgggagaaggcttgggccaggctgagccaggttccctgactgtgtgcagctgttctgcccccacagaagctgctccttggtatccgagctcaggagtgtctgggctgcaactgacaggagttcagaggacaccccaggggtagtggcagtgcccgtctctgatatgctccactcccacgatccgttgtacactcctgctagcccctggcttgtgggcttggcctctgagctggacttctttcggtccttgttgcaagtgggccaccttcacctggaaggccaggtcgtggtacttctgcatctcattgggccccagggtgtaccaccgctcgctcaggatctggctgatggtccagttatcctggtaggggtgaccctggtgcgccctgccagggcctggtgccgcttgctgaagatcgtgaccgccactcatgggccaccagatgtggtccttgtcccatttgttggggctgcgtccatccttctcagaagatgagtcctgttccttgcacagggcactgagggactgggcctgacatcatctgaatcgtagaggcaactgggtgtcaggagacatgacggagaggaaagcatcatcgtggtcattctctgtctcactgtccagcagggactcccctgagggcccagggctcctcctccatggtgagaggtgggcttttaccaggttccaccacccccaaagtgtgtggggttccgggccctgggctttcagggcaggtggctgcagggggccgcccagggtcagcactccctgtcccacctggtggacactcgtgagcaacagctgccgacttggcaggttctttgctctggttggaggccactgagtgactggcaggttgctgggcctcacgcggctgcagggaggggtcaggaaggggacagagtaccaggagaacacagccacagagcaaggttccacattcctccacacaaacatgctgacaccaccagaggccttgctggacgcagacatcaggggcctgggcagagcccccacagagagcttctatgagggcagtgtggaggagaaatgtggggttggagcccccacacagaatccccaccagggcattgtctttggagctgtgggaagagggccactgccctctagaccccagaatgtattggaagccagcatgtctggggagctgcatgtagcactgcttatctcggtggaaggtgcttgtcctggtgtctgcattctgcagaacagctggtctgctgctttccagccggagtttgcagaccaggaactattcagtggtgctcaggccctgggcctgtctgcagtgcaggacccccagggacatgggccgcctaagccaatgcaggcaggacttgtcagcaaggactctttttcccacaagagccatgaaaagcctctgcctgtggagttggacccctgccgtctgctgccagcttcaggctcgctgcaatttgtggagcctgattttatctgctcctccaacctccaactcccaactcccctcctagccactaagttaccttcccacccgctcatcatctcgccagactttccatcatcacaacctctcaggttaacaaagctctctggcctcatgcctgacttcctgctccactcactgcatagctgtgctcctggagggaaagatagcccaccacacacaactgataaagggcagggctgagatttcaaatcagggcctctagccccaattctcacattctc

SEQ ID NO: 476540 - DNA, 1191 bp, Homo sapiens
tgcatctgccagaaccaccctccatgaaagagctgcccatgcctgctgcttccagcgcccacctccccttctctctggggccttctgcaggcaggctccctgccacaatcacccgtgtcctgcaagtgggcaaagcaaatgctggtttaagtgacagacatgtatatcaactgttcctgatatatggtaactgctcaatcaatgtcatcaacacctccaccaccatcaccatcaacactaccatcatcaccatcaccaccaccaccattaccacaaccactaccaccaccaccaccatcaccaccaacactgtcatcactatcatcaccatcaccaccacgaccaccattagtatcaccatcaacactaccatcaccacaaccatcatcgccacaaccactactgccaccatcatcatcaccaccatcactaccatcaccaccaccaccatcaccaccattaccatcaccatcaccatcagcaataccatcactaccaccaccatcaccacaaccactgccaccaccaccaccatcatcaccaccaccatcactaccatcaccactattaccaccaccaccactatcatcatcaccatcatcacctctatcaccatcaccaccaccaccatcaccaccaccatcactaccaccatcacccccaccatcaccaccaccaccaccacctccacaaccaccatcaccaccatcatcaccactatcatcaccaccattatcatcatcacaaccatcactattaccaccatcactgtcatcattaccactaccatcatcaccatcaccactactaccactatcattaccactatcaatatcaccaccatgactatctttactatcaccactaccaccatcaccatcactaccaccatcatcattccaatcgacttaaaccataggacaatgcttttctttgggatgtggcatgtggctccttgtacctacctagcacttgcaggtagcagaagccgagagaccattccaccaggtctttcaaagctgtaggccattaacgctaatcttttatttacagttgttaccctaataaaaatcaatctgccttttgctcttctatgctttttctgacatatagagcctctacattccaaccagctttagtggcctgtgggtggtggtgggaaattggaatatgacaagcgggaggtgctgt

SEQ ID NO: 476541 - DNA, 723 bp, Homo sapiens
cttttttttttttcccctgaaaacacctttgggagggtatggccagagcgggagggaggcagcgggagcaaaccctctggagtcagccaggtctgagttccatgtctgtgcaggcaccggataattgtatgcctttaggccgtggcacttggaaggtgctcctgaagacagacctgagtatgtgtaagaacgaattattccgaggcaggaggaagatgaaggctcgtgctcccccacctcctggaaaggctgccactctgcatgtgcacagtgaccagaagcccccccacgatggggccctcgggtcgcagcagaacttggttcgcatgaaggaggcgctgagggccagcaccatggacgtcaccgtggtcctgcctagtgggctggagaagaggagcgtgctcaatgggagggctgcctcctatgaggaggcaggctcagaaacgagggcaggtacagcggtgacctacacccctgggtgggacagcagccacagtgtgcctcagatgccttttaaaaagtgatgtaagcattttattttaaaataccagtatttagattatagttgaaattacctaatcctttgcaactattttgttactttatcaaattaaccagtttataatcaaaattccaggtgacagtctaattggcaaaggggtgcatacatttttcaaaagtattttatgagataagtgaataaaaatttggggagcattgctc

SEQ ID NO: 476542 - DNA, 767 bp, Homo sapiens
gagggagagggagagggagactgcaaatccatgcgatgatggacctactggttgaactttgccttcagaaccacctgaatccatcccaccatgcccttgaaattcggtcttcagaaacccaacaacctttgagttttaagccaaatactttgattgggaccctgaatgtgcatactgtgtttctgaaagaaaaagttcctgaagagaaggttaagcctggtccccctaaggtgcctgagaaatctgtgcgtttggtcgtgaattacctgcggacacaaaaagctgttgtgcgtgtgagccctgaggttcctctccagaatattctcccagtcatttgtgcaaagtgtgaggtcagcccagagcacgtggttctcctcagggacaacattgccggagaggagctggagctgtccaagtccctgaacgagctcgggataaaggagctctacgcgtgggacaacagaagaggtgaggccccgctgcgtctcacgcacctgcccataatcacacggatgcgcggcgtgtacatgtcccctgttggctctccccagcactctcagtagcgccagggagagatgggtacatgaagttccaggcaagtcaagttgaagtaggcaaaaaagaaatctggcctgttttcattcctctggattgagctgtgcctcctttctcccagccctgaacatgtcctttatcctttgtctccctgcaaacttccacgacataagtaaaaggggaaaaggtgaggtgagattagagcttatgct

SEQ ID NO: 476543 - DNA, 517 bp, Homo sapiens
ctcctccccgaccctgcccttccgccatccgcgacacgggcctccacgatgaacacggccatctgcttctccatcagttggaggggacgccatggaaggacacatctccacaccagtcacttgttaatatcttatggggagactctggaagggcaggaacacatggcccttgaagaaagtgtgactggggaggaagcctggagcctggacagacctgtctttgaccacagcgacatggacagcatccatgggccaaggccttggaagccgctgtgtcagagagaagatggagggcaacaggacccagacaaggaagggcttagtggatggccatgggcaggttctcagtgcgctggctcccagctgttctctagagagggaaggccacacccagccacatgcaagtccagggctgacacagcttggaggtcacagctgccccagggctgcggagtcctgactggattctgagaggaaagccattcccctcccctctgcagtgccttctgctgtccct

SEQ ID NO: 476544 - DNA, 893 bp, Homo sapiens
aaactattcctttttttctaagcctgcccctggggtctggcagccactgcagcccggatggagccccgcaggtgctgtcagaggcggaggagaccgtgtcagttggcagctgttttgcgtcggaggacacgaccgaggactcaggagtgatgagttccccctcagacatcgtctctctggactcgcagcaggacagcatgaaatacaaagacaagtgggccacagaccaggaagactgcagtgaccaggacctcgctggaaccccagacctgggtccccagaagagccccttgtgggagaagaatggctctgagaactcacatctgaggtgagtcacgggaaggatgggtgggtacggaagtcacagccacatctgtgtctctaaagagggtcttttgtcatgggatccaacacgtgctatcacaacctgctctgcaccaggggccccgaccctgattcacagcagctgctctcaggcatgtctctgtgctgtctatacatctgcaaagaggaaagtgacaggaaagagactcatcttcagctttatgggatacctgaaatgcttatgcagttggcgggccccccagtgtctgcaaggtccccttgttgcacaccgatgccagtgattaagataagtgtaagaactcatcaaataaatattatggaaatgttaacagaaataagggacaggcttggcattcacatctggagtgaaccctgtcgaaagcctaggcagcacaggggtggtaaaggcagggctggcagggagctgcccaggcagcagaactcaggtgtggcccgatggagcaggcctgtcaggtggtcacgatccctacagtgaggacccatgcctgggggctgacagcccagactcaaggtgaacttgtgagagc

SEQ ID NO: 476545 - DNA, 3950 bp, Homo sapiens
cccatgaacaatctgcgtctccgtagttctgaggacaacagcagtacagtgagtatgtgactgcttgaatttgagtatgagctgttctatcctcagatattcctggaaaggagtacattaaatcaatagtaagagaaatgagtgctcctttctctttggtcttccctagaactgaaaaagctgtcacagcctcaaatgatgaagaagacctattaattgctggagagttccgtaaaacccttgcagaacttgatgaagacctggaagaaatggaagacagctatgaaacagacaccagctccctcaccagctccatccatggtgcatccaaccactgcccacaggatgccatgatccctcacggcgacacagatgcaatcccagtaacattcataggggaagtttcagatgatcctgtggattcggggttgttttccaatagaaacaacaatgctgggtctttcgactcggagggtgttgccagcaggagagactccctggcgccacttcaagctgagcacagccagccccatgaaaaggcaagggaggaagtacctgccctgcaccccgcttcccatgacgtcggaaaaggaatccgtgtggccttatctaacatctctaaagatgggaatctaatggaaacggcgcccagggtgacttcttttgcttcgaatcttcacacagacaacctaaatgcaaaagtgaaagacaaagtgtatggctgtgctgacggggagaggactcaagccacagagagagtgaattcccaaccggtgaatgaaaaggacagcaacgataaaaacgctgccttggcaccaacatcatggcaccaacgaggccaaaacccagggaaaagctacagacttaagcacggcctcacaacgtataaaatcattcctccaaagtcagagatgcgatgttacgacagagatgtgtccctctccaccggagccattaagattgacgagctggggaacttggtgagtcctcacgccaccggcatcaggatcatttccctgtcttcgtctgtgcctgaagcagaatctcagcccattgggaaagtcagagagttctggaggtgcaactctgtggaaaaacacctgggccgaccctcagagagctctgccaggggacccccctccacccctgtgcccacgcagacgcagaatccagagagcagactccaagcagaccccaagccaatatcgccccagcagaagtctgcccaccatgagggccggaaccccctaggggaggggagaaaccagccccccaccatgggcatgggtcacgtgagggtgccagcagctcacaccacagaagtcacatttctcaagcctcagagaagaacgtccagccagtatgtggcctctgccattgccaagcgcataggagccccaaaagtccatgctgatgtggtgaggccacacggttatgccgagaagggttatgcaggcaaggcgccagtgctggctgcaccacctgtcactgtgaaagatgacaggacatccagcccacactcagagacacaaggatggaaggatggtgcccagtggccctgtgtcactcctcccaacaaccacggggaagatttggcagtgggagcccctcctaggggggaggtcattggcccacacaggaagttgtctactcaggacagacctgctgctatccacagaagctcctgtttctcactggttcagtcttcccagagggatcgtgtttctgtgggacagagctgtggtttcagtggaaagcaaagcacaagtagccaggaggccagctcagcatctgagcccagacgcgcacctgatggtacagacccaccccctccacacacatctgacactcaggcctgcagcagggagctggtcaatggctctgtgcgcgccccaggccacggcgagccttcccaccctccaggagggtctggcacagaaagccacattctcctagaaagagaggaaaagcccagtgtgttctctacagatggaaatgaaacagacagtatttggccacccagcatttttgggccgaagaaaaaattcaaacctgttgtccagagaccagtcccaaaagacacatccctgcactctgccctgatggaagccatccactctgcgggagggaaggacagactacgcaagacggcagaacacaccggggagggcaggccagcgaaactgtcctacacggaggcagagggcgaacgatctgcactgctggcagctatccgcgggcacagcggcacctgcagcctgaggaaggtggcatcctctgcttctgaggagctccagagcttccgagatgccgcactctctgctcagggctcggaaagtcctctgctagaagaccttggtcttctgtccccaccagccattcccccaccaccccctccaccctcccaggctctctctgcaccaaggacggcctccaggttcagcacgggcaccctcagcaacaccgcagacgcaaggcaagccttgatggacgccatccgctccggcacaggggctgcgagactgagaaaggtgcccttgctcgtgtgaatgaacagaggccagagaattgcagaaacccacctgtaatatgcccacaggcgtcactcaaggagtctgcatagccaggaacatcaagttttggtgttactttcttgtctacaggccaaatgcgcacagttgattttcggtgtgttcctgtataacggcttgaaaggaaaggagaagatgctgtgtcgctgcgcagctcgtgtgccaaggaaatgtgttttgcctctgaatatcttaagttgctaataaacgattcttgttggcaggttaatgggactataaatgctggagcccagcactcacacttaattatatttatgggcaaagtaaaaagaatcatgccttagactgattttggacctttgagacttttaccacatacagatggatgaaactacttactgatttaagatcttttgaattttagaaaaaacatatgaatcagatggaacaatctgaatgtgatatgctccatgatgctgtgtgttttggtagtaagaaaaaaaaattgggaggcttttcaaaggtggctttgttaggtagtaaaactgctggattcttcttcctcaaatatttggggctaacacttcacagagggtcacagtccatgatctgaccaactaagcttttaaaaatcaactattaccacccagaaaacagtcctacgtgatcatgtggccagggcatgcccgagtcctgcaagggtggcgggtggctgaggtcacaccaccactggagtggatgggcagtgccccacatggacagccattccccaggctatgaagtgacataggcctcccccacggtgcctgtgtacggagcctgatgacttcactgggagccttctggaatcctgcagagggtcaaggagcagggatgttggatgcccacctgtcaagagttcagatcaaagttgcgctgagagcatcacaattttggttcagccttgacgcgtttgtccaacagctcattggctccctttgtatgatatcgtggtcttctcacatggtgcccagtcaccaatatttataatgaggtctaactacagcagtagtttttcatatatatctctaaaacattttgttatattgaaaaaagtaatagaaatcaagatgtgttgatgaaataaaatgtgtatctgagtgagaaaacaagtatggtgaggtcactttaatgtttcacagcgatctcagatctaggcctcaggtagaatggaagctgttctgcattcactgattaacgttgctaaactcttggtgaggcacgagctaccagccaattgctcttcatcacagctatctgtcttttagtgccacaaataaaagaaaatcaaatcttagctgttgtgtgaatttcatactacagttggtttggatacccctcttccaaaatgggaaggac

SEQ ID NO: 476546 - DNA, 1496 bp, Homo sapiens
gttcatttttctcctcctcaactgccaactctctacttgtccatatgcaattgtatttatttacttctgagattcctcttctgcttcactgtctgttggagaggagcagctggacaagaggcccctatcataaatctataaacatcgagaacactttaaggaccatcaaagccaagctaactgtgggttctctccccagcgatgcctatgctttatgtcatccatttattcgacaaacacattctgagcatccactctccttcactggaacaaagaagagaaacacagtcccagcctcctggaacttgggcacacggcatagctctgttctctgcaagaaccctcattctgtcctccctggcaagagcaggcgaagaaaagaggcttgggaaagacagaggaaggcatggtccctgctggctgcaggactgaggagggctcgcataaaaggatccacccacagtacactgagaagtgaggggctcaggcagaggaggaaggttttgggaatgtgggccacaagcaagtcagaattccacattttacatttcgatttatgatccattttgtattaaatgctgtctatggttcaagttttacatatgttataaaccctatattacattgttattatttttgtttgaacaatcagttatcttttcaagaaatttaaataataggaaaaaaatcttatttatttatatgccatttccagagctcttcactcatttgtgtggatctgtatttccctccaatattgacttccttttgactgaaggacttcctttaacatttctcatagcacaggtctgccagggatgcattctttcggctttggtatgcttgaaaaaatacttccttgtgttttagtttttgaagacattttcactgaatataaaagcctaggttaccagatttttttcctttccatacttccctacattgtcttcttgttcatagtttctgatgagacatctgcttgttatccatatatttgttctgctatacaaatgtcttttttctctggcacaatatatatataatatgttatgtatacaatataatactaatataatataatataataacatataatatagacatatacatatgtatatgtatattatgcttcttgaaactataccacaattcactgatggctatgttcattttatttattatttatttattaccttttctttctgtatttctttgtgtatctaattttgaatagtttctattcttcaagttcattaaaatgttcttctgcaatgtctaatcatctgccattaattctatctaatgtatttttttcatcccacatattccaattttcaactctagaattttaatttgggcattttttaatactttccatgtttctacttaattttttaaaacatataaagttatcatcctgtcttaatattcttgcctgctaatccaagcatctgtgtcagttctgtgttacttttcactgatggatttatatcatt

SEQ ID NO: 476547 - DNA, 657 bp, Homo sapiens
attccacttcttgggcgcagactaggaagctttcgtgcagtaggacagctgtgttggaggctccactgcctcataaatgaactccaacagcacagctgttagaacatttgctgttgttccacaggccacagaagcttttcttctccttcttcccctcctcctcctctgtcttccctgttttttcctttttactctctgccttagtttcaatcctttctattgctatgacttcaggctcattgatctttatttccttttttttctttttcacttatgtaatataagctgcaaaatagtggtgaactatactaaggggtatagccctctgctgagtgtggtcttttctttattttccaaaacagcccacgtagggttgagaacagtgcctgcatcctgtgtgctgtcagctggtgtagtccattgcagccatggccccacctcggcggcgcccctgcccaaccgaggttggcagggcactgtcccagggatgtgagggcgtggtgtcatctcatttcttggagtgctcatttgttcatatcataagaattaggtgttttaaggcattagtgctatgtgcaattgaaaatagtttctccagctgccagtctgctgagtcctgcagaccagctgttttccacgaccacagaattgaaattc

SEQ ID NO: 476548 - DNA, 875 bp, Homo sapiens
tctccatcctccgggctcttgggaagctctctggagctgctgggagcagttccaggacacagcacagagctgttccctccagcaaaggagcccatgtccatgtccacgtccactcatggacaaggtgacgtgcctcagcctcaccaaggggcccggtgtggccagcaaaggccccacgtgggtcaatttccaccgagcggccagataccccgggcattttattgatcctattgaccacggcaaatggccgctggacaccaattcagtgccagccccggctcagggactgccacacgtggtccatgtaactcagagttatcctgtgccatggttaccccacgttacagctgaggccactgaggctcgctgcggcccgcagtcccagaaagactttaccgcacctctccggcctggggtgtcctgggggatgaagctccaggaggccacctatggcttggggccccagtcccagaagcctggcctggggcgcacctctctggtcttcaggaagaggggcctggaatgagagtgggggcgtccagtggggcagcttaaccgggcagggctgacgggaccgcggcctggggagggaccagaatctgcctggcctcactgtgtgacttggggaaccgtgtcccaagcagggcccttcaccccatctctgtctgatctccactgcgtgtacggattgacgggaaagattctaatgggctttaagttaataagctgggaacgaattaagtttgatctctgccagaagcagatggcacagctgcccggcctggaacagcccggctggagcagtggcaggcggcaagggctgggtgggggtttgccccactgggctctctttatttttctctccttcccccaac

SEQ ID NO: 476549 - DNA, 1082 bp, Homo sapiens
tccttccccgccggctgcagctcttccttctcactgtaggctgggaaccaggatgcctgccttcctagaccccaacgcgagctgctggcctgagtccaatgggacagccctgcaggagttcgtgatcctgggcttctccgtgtggcccccggggctccgcgtgctgctcttcgtcctcttcttgccgctctacctggtcaccctggcggggaacctactgatcctgggcctggccctggtggaccccgccctgcactcgccaatgtacttcttcctgggggcgctgtccgcggcgcaggcagcctacacgctggtgctcacgccacgcatgctggccggcttcctcctgccctccaggggccaggctgtggacccctctacctgcgccgcccagatgggcctcttcgtggccctggggggctccgagtgcctgctgctggctgccatggccctagaccgctacctggctatctgccatccactctgctaccctcggctcatgaccatggacctgcccttctgccgcggcggcctggtcaaccacgtcttctgcgacctcccggccgtgctggtgctggcctgcgggtgccgggccctgcaggagcgcgtcctcctggtggcctgcctgctgctgctggtgctacccctgctcctcatcctgctctcctacacccgggtgctggtggtcatcctgggtgttgggggggtcgcgggccgccgcaaggcccttctacacggtggcgtcccacctcaccgtgggcccctgaacagccgttcccttgaggaggacaagctggtctcgctcatctatatcaacgtcaccccgctgctgtacccggccatctacacgctgcggaaccgggacatgcaggaggccctgcaatgcatggtcggccagaggacgctggggatggccaccaggggctctgtgatacgtgacgacaaacagaagaaatggtatgtggtgctgcagtgggcctccctggtttaataatatgttcatcttattccagttctgtatcacaaatacagaagggtataatttagcatagaaagtctccatagatcttctatatattatg

SEQ ID NO: 476550 - DNA, 657 bp, Homo sapiens
gatgtgtggtgcagaagaagagcttaactggcttttggtgtgagctcagctttattccaagaagaggatccccttattgctgaactttcccaggacggctgaagtacttggcatgcttctaaccctatgccccaaacatctgtttcccctgcagactgccagcttctttagggcagaggctttcccttctgcaattcccacctgggggacgttgatttattttgggcattggcagcagaaagtgcatcttgctgtggctttcattttggtgatatttgagctgcaccagcaggtggggcctgaagctagtttggctgccatcagccttgtttctggagggcctggaattcaggaatggctttccctttcagctccaactttcctctccccaccaaatgttgatttcaatttgcctggggtctgggtccatccagaccctgagggttccggatgttctccagttcccaaaccagcctgctctgtggcttctctgaagctgtggcttgctcatctcagcacctacgccatcaatccagctttctctggtggtcgcgctgggctagaagaggatgtcatatttggttaagtactttatatgtaagatgagtatttctcttgtacatattacattttcaatgggtttccaaccatttccaa

SEQ ID NO: 476551 - DNA, 664 bp, Homo sapiens
atatgaaatctgacagagctgctgccgctggccatgcggcgcccaagggtgggtggggtgtactctgtggctgtccgtcatcagcaggagacagctgccctctgccaggttgccggggccgaattctccctggcttcggatggcatggtccagggatgggaaaaggccctttccagctcagcggccaacgtcgcatccctgaggccgtgtgcctgctccggggaagacgccgtgcctgtagccgtttcgggctttgacttggacagcttccgggacaccgagaaacccatgtgggcgttttccagtattaacggcagcgtagacccccgtccagccgtccctgaagtgtccggcatctccttcgagggaggctgtagggtcctctcgtgcaaggcccaggcgcatcgtgacagcttgcacgcgctgtggttcggggaggtcttcctgcaggcactgagtcacaggtcaaaggctggctcagcctgctgccctcgcaaggattccacccacctggcttctgatgagtcagcactgccacctgaccccaattattctggggtcccatgattttcattgctactagggaaacctttctagaaccacgtcttgtatcgtctgctctggcttacagaggacagacactcctgagccccttgacagcacc

SEQ ID NO: 476552 - DNA, 556 bp, Homo sapiens
ggtattcctgtcttggtattcctggcagtttggtccctggaggtggccatgtggcatggacaggggcctctatgcagaggctttttcagcaactgtgctgtgctgccgccatggccacctccatctgagcctttgaggccagggctggctggacaaatgcccccaaaacagcacgtgtgcactcctccattggcagccaaccgggctttgctggagctgtgcgtgtgtgccgttcagaggcctcgttctgtcgcgtttctgcttgttgctgccgctagggagtctgccgcccctctcgtcacccgcccgtgggtgaccggtgtcttctccctggaggaatatctatctttcatcagttccataaaattctcagcccttccctctgcctctggcctctaccccatttccatgtcctccccgagcacctgtgagagggacgcaggtggcctcactggcctgcaggctcttagctttcctgggctgccctgttgctggccctgagttcacctcgccctcctctctcttctgcctgtccccacctgggtttagacacagg

SEQ ID NO: 476553 - DNA, 988 bp, Homo sapiens
gatttcaactggtttatttgccatgtgctttttcttattccaagcccagctagcgacagccagcattcattacagtccagcctctttaacgctccgtggcttccttgctcatgctgtcgtcctctggtacttcctgtccatccagtgtcttatggacactggcctgagaggcccatcaatgctgactgtgacgtttccagcacataatgcaattgacattcctgctctcaccaaggagcagggaacataccctaaagtcatcatcaactcaggcccattctatcttgctggtattgccatttttagtgccagatttttacctcatgggctaagatggctgctggagcttcatctattatgtcaacatccctctcaattccctctcaatggggaaaaaaaaaaaaaaaaagggtccgaaacacattgccctcatgctttaaagaccatttttggaacttatacgtgacacttctgtttacatttcattgaccagaacttagtcacatggacattcctagctgcaagggaagcttgaaaaacgtaacctttattccaggtagtcatgggcagagctaaatgagagtgttgtgtaagatcactgggaactgtcccagatcaaatatctggagaattctttcactttcaaatatttatgaacaatttttatagaaagacttcaacattaaattaggaagtactatcccaggaaggacaatctgaataggagataaatcacattgaactgcttcattcatgtcttaacacatctgtgcagagctgtgttaacctatcagggtgatataaggtagttgggggttatgggttaactaaaaaagttttcatggataaattttatccaaaagtaaacagacagaaaacatataatttgatagaataatggggtaggctgtttcaagaatgagcagaattagtctttggtgaaaccataaagtaaatatgctccttcagtgcctttgtggtaactgct

SEQ ID NO: 476554 - DNA, 642 bp, Homo sapiens
tgctctgaatatagagtcgcagagaccacagcatcgggcaaggttatggacgccagatgctgttagcagttcatgactggagcgactgaaacacagaccttagcgatacaccataatctggctcctggagttagggctcttatcccactactcatccatctactaaaaaaagaagaagaggaggatgacaacgacaacgatgacaatgatggcaatgatgatgaagaagaggaagaggaggaacaggaagaggaagaagaagaagaaggaggaggaggagaaggagaaataatagtggaggaaggagaagagggaagagaaagaggaaaagaagaaggaaaaggagaggaaggagaagaggaaagagaagaggaaaaagaagaaggagaagaagagaaggaggaggaggaagagaaaggaggaagaggaggaggagaaaaggaaggagaagaggaaagagaagaggaagaggaggaggaagaggaagaagaataagaagaaagaaaaaataaatgcatttctagtttatttcttacagttgtggaggctgggaaatccaagagcatggcactggcatctgaagagggccttcagctgaatcataatgcagaggtatggggttgggggcttgactgatatccc

SEQ ID NO: 476555 - DNA, 610 bp, Homo sapiens
tttctttgagtttccatttctgaaggctcctgtgtcatgtaaaatgtatacagtattgaataaatttgggttgctgcgaaggggaagtctttcctgcgctctgccctcgtctgctgcttctgtgtttgcttgtgaaactgctcaaggtccccctttcaattccgctctctggattccagtgcttttccagtttcaatttccactgagaaaaaaacctcattccgtgtcatattacattaggggcaagaactgctttgggggtgtaaggggacaaggcggggggcctcacctgaggcgcaggccagtgaggcgggaaatggcgctctccatcccaagacagggtctgcgcctgcttccggcctggtggacagcaccttcatcatcgccgccatcgcagagccgctcgctgcactttcccctctttcctgagggttctctcccggctccagacagagtgattaatggccccttgggccaactctaaaagactgaggagacaaatatacctcatccatggggaaacaagccccgggacatatattatctaggaaaaatgagcatcaccacaaacacgtgagttatgtctgtgctatgacgttatgatggctac

SEQ ID NO: 476556 - DNA, 636 bp, Homo sapiens
aggcctcttttctgagtttctgagtactatatttgtatatcaatgtgcttacttgacatcccaaagtattactgctgcaccatgatggtactgagcttggagaatggggtggactatgcaatggaagagcgcattggcagcagttccatcgtggggttcctggtctttgggtggagtggaaagagaaaatctcagatggaagtggaagggaggtactgggaggctaatgctccttcccgccctgctttccgtgctcagagtaagttctgcagcacagttgggcctacggacaggattcctcatcgtgacagtgtgacttcagtcgggaaagatatctttaaacattttcacatgaaaaatcttgacctaaaagaaaaactcaaattccataagcttgcattcaggtcttccataatttggctccgatgtacttcttcattaagaaatcatttctttgagatgagagagtacctgcagaggactgagattgtgggccctggaatcaaacaggctggggtttgatctcagttttgccaactacgggctttgtgttattggcaagttatcttacctttttacacctgtttctttgtctttaacatgggggttatagtactgatgtcactgggttgttgc

SEQ ID NO: 476557 - DNA, 796 bp, Homo sapiens
cgtcgtcttgcagactcctccacgttggagacgcaaacctcaggcgtaagcatggggaagatgctcagtactaagtgggcaggcgccttctttgcacaatgcatagctcttcacataaagctctccccacttcacttcatctctctgaaaggtggtgtttttggagaaaagggcccatgtgaagagtcacttacatttctagcagtttctcctctccccggccctacctcaccacacagccagttgttccattcctgtctcatttctgacagagcagaagagctccctgatctgcccaagaggtggtgcatgtgtgggatgacccggacccgggatgaaggacgagaagacaaaatgatggctgaacccactgtggatgcatctctaagctcaaggggtggccaaggagtggctatttccagggggatgtggcctgagtctgggcttgcaggcttgggtgtctacatgtgtccttggggtggaccccaagttcctggggaacatgtgctttaccaagaagcacaagaagaagggcctaaagaagatgcaggccgacagtgccaaggccgtgagtacatgtgccaaggctatcgaggccctctgcatcatcgcagcagtcagcttcccataattgttgaagatttcaacctttaagcagctctgttctatgggatgaacacccaagcctaccacagtcgaggtagagagaaaatatttgattggaaaaaggtaagtttcccctttttagagccatcagacaactaataaacagtcatgaatgtcttctaatttctcc

SEQ ID NO: 476558 - DNA, 1046 bp, Homo sapiens
gagtcaccactgcccttgctttcgacaagcctggcatgaagaaatgaagggggaacagtatggctagagtacacgcagcaaggcaggacctattggaaaatgcaggagagataccaacaggggccagaccagggctttgtgagcctggaaaaggatgcacggagcaagcagcaaccccacaattacatgcacgctacatgagcagttctcagccgccgcggaccttcgcggtgagtgttacggttattaaagatggtgtgtctggagataatccttcagctgttcacatgtgcccggagtttcctccttctggtgggttcgtggtctcgctgacttcaggagtgaagctgcagaccttcacggtgagtgttacagctcttaaagccggcgcatgtggagttgttagttccttctggtgggttcgtggtctcgctgacttcaggagtgaagctgcagaccttcacagagtaaagctgcagaccttcgcagtcagtgttacagttcataaacgtggcgtgtccggagttgttcatccctccctgtgggtttgtggtctcgctggtttcaggagtgaagatgcagaccttcgcgagtctgaattcttttaccaaattatgtctatcatcaaaacaaatgtctggtgcattttgtgctctaacagggctgagagggccagatctaaggaaggatgtcctgggcctgaaggagcctgggccttgcctgccctgctgctggctgggccttttggggtatacagagttgtctctcttgttggagccacgaatgagacagctggaaaacacacattttatttcatctgtgatgtcagggctgctgtgctttctcccagtcctgtttcacgtatgaccctcagagggctgcttagagaatagtttattctcacttattttatgtgctgggcagaatttacatcttgtaaaatcagcatcaaagcctgctgtcaaacagcttatgttttctcttttccaagtcttgtttgtgtgtgttgttgttgttgtttgaaaaacccaagttttaatggtatt

SEQ ID NO: 476559 - DNA, 607 bp, Homo sapiens
tctactggagagtaagctttctacattgctagcaagtcaacattgatgataatgtggaaatcgtatggtgttgaaacaccaaccctggttcttcttattcatatgatctgggattccccgtgtatcttcagcaaaggaaaaacaaaaggagaaataaccagacttctgctgcttgcaagaaacaaaacctgcagtcaccaactgggctgctccagtatttcaaaccattccaagaagaagaaaaaaaaattaaaagtgactccacggacagattttcctttcatcagggaggtagctggggatgacaggagagacggacagtactcacatacaaatgagtgctttgcctcggggctcacacagttggatagagagctgatgcagagacagaaattcatttcccatgagaaaggagagaagtgcacagggaacagggtcacaccagaacaggtgataatgaaattagagttaatgaaggctggaagaaacctagagtggatgggttggtgaaactgttatctgagatgcacactaaaaccagggatgatatctcagtacgggggaaacaatggttggagatgcatggtagaaaagtcctgggaaatat

SEQ ID NO: 476560 - DNA, 730 bp, Homo sapiens
tttgagttcattatggtagagccattttaagcctcatggagaatttacccagtcataaaaggcattgtagcctcctccttgctctttatcttggattggtcactctgggggaagccagctgccatgtggtgaggacaattgagcaagcttatgaagaagttcacatgaaaaagagagacaggctcccttatggaatttacaaaccagaatggaaaacagacatggaacaagaaactgccagcgtgagctgcaccacactgtgggtagcattagaagagaaagcacaagactgtgtggtcagaagagaaggtcgtacttctgttgaagttggccctgctaaagagcctcctgataaaagaaatcccacgtgtgaactgaagcacaggtctctgagtccaggaggccatgggcacagctaccatgtgaggctgcatgtggctgtgtggtttgtgcactgcacagaagccatggctgataggactattaatagctcgtgaaccaggactggtgcctggacaacactttgattagtttatgccatccagcctacatccccatgccaatgatgcagggttgagctagaacttgcactgggggagccgctgacagaaccaggttggacatctcacctgcaaagggcctactcattgactgactattaatctatttaatgagacacagcacatgaaagtcagcctgattgggagaggctaatctctggaccaatcag

SEQ ID NO: 476561 - DNA, 493 bp, Homo sapiens
gagaaaccccctacaatgcacgggacagctttccgcaacgaagcattatccagcccaaaatgtaaaatctatgaagaattcatattgctagaatgccttgcaactagggtgtacctgattgacttggcttcagccaactataacacccatgagaggcttgattcagaagtaaccatcatgaagaagtggctgggcaggcgtatggaccttctgtcaagcacgagggcaaaaaatgttgttctttctggaacaatagtgttcagtgctaacagtcatggttgcccatcagcagtgctcatgtttctcaagggataccttagtgtaattgggcattacaactgtgcagcctcaaaatctggctttcttatcctaatgaactttaaaagtagaccacatcaggagaacagtggccaagctgccaatattgaaaatgctacctgcctgtggaaatgagtgcatttttgtcatgaagtcattggcagtgttagtgttc

SEQ ID NO: 476562 - DNA, 1041 bp, Homo sapiens
atgtccctgtgacctgtcactgctgtgagaacctcaacctctactgtctgggaaggatggctatcttcagctggacaggcttgcaaatcagctcctggaaaattagaaattggtgtcgaagagtaggagaaacacaccgtgtgtggcataacaataatagcttacacctacataccattttggagcttacaatactgtttctcaatggttcctgggagacttgcctcattcaccaggtgaaagctcaaatgcagacttctgtgtcataccccacacctgatgaatcagaatctcagtggagtttagcaacagccaagagtgggaacgagggtccgagatcaaggcagggggtaacacactgcgcaaagaaagaaagagtgaaagaggatgccattttgaatgtagatggcttagctcttactcacagacatacacactcatacttaactacaatcactcaattaactgctaaaccttatgaaggaagtagtatttgaaaaacatttaaaatatttaagaggatatttaaataaatacttaagaaacagtctatgaacttgcatgaagaactctacaagtacaatactttccttcggaaattaaactttgaaataaaagatagcattttaaaatgtgacttgtatatgcctgcccaaagtcctgataggtattttatatcataaagaattgggaaacagtaactaaaggcaaataatagtgccttgtttcaccaggaatttgcatattgtgctaatattaatgtaatctcttagaaaattctcatctaaagtgtgaggtttcttattaaaaaaaatttcatgggttcatgtagaaaatttttcatgggtctctttatttaaacattttaagttcaattcctcttcagttatatcttagccagtggaatacagataatgcattttgttcttctttccccagaaactgaagtgtttactcttatggactcagaggggcttttcaagttacttcaatttttacagctcttttcatatcccatgtgtggatttactgtgaagactt

SEQ ID NO: 476563 - DNA, 1186 bp, Homo sapiens
gggagttcatctatcacactgttaccagtcacacaaccaggatgtcagctcagaggctgtattgcccttaatgcatgcacaccttgctgcttaacacactatgtaccggagatgaaagtggagctgccctggatttggcagattgcagctctgacacgtcagcccctctgagaccatttgtagccatctctaagcaacctacaggaaacttggaggctgcaataaacattgagagctcaagcagctgccagaagagtggaagtcagggacatttctcatcttcagggagaggactgctgcgtgtgctagagaacagggaaactggaatgtgtggatatcacacaagggaggggacagcagcccaggctgtacacaaccatcgatgtagccatagagccccaccttcatgtaaagagcaagaaagaagagcgtgggaagcaaagaactttgtctctcttgctggtgctcatgggagccaggatcagcatccatatatggtcatgccaaactaaagattgatggcaagacctagagaggaggagacagtggcaggggtgagttgtggagggaagggcataacctatatcactggtagaaatgtgaatttcttcctggttacagaaaactattctggaaatatctgtttaaaacaatacacatacctattgacctagctatctcctctgggtcttcatcacattatagaaataaaagcactggtatataagaatattagaagtttagagtaaaaaaaagtttagagtaaacttagaactaagaattttaggaaagtagaagaaaaatgtttattatagcattgtttgtaatgacaagaaactgttaaatatcggaatacttgtgattagaagaatggttcaataaactgtggtatatttatataatgaaatgttatggagctcttaaaaagaatgagctatatctagattcattgacttggaattatccccacagtgtactgttagatgagcaaaggaagacagagaaaaatatacagtatgatctcttaaacaaaacccttagaaaagagtcgataaatgtacatcagtgtatatgggaaactaagaatatggaaaaaggtgagaagaagatacatatgaggctatttattttggtttctttggtagggttggaaaagaatccctgttcttggtagccttactaaagt

SEQ ID NO: 476564 - DNA, 764 bp, Homo sapiens
gggagttaacatgtacagaaggaatggtaccagctcctccttgtacctctggtagaattcggctatgaatccatctggtcctgggctttttttggttgccttatccaggccagaaggcaacagcaggtcagtggttattcatggagggaacatccggtcccacccactcacggctgttgagtggcaactctacatattcttggtactctgcttaagcccactttacactgagaggcaagcccaagtccatgcatatctgtggaacataacctctggccctacccacccagtgtgggccaaacagcaagcccagagatgttacccagcctcagtgccctgcacacagcatttctcaacttcagattccagacaatattgcccagccatggagacaatattcatccctgcccaatcagaaatatttacaggacctagccagcagctgtgtgatggcatagtccagccagtggtatcaccagaacatggagcacagccaacaataccacatgatctcagagcacaagaagtaacccagcccaactagagaacctaacaccaaggtttgcctgtacagggttgctaccagttagcccatccaaaatcccaagcttgactaaagggtaaaggtctgtaaattccaaagaacacctgcaaatgatgaaagaggtggccatcttctcaaatgtgcaagcattatgtaaggacataaggattatgaaaaatcagggaaatgtgacaccatcaaaagaaatgaataaagttct

SEQ ID NO: 476565 - DNA, 573 bp, Homo sapiens
cagcagtatgctcttattggcccagggatggcaataacacaagcagcagctgatacggctctccttcatggatcattgaattacactaagtgttttgaacaaagtcagtttcaaaacatactgctttcctcccaaaccttggaatttctcttcataccaaagttccaagagcctatgctagtaggaagagaatctccgaatatgggtcattttggttccagacatcagcttcttcatctgtggatagtcaagttatttgaaagagattgttccaattctcagctgctgttacgggctgagttctgtcctccaaattcatatgttaaagccctaacctccaatgtgactatattcggatatgggacctttaaagagggggagccaatcggctgtcagcctccaaagagtgcctgctcatgggatggcaagctggctctcttgcagagcgcaattaaagcatctgccaggaaaagattgttttgaggcaggtatgcatttgataaattggtgttgtgggcatcccatgccaaggtttcagtgtgtctcagggttacctggtatttaaaataaact

SEQ ID NO: 476566 - DNA, 768 bp, Homo sapiens
gctcccagactgagccctgtgttcgttcttttttttttttttcaggcatctggctctggttccaatgggtgtacagttccaagaatgtggagggaccctcttcagttgtgagattatgaacccaaagttcaaggtcccaaagttttgttgcagtgtggatggcaagagcagtctttctctgatgttctcagaagatccaatccatgccaggcttctggattccctttctctgagcagccctactgagcctgttcaccacactatagccgtggaggtcaagctgcaagacaaaagaaaatctttgttgtttgtttgtttcatggaaccacaggcaacagtctctcagttttgtaagatgctgtccaaggggttgcatgggatgggtcctgtcatctttaatccattcaaagtggataaaggagtttcaacatgtggactctgggcaagatggttgccctgggtaacagaaaagataagaaaaggaaaagagagaaagggaaaaaggcattgcctgtggcagggtggggaagatgtaactaagctaaaaggttagcagatttaatttttgtaatcaattcgtcgcttaagctttatacttgcctttcgtaaagtctttaaataaaaatactgaaatacttttagaagcttctgcatatcaataggcatccctagatgaaactaatctgggagccctcattttcaaatgcacttcagtgttttgttgttcatttggaacattccactataagttatccttagtaagatttt

SEQ ID NO: 476567 - DNA, 732 bp, Homo sapiens
tgggccggaaggagatgtgagatggagctggtggctgctgaagaggatgttggaatcattgttctttgctggggcttcaaagggggctgctgccagctgcctgctaaggttgaaacagctgccaccaaaaaaggggccagcccttcctgcctcatctccagaggatgcaccagctccagcctgcaggtctgcctccgggccctctggctagagggggatggcaggcttccagataggcctttgagtagttctgtttatgggaggctagagggagaattcaacagtatggtgaggggatccgggatatttccaagtgtaaaagccaaatccatgagtatggcaatggaacacatcctggtatcagctattaatcaagacaggaataaaatgggcagcagtggttctagaagcaagggcactcttctttctgtgggagagtgtgggaagaagctggtggtgttgagccaaggctatttcatgcacaatttgtctatcttgggctaggtcaagaagttatgccttgactaggaatggtttgccagagttgaaaaatactgtagaagtcactgattggagagatgaagagagtttgtgttgccctcttgcattttctaaataaatagaaatcacaaatatatgcttttaatttggaagcttcttcttttgctgtgttttatttttgttttaaaactcaagtgtattggttaaattggtttacttcttaagtaaatc

SEQ ID NO: 476568 - DNA, 624 bp, Homo sapiens
gccgtcacactttctgcataaccactgagaatgagagcttcagcctgtgtatgcattaggtcctacaaaaggaagacagatactgggcaaggatcccctcatcctgatagaatggtttgggagccttgcaccaaagtttctcttatttgttttgatttgttctcacctttacatagggagggctgtcctgtgacatgtgctgtggggagatgtattgaaacaacagccaaccctcttgagacatattctcaaggtataggtatggagggtatagagggtggcagatgtgaaacactcaataatgctgaacgaataagatccaccccgttagatgcaatagaaaaatgcaaattaaattgtagctgtttggaaatgagaaatgaccaaactgtcagaacaccatgacctttgccttatatctgttcctgtggagagagatctgcatctattgcagaagctggtttcccagtacttgcattcttatagctgatttattgagaccgaacaaaccattaaaaaaattatgttttaaccacaggatgtaaggaagatgtaaagtctaaggtatgtgtttctaacgtaggtactaagataaataacactgactgagttcctaatgtgtat

SEQ ID NO: 476569 - DNA, 1256 bp, Homo sapiens
cgggagtcattctctcctacttgagaactagccatgcaaacttttggtgttcttacggagctaaagacttgccaggtacatacctatgggttgataatgggtggcagtaacagatctgctgaagcacagaaacttgctaatgggatcaacatcattgtggccacaccacgctgtctgctggaccatatgcagaataccccagggtttatgtataaaaacctgcagtgtctggttattgatgaagctgatcatatcttggatgttgggtttgaagaggaattaaagcaagttattaaacttttgccaacatgtagacagactatgctcttttctgccacccaaactcaaaaagttgaaggcctggcaaggatttctctgaaaaaggagccattgtattttggtgttgatgatgataaagctaatgcaacagtgaatggtcttgagcagggatatgttgtttgtccttccaaaaagagattccttctgctctttacattccttaagaagaaacaaaagaagaagcttatggccttcttttcatcttgtatgtccgtgaaatacccctatgagttgctgaactacattgatttgccctacgtggccattcatggaaagcaaaagcaaaataagtgtacaaccacattcttccagttctgcaacccagattcaggaacactattgtgtacggatgtggcaacaagaggactggacattcctgaagttgactggattgttcagtatgaccctccggatgaccctaaggaatatattcattgtcttgagaaattgattgaaaagaactactttcttcgtaagtcagcccagaaaccatataagccgtacatacaagcctatgattaccattctctgaaacagatctttaatgttaataacttaaatttgcctcaagttgctctgtcatttggtttcaaggtgactccctttgttgatctgaacatcaactgcaatgaagccaagcagaaaaagcaagggggtggtggtggatttggctaccagaaaatcaagaaaattgaaaagtccaaaatctttaaatacattagcaagatatcatccgacagcaggcagttctctcactgaagacatgcctttctttcatcttgaataactttatcctaaaattaattttttccccttgatttaacaggatttttgtagcctttagaatttggacttatctaacaagagtatgaattgagttgggttccaagcattgagcactgttacttctatcaagc

SEQ ID NO: 476570 - DNA, 1112 bp, Homo sapiens
agcaggccattggcatacgtgcaactgacagctggggacgaaagaatgcagggtcatgagtggcagggagggaatgtgaattcaagccacagtgcaataccactatgtggtatgcaggagccaccagaatggctaaaatttaatactgtgacttccaaatatgggaaaaaatgtggagcaagcgtcaggctcatcaatgcagaccaccctgggcaacaaactgagattccatctctccaaaaagaagaagaagaaggagaaggagaaggagaaggaggaggaggaggagaagaagaagaagaagaagaagaagaagaagaagaagaagaagaagaagaagaagaagaagaagaagagaagaagaagaagaagaagaagaagaagaaagaagaagaagaagaagaagaaagaagaagaagaagaagaaaagaagaagaaagaagaagaagaagaaaagaagaagaagaaggaagaagaagaagaagaaaagaagaagaaaagaataagaagaaaagaagaagaagaaaagaagaagaagaaagaagaagaagaagaagaaagaagaagaagaagaggaggagaagaagaaagaagaagaagaagaaagaagaagaagaagaagaaagaagaagaagaggaggaggagaagaagaagaagaagaagaagaagaagaagaagaagaagaagaagaagaagaagaagaagaaaaagaagaaaaaaaaaacaaaacagccaggcatggtggcaccatataattggattttaggatatgctatcaccctatatttcttccctgagatcaactaactctttttttttaaatcaattcttgttttagccctcatttgggttcttaaactttgaagttttacttttatgtgtctttttatgtctccaatagattgacaataaatagtggtttcaattgtgttacaattttcattgacttcgtaattatttgttttattaattattcatttggaagaatttttcatttttttatagtagctttgtatagaagaaagttgctcatacctatatatttgattgactggcttggcagattggggtggtgttattagtcggttttcacactgctgataaagacata

SEQ ID NO: 476571 - DNA, 1281 bp, Homo sapiens
gacggtggagtgggtgagctaattgccggagctgctgcagacactgaggccttcactgctgctctgcaccagatgtgcaaacagtaataaaatgggcgatggggccgattctttgcacgccagtcctgaaacaggctttcctctaattgattttcctacttcatgtgaactcaggcagctgcaatttatatggagtgtgttcctggatgtggtgccgtcagagctgcacacatctggtgagcagcttttggtttgggctgtgaaagatgttcccaatcccttaagtgttcactcctcacggctctccttacccaaagcagctgctttttccacagggtcaagctgcgttaccttcgacaaagatgtcactagaaatggctctctaggaagtcaccaagatagagtctgtgcgggcagaacccagggcaagcagatacagaaggaccagcttctggttcttctcaacagtcaggacggcttccacagcatccaggcttttacacccctcatcttggggcactatctacatatcttagaagagggtgcagccaccgtgccaattatgcaacttcaagagatgctggggcagtcccctgtagtttgatatctttgaatgtcaaaattatttagctattctaattagcattgcaatggaaatcttcattgctacatccccaattattgtggcaaataactagtaacggaatttttaagcaataaacaatgcacccttcaaaatgtgttaatatttgttatgatctagaaaattattccttcttcatacatacctgttttgaaaaacacccagcctcgtattcttcatgaagactactttgaatgaacaaagctattattacaacctcttggtcctaacacaacttcatcaatttttaatctaaactgttattcacttagggtacaaataagaatgcttttatgtgcttatgctagaatgcattagtgtattcaacttatatgtttatctctgtttccactttttcatgattagttcaatgctatactcatagtggggagtcagtaactcatctttcatgaatctcattcatttggaaaataacatccagattgctcatgaagaaagtcttgagcacatcatttaattttaaaatttcctatattatgcttggaaatgtgtatcttaaaggaagctagacagtgttttctccacagaagagccattattctgggaatgagtgaaattgtctggttatttgcaagagaagccttaaaattttgttttgttatttagctttaggggag

SEQ ID NO: 476572 - DNA, 566 bp, Homo sapiens
ctctctctctctctctctctctttctctttcttccttccttccttctttactcaatatgcaactaatttatgaagcccgtttagaccacaacaaccctgatgcaagatggctccccttcaccttccaccatgagtggaagcagcctgaggctctcaccagaagccaagcagatgctgatgctatgcttcttgtacaaaaggtaaaggtcaaggaagctctgcctgagtggttgcataatgaggatctcatacacagtttgggtgtaaaagttctgttgggctatagtcatcagtcagaggcacagttagcacggattaactggttgtctttatggcagaatgtcacttgttgcttttatgccaaagtagatgctttgctgcactgcctaaattcactcctcgagcactcatttccccagtcactgaagaatggtacagatgactctcagcccaggaattgccctaaaaaaagcagttttgcctcatattataccctcatgatgtaggccacattcaatcactggacaatgtggggatataattctgatctcctttgccctattaag

SEQ ID NO: 476573 - DNA, 837 bp, Homo sapiens
gggaagcaaacagaaagaaatgtcaatgccccttacaattgaggtgaacatatccctgtttgtctaccttcatacaattaccaaaaagttaacaggatcaaataagaaaacatatgcatattattctcattctattccatataaggtagacctgaatagtatcttaattgaggaaataaatgactgtgaaatgcatgagattcggaatctgattgggcttccaaggttcttggcttgccagcattgtgatgctgtagccctctgggtggacatggaaggatgtcagcagagttccagacatgtggagatgcagatgactaaacagaaaatagaagataaaaaggtcaaaaagaactattcggatttaaaagatataaaagaacaaagcacagcagatttctgactggggtcctgtatttgaatcttattaattcccttagtctttgttatccctaattatagagctgtcaatctcaaaacccacaaaagagggaaatttgaaaacattctggatttgtattatactattgaatgcattgtgggttttttcatgtagctggaaggagacagctttaaatgaacttttcacagggaaaaaataggctaattaatattccattgtatgtatataatacaattctgtatccattaatctgttaacagaccctttggttgtttccgtatcttggctactgtgaataatgaacacacaatgaacatgggcctgcagatatctcttcaatggactgacttcatttcctttgtatatttatatctccagaagaaggactgctaaatcatacagtagttctatttctaattattttagaaactgcc

SEQ ID NO: 476574 - DNA, 937 bp, Homo sapiens
aaacttcagcctagatttcagatgatgtatagaaacgtctggatgtctaggccaaagtgtgctgcagggtcagaaccctcatggagaacctttgctagggcagtgcagaagggaaatgtggggctggagcccccacacagagtccccactggggcactgcctagtggagctgtgagaagaggaccactgttctccagaccccagaatgatagatccactgagaacttgcattgtacaccaggaaaagccacagacactcaatgccagcccatgaaagaagccaggagaagggctgtaccctgcaaaaccacagggacagagatgcccaagtccatgggaacacacctcttgcatcgatgtgatctggatgtgagacatggagtcaaaggagatcattttgtagctttaagatttgactgccatgctggatcttggacttgcatggaatatttcatatcaggtagatcctgtcactagtatcacacttgctataaagcatattatagtctttctcttctgcaaattttgctcatgctgttgttatgtgtcttatgatggaaagacttccaaagggggaaagcagttttcttcatgtcaaatataataaacccaaaccagcgccgctttgtagtttccagtgcttcaggttgtaaatgccttatgttagatttgttgctaagtggctcatacttttgttgcttctgtaagtgaatgttaatttcaattaccaatcatacctagtatatggaaatgtattttatatttttatattcaccttgtattctgtaaacttgctaaattcacatattagttccagttggatttttgtagattctctaagttttaatacagattattatgtcacctgtgaataataagtgttttactttgtcattttcaatttagatgccttttatttccttgtgctgacttaatc

SEQ ID NO: 476575 - DNA, 464 bp, Homo sapiens
accagagcacctggcacgcagtggatgatggatacctttctgctgaatgagttaatacatacatacatacatacatacgtttccccagtggttctcaaagtggggttcctggcccagcagcagcatcccgctaggaacttcttagaaatgcaaagagaaagtgtgctgatttttgtgacccaattagaaatacgcggaaatagtcaaaaatcatttggacagtcagtgaacccaagggtctttacaccatcacaagatcccacagcaggctgtctgcaagctgaagatcaaggagagccagttcaagtcccaaaactgaggaacttggaatccgatgttccagggcaggaagcatccagcagggagaaaggtataggctgggagggtaggcctgtctctctttttcatgtttttctgcctgctttatattcactggaagctgattagattgtgtctaccagatt

SEQ ID NO: 476576 - DNA, 1274 bp, Homo sapiens
actgtgttcttattttctgagatcaatgttttcgatgttttaccattatgtaggatatttgctgtactcatttgatagatatcatttgccagagttacccataggggtgtctgcaggcctttttgacatttgcaatgatatctttacaccacaagcagagaaaaagccaaaacaaaaacctcagtgtagaaataaactcactcacggatcaggaacctggaaagttaaaggaggggatcgaacagcatctggaatcactgtgggtctggctgttgccctattccaacatgacacagttactatatctaatcaacacagcagtggggcttgccaaaaacctataaaactaatggatttgcaagaaaattacatcaccttcaaatcaatgctggtaacacaggtggcatttataaaaagtaaagaaattgacattaacacagcctgtctctgctgcctgccaatgaatactccagctttgctaaagaaagatcttctctcttccaagaaaagaattatatttaaatgcctgaacttaaatctttctaaaatagcatagtagaaagaaccagtgactgttgtaaatttgatgccaatcaatagattgaggatatgtgggtataaatattatacggatatccctgtcctgcaatgggtaaatactctttagagtccatgattttttttcctataaaaattaattaattaattaaggaattcactatttaattcaaacaacactcacccctcactgaagaagcctacagaaattgcattgcacaatataatgaaaaagcagctgaagactttttaacctgtggctgctgcatgcataacctctgctctggggacctgcattacttggcagatggaattaaaatcctgataagtgatataaaaggtttgtaagggaggaaattggtgtgtggtcacattgtctgccttaatccccttcactttgcactacccggcttgttgttaaaaccaatccgtgaggaatcattttcaccttgaaaactgcagatgtgcacgtgaagcctagaagaaagctctctggaaaatgctttcctgagtaagcctggagaaagaggaagtatgtgttgaaagcacacatacacacatgtatacacatgcgagagtctgtgcttatacctcaccatcataaaacagctatgtgaaattagcatatttccagggaagaggtatcatgtgccatgaatttaatcagctacaaatctactcaagcatagaaatggctcatctgccactgactgaac

SEQ ID NO: 476577 - DNA, 646 bp, Homo sapiens
acagctcattgagaacgggccatgatgacaatggcagttttgtggaatagaaaggggggaaaggtggggaaaagattgagaaatcggatgggaaaagcagagctgtacgttttcaatgtgttgaagtgtgtgttatttggggaagtggctgcagaggtggaacatggatttccatttcttttggcttcctttttacaattgatcatatttccttggaatgcttctccccttttctcaattggtgactctttttcactttttaaaaagtcaactaaggtgcaactttctgtaggaaatcctaatcctatgtcacagtcaaaagaaagactatgggtcacggtggaaggaagaaatggcgaggcggctttatatatctgtgtgtgggaggaagctctttccattaataagcaggcctttaatctcctgagcccatttccccagcagtcaattcacctagaaaaataaaatgtcatttaattggcagaaaaattgcttaaattctgtgtgacaaactcaaagaaatacattctgtacatggaaaagcaaagagaaaaggatacaaattaaatgttaattataaaggtgattaaaatgtaataatatacaaaattcagctagttccttagtaactgacacaaaattatat

SEQ ID NO: 476578 - DNA, 707 bp, Homo sapiens
ccgcgcctggagtgcagtacacctggcacccgggactcgccatctgctcccagctaccgcctctcgggccaggggtgtgggcctggagaaagataagagtaccgcgtgggagtggatggcctggcgtcaaccgcctcaatgaactcagtcaatcaacgtttatggtgctcctactgtgtgccgagcgcatcctcggtcccctccagctgctgggctgggaaactgcaccatctgttcataggcctaagaaatgagatagaaagtaacacgagaatactggggaacttcagtactccactgacagcactagacaggtcatcaagacagaaagtcaacaaggaaacactggatttaaactataccctgaaacaaacggacttaacagatatttacagaacattctacccaacaacagcagaatattcattctattcatcagtgcatggaactttctctaagatagatcatatgataggccacaaaacaagcctcaataaatttaagaaaattgaaattatatcaagcactctctcagaccacagtggaataaaactagaaatcaactccgaaaggaaccttcaaagccatgcaaatacatggaaattaagtaacctgctgctgaatgatcactgggtcaaaaataaaatcaagatggaaattaaaaaattcttctaactgaatgacaatagtaatacaatctattaaaa

SEQ ID NO: 476579 - DNA, 582 bp, Homo sapiens
ctgccagcacgctgtcacctctcagtaacatagacacaggatgtattgaaactatggaaaagacaaaaaaagtagttaaacgtgtggattcatgtgatgactacgaattgttaagaagcatagtggtcagcattgttgtgaggttaaaacccaaaaatatgtatggtcaccttatccatggtcaagaaaatgttaaaccattctcagctagtgctggctggtttgcatgtttcaaaaagcaatgctacatggaaaatgttaaactggcaggcaaggcaattaaaaaacatttgccaactgtcatacagaaaaagggttatgtacaacagcaggttttcaaaggcgctggtgttggatggtggtgtattatgaatgcactgccttacctgctgaacatctctgcatccagaaatttacttagagataaagagaaaaccaaaagtattgtgaagaggcttccgagaaagagtgaagatggaaagaccaagcacttgtcatgatcaatgtaataatcttgttatgatcaatatgtctacatgattaactcaggtgactatggctcaggtttgctggaatctcagt

SEQ ID NO: 476580 - DNA, 741 bp, Homo sapiens
caaataacaacaataaaacttcgaatactatgttgaataggagtggtgagagaggacatccttgtctttgccggttttcaaagggaatgcttccagcttttgccattcattatgatattggctatggtcaggtccctctgctgcaggtctgctggagtttgttggaggtccactccagaccctgtttgcctgggtatcaccagcggaggctgcagaacaggaaagactgctgcatggtccttcctctggaagctttgtcccagaggggcaccggcctgatgctagccagagttcttctgtatgaggtagctcagagctcgagcgctgtgctggaagaatcctccttgtcaggacctgctgctgtcttcagagctggcaggcaggaaggtttaattccactgaagctgagtccacagcctccccttcccccaggtgctctgtcccagagagatgggagttttatctctaagcccctgactggggctgctgtgtttctttcagacatgccctgcctagagaggaggaatctagagaggcagtctggccgcagccactttgctgcactgtgttgagctccacccagtctgaacttcccggcctccttagcattgtcaggggaaaaccgcctactcaagcctcagtaatggctgacgccccttccccccgaccaagatgggtcatctcaggttgacttcagactgctgtgctggcattttagggtacatgtgcacattgtgcagg

SEQ ID NO: 476581 - DNA, 536 bp, Homo sapiens
tgcctgctgccacataagacatgactttgctcctcctcgccttctgccatgattgtgaggcctctccagccatgtgaaactctgtatcgtcaagacacttttgcttacgccaccagctccaactaccgcaagtttatattcagtcattttcagcaggtctgggagccgctgagcctctggccctgccgccgccttcagtgcctgcgccacggagctcccagtccgaaatggcggaggccgggagtactggcccagcttcatctaaaccagtatttgtcttatatactttacgtgaatatgcttattctcaagatagagctcaactatctattaaaagaggacaaatttttggataatgggtataatctctacccccatcaagaaaagcccgattcttggaattataatcagaatataaatactggctctgcaaagaaattaaatgggtcatagagacgtaacggaatgttaaactctttcttcatgcctacaaccatcgttaaaagtaggtactgactgttgttagaagggcatac

SEQ ID NO: 476582 - DNA, 843 bp, Homo sapiens
ctttcgtgttctgcaatttaacatgatgtgcctaggtgtaatttctgtgggtgtgtttatcctgcttattattctcagagcttcctgcatctgctataattcttatccttgttcctctagacacaagggagtctttctggttctttgctctgaggacctggtgggtttcctggagattttgtcctacaacctccgtatcctgttggggccaaaacgagtttttgattttcaacttttagctttttctaatggtgccgacatccataaatttgaagatacatttgcaagtagtaagagaagtaccaacacttatcacagtcttatccaactggcctggggttctcccactggcacagcaaagccaaatgctgacatggagatatcggtaaaaatgaggcatttattgctgggcaccaagcaaggggaaccaggcagttcatgcttcagacctgtattcccaggtagcttacagaaggttctgaactgcccatattcaatgcctgaaaacaattgcctcatatgctttgtccagttttatcgtttttcacactgggagaacaagtcttttaccagttgctacatcctggagagatgaagtcaataaacactttaagcattttaagggaatcagtgctgtaattgtaaatggaaactccagaagaaagcaaccaaacttctatgagcatccgttgtaagcacattttgtaaaatagctcagtgtctgctggacttttgtattactacaaaacaatattccgtttccttaaaaatacttcatttatctaaaaactaaatttataattaaaattcacctttacctcaaagacttaaagctcaaagttt

SEQ ID NO: 476583 - DNA, 499 bp, Homo sapiens
ccactactgccaccatgagcacaccttgttctctcccagccttgctgccattaccagcatgaatgcatgcacacacacggagaccagaggcccgtcgccaccctgtaccaccattgctgccagtgcagacatgcaaatggacagcaacagcccagcccctcaactctgcaccaccaccaccaccattggggtgaatgcatgcatggaggccaccaatgacccatgttttgcactgacactgctgctggtgcaaatgcacacatggatgccagcagccctgccttcctatgctgccaccaatgcctctcaggtgagtgagcagcccaccccgctgctgctgctgctgctgctggcacgtgtgaaagagcatggatcctgttgctaccacacaatgaagcacttcagctggcactacacatcagagggttgtggccaatggtcgaggaacactttggcccctctagcacagcaggttcctaaactcaagggaacttgagaa

SEQ ID NO: 476584 - DNA, 616 bp, Homo sapiens
aggagtgtgccagtcatctgggtccctcactaatgcaaacatcctcaatgcagaaatctgaaactacgggactttatcggaatccaagcaggcacaggatgtacaattgtgccttctccccttcctccagacttgaagtgaccccatgctgcatctttcatttgcacctggatgtcatccaggggaaaactcctgacaacctctggaaggtctggtccatcccaaccctgaagccgctctgcttcacagctctgcccagccactatctggaccttcactcaggacagcatcagtcttcaggccatgctgaccctataactcgaagaggcacatatctagctctctgggggtggtctgttgaagcttctgcagggcttgaagatgggacaggcacccctcactcctcctccctggaggtggtttgggcaacagtgtttcaaagaagagcattgcagacatgaaggcaaaagtgagtaaatacataggagaggatttttattgtacagatgggagaaggaacagatgcttgaaaggaggagggtagcctttcacaagtgaaatatgaaaatgaacaaatcttagataaataaactttgtgcagtatacttagtctgtg

SEQ ID NO: 476585 - DNA, 1412 bp, Homo sapiens
agacggtgaggtttctgagtcttgggtatgtctttatcagcagcatgaaaacggactcatacagtaaattggtacaggagagtggggcactgctgaaaagatacccaaaaatgtgggagccattttggaactgggtagcaggcagagtttggaacagattggagggctcagaagaagatagaaaaatgtgtgaaagtttggaactccctagagaattgttgaatggctttgaccaaaatgctgataatgatatggacaatgaaatccaggctgaggtggtctcagatggtgatatggaacttgctgggaactggagcaaagaaaatttgcagcctgacaatgcgatagaaaagaaaatcccattttctgagaagaaattcaagccagctgcagaaatttgcataagtaatgagtcaaatgttaatccccaagacaatggggaaaatgtctccagggtatgtcagaggtcttcacagcagcctctcccatcacaggcctggaggcctaggaggaaaaagtggttttgtgggctggacccagtatccccatgctgtgtgcagccgaaggacttggtgccctgtgtcccagctgtgccagctgtggctgaaagggacaaatgtatagcttgggctgtatcttcagagggtgcaagccccaagccttggcagcctccacatggtgttgagcctgcaagtgcacagaagtcaagaactagggtttgggaacttccacctagatttcagaagatgtatggaaatgcctggatgccttggctgaagtatgctgcaggggtgcagctctcatggacaacctctgctagggcagtgtggaaggaaaatgtgggatgggagcccccacacagagtccctactggggcattgcctaagggagctgtgaaaagagggacaccatcctccagaccccaggatggtagatccaactacagcttgcactgtgtgcctggaaaagccacagacactcaatgccagcatgtgaaagcagccaggagggaggttgtattttgcaaagccacaggtgtggagctatccaagaccatgggaaccaacctcttgcatcagcgtgacctggatgtgagaaatggagtgaaaggagatcattctgcagctttaagatttgactgccctgctagatttaggacttgcatggggcctataggccctttgttttggccaacttctcccatttggaatgactgtatctacccaatgcctgtactcccattgtatttaggaagtaactaacttgtttttgattttacaggctcataagtggataggacttgccttgtcttggatgagactttgaatgtgaacttttgagttaatcctgaaatgagttaagattttgggggattgttgggaaggtatgatttgttttgaaatgtgaggaca

SEQ ID NO: 476586 - DNA, 527 bp, Homo sapiens
tgagaggatgaagctctgagaatcccagggaggagagtgaggtcaggatggccactagaagaaggcagcagctgctgcctccttctccctgcctgcccactcgccaaggatttttcaagcctcatgtccttcagcatcaggctgaagctgcgagttccatcctcagactgctgggaaacttgcttagggtcacagagttagaaatggccttgccaggtcgcaaacagagacctggtcctgaagctgtctgtgtggtcctgcctggcagaccccaggttttctgtggcttgctgccctgtgagggcccatggaagccctccccggaggggctggtggagagagttctgaattcctgggctctgggatgtgaagggagcggactgcaggtgaggggctgtcagattccaaaatgctgcctgcataaatgttattgaatgagtgattcattctgggagtgtggggtttcggtgactctgagtccctgtcctccaaacatttacacactgcacctccatgtgggcagggag

SEQ ID NO: 476587 - DNA, 823 bp, Homo sapiens
tatgtgtgcatatatatatgcacactgaaactaaagatgagtccttaaaagtggaagacaatgaaagtagagtgggtcagagtgacgcaatgtgtgaaggattcaagccactgttgtttgaagatggaaatctggtggaaggctgtgggcagagcctggaggtggctctcaagagaatttggtggaagtctgtggaggaagatcctggatgtggctctcgtaagaatttggtggaaggctgtggggagagcctggaagtggcctctcatgagaatctggtggaaggctgtggggagagcctggaagtgtcctgggagcttggcacatatggaacacatcagttggactcctttgctggcttccggtcctgctcctgttcatctcatgatgctcagagagatgtgggaagcaaggcatccttacttggcctcaaacgaccttcaaattctcctgctcctgccgtgaccatgaccaccgcctcctgctttccagaacatcctccgactccagcctttgtgtggctgctcacatccctcctcccaccagaagcagtggttgctgtcctcacctcctgctggaattgtactcagccttccgggggagatgctcaaaatatcacgataccatggatactgagcaaacacaaagcagcttggagcaggagtggggtttaaagcctgaaggctcccaagctgtgcctggtgttcaccctttagttgctagacagtggaaaggtagggggagccccagaggaggggcctttgtagtgaggagggaatctggacagcgaatattttctgattctgccgattcgtgtggccgc

SEQ ID NO: 476588 - DNA, 591 bp, Homo sapiens
taggcggcagctgcctgggaaagcaccatgtgttttcacaacggggttccaggttcgcaagagaaggactttctgctcttgcacctctctcccttatgggggggaaatatttctgggcagccccagcagacatcctactggatgacagggtctctcctggcattctcccctggcaaggggagtgtgtgggtgcctctgtttgggccattcctcagagcgactgtattgttccctgaacataatcaggctgccccgcaggatggtggtgggaatggctgtaatgtgtgcttcgaatcatgtgaactgaaacctgtggacttcccacagcccagcaggacccaccttcccaagcagcaaaccctggagcctcgagctgacacgtcagtccttgtgcttcgtgcacatttagaaggaacttcagacaaacttcattcacttcaaactctgtccccttggagcctcgagctgacatgtcagtccttgtgcttcgtgtagatttagaaggaacttcagacaaacttcattcacttcaaactctgtccccttggagcctcaagctgacacgtcagtctttgtgcttcgtgcagattt

SEQ ID NO: 476589 - DNA, 600 bp, Homo sapiens
gcagtgacagctcttaaaggtggaccctgacttcataagagaaacagcagcatatcctgaaagtttctgacacttcctgctcacaggcaccaaagctatatgtgtaaacttatccacttcttgccaaaggaaccctcccctgggaagatgaagcttcttggacgtgaccacctccaggaaccaacgggcgggcaacctttatgcatgtgtgaccagacctccaactataagcatggtgcatggtgtaagctgttggtggatctagcattttggggtctggaggatggtggccctcttctcacagctccactaggcagtgccccaggtgagatgcagcccccactggacaggaaaacaccagacagttttaaaaaggaaaaaccaaggagtcccaagtcactgacccctgcagcgtgggagcagcatgagccatctgcagtgacattgtctcctccggcagcagcctccatccagaaatccatctcagggtctgtcctcacaggaacctgatgccagagctgtgcactgaaaggatttggacacaggtattttgtggaactgagcattttccaggtcttgctggaggtcattctgtgtgaa

SEQ ID NO: 476590 - DNA, 1020 bp, Homo sapiens
gcccagagaaggggaggagcctgctctgtcacttctcccaagatgatttatgacctgttcagaaagcgcaaagtcatctcctttggaggctgcatcgctcaaatcttcttcatccacgtcattggtggtgtggagatggtgctgctcatagccatggcctttgacagatatgtggccctatgtaagcccctccactatctgaccattatgagcccaagaatgtgcctttcatttctggctgttgcctggacccttggtgtcagtcactccctgttccaactggcatttcttgttaatttagccttctgtggccctaatgtgttggacagcttctactgtgaccttcctcggcttctcagactagcctgtaccgacacctacagattgcagttcatggtcactgttaacagtgggtttatctgtgtgggtactttcttcatacttctaatctcctacatcttcatcctgtttactgtttggaaacattcctcaggtggttcatccaaggccctttccactctttcagctcacagcacagtggtccttttgttctttggtccacccatgtttgtgtatacatggccacaccctaattcacagatggacaagtttctggctatttttgatgcagttctcactccttttctgaatccagttgtctatacattcaggaataaggagatgaaggcagcaataaagagagtatgcaaacagctagtgatttacaagaagatctcataaatgatacaataagcccttctcgttaaacatgatatggctttatgtttctttctttgatattttagattcaggaactatgagacattatgtattgatttgaatgttattagacctgtaacataattcttatctgatgaatatatgatgaatatattccttgttcaaaatgagtcataaattcaacacatctctacatctatattatgcccatttaatttctttcagcaatgttttgtagtttttggtgaacagtctctgatatctttcttccgcttgacc

SEQ ID NO: 476591 - DNA, 777 bp, Homo sapiens
tgggggacctgtagatgggcttgccaggtccagccccacccagtgttttctcgggagacacatcgcctctgcctcccactgtcccagactgtctgcgggctgatgtcagggttcctccttctgagagccaaaaatgttccttctatttagcagacaagaatatcacccacggcttcctctatcctcctgaaatgtgggactacttccacagtgttcttcttataaaacatgccacagaaagaaatggagtaaatgtggttagtggaccaatatttgattataattatgatggccattttgatgctccagatgaaattaccaaacatttagccaacactgatgttcccatcccaacacactactttgtggtgctgaccagttgtaaaaacaagagccacacaccggaaaactgccctgggtggctggatgtcctaccctttatcatccctcaccgacctaccaacgtggagagctgtcctataaatgagaatgtagccattagtccaagtgactttcattattccacaagtttttacatgcactcataagatattactttttaaagtttacacaaccaactttttttaagcaactctgaaagtaggcacagatgcagcaagtaaggttcagagaatttagaatattgtttttagtctagtgtatcgtccccctctgtgcagagtatgggatggccaatagggtgaaaccaactggatttaaggctctttctgaaaacttttctttctgggacctgaactattcccataggagaggtga

SEQ ID NO: 476592 - DNA, 3281 bp, Homo sapiens; identical to SEQ ID NO: 465154

SEQ ID NO: 476593 - DNA, 724 bp, Homo sapiens
tggaatcaacccgagtgaatggaatggaatcaaccgaatggaatggaatggaatggaaaggaatgaatggaatggaatggaatggaatggaatggaatggaatggaatcaacccgagtggaatggaatggactggaatggaatagaatggaatggaatggaatggaatggaatgcaacggaatcaacccgagtagaatggaatggaaaggaatggaatgaaatggaatggaaaggaatggaatggaatcaacccgaatggaatggaatggaatggaaaggaacgaatggaatggaatgcaatggaatggaatggaatggaatggaatggaatggaatggaatggaaaggaatggaatggaatggaatggtatggaatcaacccgagtggaatggaatggactggaatggaatagtatggatggaatggaatggaaaggaatcaacccgaagtgtatggaatggaatggaatggaatggaatggaatggaatggaatcaaaccgagtggaatgcaatggaatgaaatggaatggaatggaatggaatggaatggaatggaatggaatggaacggaacggaacagaattgaatggaatggaatcaacccaagtggaaaggaatggaatggaatggaatggaatggaatggaatggaatggaatggaatggaatggaatggattggtatggaatggaatagcatgcaatcaactttggtggaatgtt

SEQ ID NO: 476594 - DNA, 2019 bp, Homo sapiens
acatgaaaccagaggcgatggggttgttgtaagtgatccgatggcactcataaccctccagagagtaatagccacgatcaattacatggtcgacttgctgggcgtaatgggaggaatctacccaggacagaccaacccccaccaggtcctgcatgccgaaagatgcagaccccccttggcctttgggctacgagggcaagtaaaaccacacgcgaatgctacagcccccatgttctgtccactgagaggaactgggagcagtgacactcctgctgcaatgagcactccaaatgcccaaatttggcttctaaatattattctccacaacaacgagctacggctttttggagaaatggctgataccaggactggagaagagaaagtaaaggagcttagaatcagagaagtccctgtgaaaaccaccttagaagtatttctttaccttggaaaatccatgttgtttatcctctttggaagtgagaacaatgattattcagagctttttatccttctgctcaatgccggctaaagtattccccctttaagtctttgcatgcagtagaaggtggtcttcaaaggaagcatcgtctgctgaagacacttccaggaagaaggaagattgtttttaccaaggaaaatcagcttgaaatgttttaaaaatatgcagaatgtctgggagttcttccaatacgcttatgtttaagtcatttggaatcagagcctactcttctccagtttggcatcatcttaactaattacatctgccaagactctatttctaaataaagtcacattcacaggtacttgggttgagaacctcagcatatctttctgggggacacaatgcaaatccaaaacaccagctctgttaagatacaattcacatattatatcatttatccacttaaagtgtacaattcaatggctaattccaaaaatacctcccctggacattgagttgaggcaaacttggtgtctgtagcagctgccattgtccagtggacgaccttcctttgctttaagatgtaatatcttagacttgaggcgctgtactagacactggacatggcaaggaggatacaagagcacatgatatgtaggccttgtttctgtgaaattccaacttggttatcagcagtgttagtgggctgtcaggttagcttcaccctccagctatatatatatgtgtgtgtgtatatatatgtatgtgtatatatgtatatatgtatatacacacacacatacatatatgtatatatgtatacatgtatatacacacatacatatatgtatacatacatatatgtatatatgtatctatatttacacacatacacatatgtatatatatgtacacatacacatatgtatatatatgtacacatacacatatgtatatatatgtacacatacacatatgtatatatatgtacacatacacatatgtatatatgtacacatacacatatgtatatatgtacacatacacatatgtatatatgtacacatacatatatgtatatatatgtacacacatgtgtatatgtacacacacatgtgtatatgtacacgtacacacatgtgtatatgtacacgtacacacatgtgtatatgtacacgtacacacatgtgtatatgtacacgtacacacatgtgtatatgtacacgtacacacatgtgtatatgtacacgtacacacatgtgtatatgtacacgtacacacatgtgtatatgtacacgtacatatatgtgtatatgtatacacacgtacatatatgtatatatattttatatataaaaatacatatgagaaatatatattttttgagatagagtctcactctatcacccaggctgaagtgcagtgattctgggagaattttgttctcgtcatagtgagttagctgacttgcgtgattcatatagaaaaaaactcactctgaatttaacgtgataggcttgttaaatgacaacaaagtggtcaccaaaagtgctgtgctgtaacttaaccagagtaaa

SEQ ID NO: 476595 - DNA, 538 bp, Homo sapiens
ggattggtttgcccagaacaaagctgagctctcatgttgcatacccagaccttgtatgcccttccgtgactccaattacaagtcaacgtcttcatcaccaagaacagatttcccaaatggccctcttaaccccataaatcacaaccagagctacagagcccagatttctgaaactctcattctgggagtggctgaattacaatataaattgaattctcagcctcacggaacatcttctgttcaagtgagagcattgattgggaagaatctggatcctgaatattggaatggtaccaatgggcagatcctgatgaaagcctatcccaccatctttttagcttctatatccataactagactgaagtcccagcctcaaaaggtgaggtacaaagtgacacatgagacagggtactgtgctccaaaagaactaaatgacttttccaatttatacaaacagaaatcccaggaatgtgtatggggatggatattaagagcatgagatagtgaagcaagaaacaccaagttgaatgaagtcaaa

SEQ ID NO: 476596 - DNA, 587 bp, Homo sapiens
cagctgcacacgtggaaagagagaatgctcgagcagaccccgtggtgctggactggaattgaaggtattggtaaagatctagagctccttggggaagtggccaaatccaggactggaacagggaagccaaagatgagactggaacattctattgtgctagcatgtgagaaagtgccatcatcacagaatggtggggacatgccagatggacacagaagccaatctgggggaaccctgactggccggacctgggacaatatgataaaaaaaaagaaggaagaagacaagaagtgggacatggaaatcaggattaaggcaaaacagtgcagcaaagccagccaggcattcaggaacagcgactttgttaagatctaccttaatctcctagttggctctgatccactgggacatttattccggctttattatgtggccatgtgactgtgggagcttaagggctgttttgtttgcgttaagtcctagttaccatctgtgggcttccagatccatgaagatttctgtggggggaaactgttatatttacctccttagtgagaaatacaaaatgatttaaacatcccctttgg

SEQ ID NO: 476597 - DNA, 781 bp, Homo sapiens
cgggtgtttcaaaggatgtgtcatcatccagactgccaaagcctggagctaccggaactgccacgtgttttgatttctgcccagggccattctctccacataacagcacagtccttgcactgatatttcctgtttctgctgaactggggatgagggagggaatctgttctcctggtgtggccagggtgagaaagtgttgatggtggatgctcacaggagtgggagccagacagaaagcccccaggaagagcgcagccagtgctgcccttcctcctcctcctccccctcctcctccccctcctccgaccccctcctccccctccccccctcctcctcaggactgcggtctccctccaggcctcccactggaagatacttccccattcgctgggaactcactgacaaagcagaaatgtagaaacgtggctcgcagaatcccagacccagcatcagggaagagactgaccaaaggtggacgaagaaactgtccccagtggcaggtcctgaaccacccagtcagctcttcctattgtctcgcatctggtgtctgcaacactgaaattaggggtgtcgaggaccaacctggaggttcagaagtaaaacttcccaccaaggtggccctcacagtccctcagctggtcacgacttcagaagacttcttcctgacccttgccccgaccttcctttactgagagcatttactttagagaagtcataattgtaagttatttctcttcccttttgagatgtgaatcttttcaaaagtcctcttgccagttct

SEQ ID NO: 476598 - DNA, 626 bp, Homo sapiens
gacaagcagcagagcaggacgcagtcactgttaccagcacctgatggttttctcccttgcttgctttctttccactctattaatttgtttggatctctgtgtcttgactggcttcaaggaaagctttgaaaacatcaaaacagaactctgtctgaaaatgttcttacagcactgtctccaaaacattcatgccttaagtgatgaatacctaaacatctctcagtcagaatggctttctttcctctcttccctgatatgcataacaatgactaagtgtggacttctgatttctttttcacacaatggtagcccatgcagtgaccctcatacttctacaaacttaggacactcttggaacgtggtgtctgtggcctgcttgtcccagcagcatgacctgcggctgggcgaaccgtcatggcaagtgacctgctgtgtcatcccatcactcgttataaaacaatgcccagtgaagtaatgtctcacctggcatagtttcccatcctctgttacctgtagagggtccaaggtatttgggggcctaacataaaataaagtgtgatcacaaggtgacacatgcaactttatttaagtgatgctttcatgggttcacatgaaaaggaaggaag

SEQ ID NO: 476599 - DNA, 734 bp, Homo sapiens
tttgcttcaaactgggagaaattcgaagatacatccgcactccaggcagaactggctggagccacatctttcttccctgcctctgcctttgttttagccttgtatgtacaattatattgttatgcagacgactggtcgttttgctgaaatttttataatcatctcttattccaatgaagctcaccccccgttagacacacaattccctgtgttgctaattggttccttctggtgggttcttggtctcgctgacttcaagaacgaagccgtggaccctcgtggtgagctgttacagttcttaaagatggtgtgcccggagtttgttccttcagacgttcagatgtgtcccgagtttcttccttccagtgggttcgtggtttcatttacttcaggagtgaagccgcagacctttgcagtgagtgttacagcccttaaaggcagtgcatctggagttgtttgttcctccccgtgggttggtgggttcgtggtctcactgacttcaggaatgaagccacagaccctctgatcaggaagctgaggtctagagagttaatcacatacccactctcactgaatactaatagctatgtgaaataatgcataaaaagggctttcattagagtttatgatgcgtagcaaatgttcacaaagtattagccattattattaacaaaataatgaaagaaattaggaagggcttcatagagtatcagggcttaatgtgtacattaaaa

SEQ ID NO: 476600 - DNA, 625 bp, Homo sapiens
tctgtgcttgaatatccttggtctaatgtctgtctctagattttgcttctgtgaaagccaggccctggctttctgctgccgctttattttcaagagcccccagctaaaaaccaccaaatgttctttaatggatgtatggctaaacaaactggcacaaccataccatgaaatactattcagcaataaatgggagaagggcagagggaaggaagatctgccttgttactgcgtcttcactgaccaaggatgcggacgtggacacaaagtctgctccattatgtgtggacccctattcccagtattctttgtggaaagcactggacttgggatgcttgattactacaatccctctcccctactcatagatgtcttcttccacatgcacctctcattggccaaaatcaccagaaagccagttggcatgggagcctggaaaatggaatgtcctgaacacacagcaaataggggaagtggagaactgaaactctgtacccgctaaacagtagctccccattcccttctaccccagcccctggtaaccaccattctactttgtctctgattctaatgtaaatatctcatttcttcaaacatctctaagatggttatttaaaactttttgtct

SEQ ID NO: 476601 - DNA, 881 bp, Homo sapiens
aatcgggggatgctgtatccctgcctccatgttggggagatggagcctccagcagttggagaagaaggggacttcttaggagcccaggtctttgttgcatcaggagccatcctgctgtggggcagccagtgtttccaggccaggtcacttgatattgtggaatactccttgccctgtctcctgggtgcttgttgtgaaacactgctggaaatgtccagccttttccagagaagtggaagtggccagatgttcaaccagctgcaggaggccctgagaaacaaatttgtaagaaactttgtagaaaaccagttgcacattgatgtagacaaacttactgaaaaactccagacatacgaaaaatccattgctagcacaggagatgacagctctgcgtgtgttagtgccctgaagacctccttccagtgggacaagaggtggaggtggaaaaaagtgatattgatgataatgaccctgtgtaggcctaggctaatgtgtggttttgtgagttagtttttaacaaaaaatttaaaaagaaagaaaaaacctaaaaataaaaacaagctagctcatagaataaggatgtaaagaaaatatttttgtacagctgtacaatgtgttttgtattttaagctaagtatgattacaaaagggtcaaaaagtcaaaaaattaaaaagtttataaagtataaagttatagtaatctaaggttaatttatttttgaagaaaaatttaaaaaataaatttagtgtagcttaagtatacagtgtttataaagtgtataaagtttataaagtgtacggtaatgtcctaggccttcacattcactcactgctcactgcctcatcagagcaacttccagcctgcaagctttattggtgag

SEQ ID NO: 476602 - DNA, 743 bp, Homo sapiens
cgccatttgagaactctggcttgagctattttcttctcactgatttttccaatgagcgtgttttattcttctatgaattcagaggatctgggagcagggaaaccagtagaggagggaagcaagcatgagaggcagaggcagctgtcagtgggtactgatgctgccatgtccggggacaaatgcccacaggatggcagtggaagaattcatattcattttcaaatccatttgcacaatctccactatatgagtggagggctgctggatgagatgtttaaccatgcaggcgctggacgcttccgtttcttgggcagcatcttggtcaatctctcttcctgcgtggcactgaaccgtttccaggctctgcagtctgtcgacatcctggagactaaagcacatgaactcttgcagcagaacagcttcttggccagtatcattttcagcaattccttattcgacaagaacttcagatcagagtctgtcaaactgccaccccatgtctcatacacaatccggaccaatgtgttatacagcgtgcgaacagatgtggtaaaaaacccttcttggaagttccaccctcagaatctaccagctgatgggttcaaatataactacgtctttgccccactgcaagacatgatcgaaagagccatcattttggtgcagactgggcaggaagccctggaaccagcagcacagactcaggcggccccttacccctgccataccagcgacctgtgagt

SEQ ID NO: 476603 - DNA, 2188 bp, Homo sapiens
gtaggcttacttataccccatgatgtttcagaataacactctacagccacccatatggaggggccttgctgaacaaggacaagattcgataataaaagtgggtatttttgaaaaactttttatgacctaccaaattaagtcgcagaatgcaaatctgcttaatgggcattctctgctcaagttgttaatctggcaggaaccggcaggaagcaccggttgggttgcagcttgtcctcacgttcacttaatgattttcagggttctagctttaacagtgtctgacacctgccagaattccaagagtaggctagctgacatctgttgtagaatgcgacacgatggagcagaaggcatggcacagcagatgacttgtgctgaggagttccatcgtgtcggcctcctgaaagaccatctgtgcctggagagcatccgtcagtgtggagtggccctctgcatcgtgctgggattctccatcctgtctgcatccatcggcagctctgtggtgagggacagggtgattggagccaaaaggttgcagcacataagtggccttggctacaggatgtactggttcacaaacttcctatatgacatgctcttttacttggtttccgtctgcctgtgtgttgccgttattgtcgccttccagttaacagcttttactttccgcaagaacttggcagccacggccctcctgctgtcacttttcggatatgcaactcttccatggatgtacctgatgtccagaatcttttccagttcggacgtggctttcatttcctatgtctcactaaacttcatctttggcctttgtaccatgctcataaccattatgccccggttgctagccatcatctccaaagctaagaatttacagaatatctatgatgtcctcaagtgggtctttactatttttcctcaattctgtcttggtcaaggactggtagaactctgctataatcagatcaaatatgacctgacccacaacttcggcattgattcctatgtgagtccctttgagatgaactttctgggctggatcttcgtgcaactggcctcgcagggcacagtacttctcctcttgagggttctgctacactgggaccttctgcgatggccaaggggtcattctactctccaaggcacagtcaaatcttctaaggatacagatgttgaaaaagaggaaaagagagtgtttgaaggaaggaccaatggagacattcttgtgttatacaaccttagtaaacattatcgacgctttttccagaatattattgctgtgcaagatattagtttgggcataccaaaaggagagtgctttggacttctaggggtgaatggagctgggaagagcacgactttcaaaatgctgaatggtgaagtttctctaacttcaggacatgctatcatcaggactcccatgggccacccagcagagctaccaggctccaggatggtattggggagtgtctgcaaagagtcctgtgatgtgatccatcttcaggtctttcagccgtggataccagcacctgctcaggtggaggccctagggctctacaatcagcaggtggagaaaccagccatgtttgtgtcattcccttcaggggaggagcctctctcagtggccaccatcactactggctcacagggagttcttcaaggccaacgctgatgtccctttaaagcccaagaatcagcttgtgataaatgctgccaggcctgtgactcacccttcaaggcagtgggctcccttctggtccaagacaggtccagaaataatgtccaagagcctaggcttggactctgataccctaagagctcactcagatccctcagagatttgaggtcagaaagcaaactgctaccccagtactagagagacagtcaggggaccccctacacccatgggttcatatccatggattcaactaactgtgccacaaaatattcagaaaaaaagggatgattctgccggtactgaacatgtacagacttttcctgttgttagtattccctaaaaaatacagcataaccaccgtttatatagcatttacattgcattaggtattataagtcatctagaaatgatttaaagtatttgggaagatgtatgtaggttataagcaaattctacagtattttatataaaggacttgagcatctgtggatttttagtatccaaagggag

SEQ ID NO: 476604 - DNA, 475 bp, Homo sapiens
gttttgtaggccatgatgagggagagagaaggtgcccggaatgggacatggatagggtcccggaattggccttctccggaatcggaatctgagcgaggactccgggatccccagcctgaggacctccggcgtttccactccctggctccccgtcccacctgttgcctttgctatgcctaccctggttctttttcgtgctatggagacagcgtgggcaactccagcgcaagaagagggatgctccttctagagacagcaggtgtcctggaagagagatgtgaaacttcgggaaagatctggctgcagaacatcctggaattgtgtccgcataaacccagggtcattgcccccaccaaacgctgaatgccctgtgaggagccagaggagcccccatttagcgtgatggattcatattttaaaagtaaaaaagacagacacaaaatgactttgacaatcaatttttaaagctgttaac

SEQ ID NO: 476605 - DNA, 606 bp, Homo sapiens
ggtgatggtgatggaagggcttgtgcctggacacaaaagactcgatgtccaccctacccaagatctccacctggctcctcttggcacgtcttgccatcagcccctactgccattgtgtcactgtcatctacttgcctctccagaagcccttttttggctacctcaggagggtgatctgtgtgggctgcaccagtggcctctctgcactctggctgaagacggtgggccctaaatccaatgactgtgtcattagaagaggctacctgaagacacagggccatatgacaatggaggcagaggttggagtgatgcagctacaagccaaggaagggcaagggttgttggcagccaccaggtgcaaggagagaggtgtaggatggtttcagaaggaaccgaccctgctgacaccttggttgtggattgctggcttcctgaagatctgtctctgagtccacattgtgggagaaaagaccattcttcggaaagatgcagagtgagtgagtgtgatattgaggtgggaagtgcttcccctgcatctcttgtttctcttcttctgagtcccttgtcatctgatctgaattttctccctttttagggaagccccgt

SEQ ID NO: 476606 - DNA, 888 bp, Homo sapiens
gacaaattccctctacatctggcagcatcccctgagggcctctgactatgcagtattttctcccaggacgaagattcccaaatgtcaaagacagcatccggagaggctggtataacttcagatctaacctatttcagaggcagaggttaaagatagacaattcacctggatttttctcttcttactggggtatgggtgcagggctccccctgcggcttgccagctgccagcagatgacatctcctttcatgtttggggctgagcacagctttgaatctgcctacaccagcaggaggcggcccggggttaatggcatgacatccctgcggcagtctgcccgatgggcttctgatgccttttctaatttggttattatcctgccaactcccccggcgcccaagggagggagtcagcgtgttccaggagaaaaggaagcagggcctggcattctggatcgggtgcccctggggagcggggagggagctggggctggtgcaaataaaattgatgctattaatggatctgtttacacaggggaacaaggagagagagaaaatgacaaagccgaggatgaaggaatgagaagaaaaagaggaagaggaaagagagaatggaaagagggaaaggccacctgagctcaaggctccaacctgcaccaagctgggggatgggcaggaagagacacaagggtcgggaccccaggggcttaagagagggaacagaggacagccagctgcagaggagcccagtcctactgacggatgcacaaggaggccaatggcatcagagaagcccgaatgggttgcttggagccttttattaggcatccttcaagcccaagcactgcctcctctgggaagccctctcatactgcccccagcctgcttt

SEQ ID NO: 476607 - DNA, 2552 bp, Homo sapiens
agcacagtacctggcacacagtagttctctggaaatggttcctgacagtgcctgaggacaccttcaaaccttctctgctccgttgtagaactttttccagcaagggggagaggaaggacaaaaggctatgccttgggctccaaagtttaggagaggagccatggagatggacagagagaggcctaagggtcaagctgccaggccaccaggcagtgccaggtacgaggatgacaacacctagccaacccgcggagaaggcggctgcccgcggccctccggcggggctgcgcggtggcgcgcgcgggaagggcgcccgggactctccgccgcgccgggcacccgctcgccctgcccgggccgtggggctgcgcgccgctggcctccgggaagaacctgccattccccctgcagccgagtccgacagaggggccgccaagagccgccgggccgccgcactgccctccgccctcacccccggggcgcccgggcctcccagcgggggcagaacgcgaggctggggggctcccccgggtggtagcccagcgggcgggcgcccggccaaggccgccctgggcagggccttactggcgctgacagagcctcgcgcccgcggcccaattagcgcgcggcgcgagggacgcggcatctggaattgcgctgcgctcacggccaaggccgattgtttagtctgcgcggcggggcgggcggcccgcgcggtggccccacatctggagcctcggccagacggccctgctggcggctggccgggctaagtggtaaagcctggctgtgtgcccagacctgtccacctccaaagcagttgtcttgtaaagactgcctaggctgtccgtggctgatgctacaggaatggagcccagagaggactagggatggggagacttcctggaggaggtggggtttggcttggccttgaaagaccaggtgagaaaccaagatcagagagggtgagtgacttgtccaagtcacacagagttctcgtcagggccacagggccaggctccccgatgctctttccatgggatagtttccccagtgtatatgcccatcctgctaggagactggaagctctagagagcaaggaccaggacgtggcatctctgtctccactcaacaaacatgtgatgcctgcgtgttatttcacaggcatttgatccccaaggctggcagctttcggagggtccatgttatcaacttgcctccacagcacccagaccaagcaaaagtacaaatggagacccacattccatatgtctaaatatttaaaagttaaaaatcaagttaacaaactgtttaataaaatatgttctattcatacaccttctaaagatctggaaggctggatttgaatttagagttctcaggtttcttggagttctacacagggacacggagtggggagaaactccctctgctctcccccagccctgccctcagcctgcctcttcccttcccatccccaccttcaccttaaactagggcttcgagcatgtgtgtagatactccaatccgcacacacagctgctgactgcatgccccacactcaactcacagccaagacacaggctaccctctggaggttgaacctggggaggtggcctgcagaggtcttggatgcagggtacaggcccttagggcagggatttctagggccctgggcatctggagcatggttcaggagtgggggtggctccctccttctgaacagactcctaccctgtgaggagggccaaaggagggccctaagtttagggccccttgtctacaggcactggagctggaggtgggtcactctttcttccttctgctttctaatctctttgcctgatcagccaacatctgaacatcctggcaactttcctttctaaacagttctccaagccccatcacagcccctgtagtccaggccactctcatctatcaccaggtcaccacaacagcttcctaactggtcctccaggccccagtcctttgcccacccctccacagccagtgatctttgttgaacacaaactggatcatgatgcagccatgcttaacactcttccgtggctccctgctgcacacagaagacccaaattcaacttggccattgacgttggtgtccagcccctctcaagccctccagcctcagcctgccctactccctgcccctaaatgatgctctggcctatctacactgcccccaggtccctgcaagacatgaagtacacactgcagtgtgtgctgctcctctgccccactttctcacctcctgtctctacgaattccttcttcttgaagatttggcttcatggtcaaacctgcagcaatcctttcttgtcaacagcccactcccgcctccaggtctggcagggagtccccggcttgtgctctcatactagtatctacactctattataactatcactaatttaaccacttcttaataccctgaccattgccatctcttgcttgaactattgcagtggctccctaactactctccctgcttccactcttgccccttcctctaggctgtcctccaccagcag

SEQ ID NO: 476608 - DNA, 620 bp, Homo sapiens
cactgccacacccggacctgccacaacctcttggagtcagtgacaagaaccaaacgcaccccagcctccacccctcccctttcctgcttttattattttcttttccataaagattagtctgtgttgctcctctatcaaggcctggaggataaacatgtggtccggaggcagagaaaccccaggcctgaaggccccactgcccccaccccagcagcataaacccagggcttttaagcaaggaatggttttcagtaaatctctcctatcagcagaaacctttgaaagagtttgtttaaaggccagggagataaacagcaaggagaagtgtttgtttaagatgtatgttctgtgtggccactctggggcccggatttacatctctggggagaggaaccactcggaggccagggtgggggccttccaggggcaccttgggctcccggtgtggacttcagcccaggcagggacccatgagctcaggggagggaagttagctggactgcactcacaggcctctccaggcttggggcaagaaagcaggggctgaaaggagctgcaggaagggaagaagccctgtaaaggaggggaggggtgcctggaaggacctgctggttggaatg

SEQ ID NO: 476609 - DNA, 750 bp, Homo sapiens
cttaggcctatgatccattttaagttaatttttgcgtatgtacctgggcagggacctaatctacactggctcccccagaacagtccttggaacagggatgaccccagccctgccccctgctgtggctgtccatctttcctggggcagttcttgctagcagagtattctctcattcctggagctgggaatgctctttctgttatgtctgcttctcggtcttacccctacctgctggaggctgaacataagccgcactctactcaagctccaggaggaaatgtgccccgcacccagaaagaagcagacccggagatggcagggattgtgaactggacggtggctacggcctgggggaaagcggtgaaaccagggccagccccaaggacgactaagctgttttccagctcggtcaacaagtggagtcccgctgccccctgctcagccctgggattgtgtgcagcagttggcctgaaaaccccagagaccagccccagcccccacaaccggaccatcaccctggggagcagggatcagggccacctgggcaaagacagggagatgtggtgtgagtgtgtgtgtggtgcgggtgatggaatgcatgagcctgcggaatgtatgtgagtacgtgactgtatggaaagtctgtgtgagtgtatgtgtgtgtgcatacaggtgtgaagtgtgtgtgtgtgtgagtgtgtgagtgtgtgtgtgtgtgtgtgtgtgtgtgtgtgctggggggctggctaa

SEQ ID NO: 476610 - DNA, 676 bp, Homo sapiens
caggccctgtgctacgtgctttatatgaattatcccagccctggagaccaggcctggatccctggaaagggacctggacagatcacagtgacagccgccctcgtggagcacctgcttggcaaagaaggcactgctctgagtacttttcatgcatttgctcatccaatccccacaacaagcctatggagagggtcccagtttccaacactgtgggacccgggaaattctgcaggaggctgccgggccaggggagagcagcttggctttggagaaggcctgcttggacctggctccacccctcactcgcagtgtgaacctcctgggtatatttctcaattttgtggagccggtctcctcaacgtggaagacgcctggaggaagaaactcagcgctctggaacacctgctttactcctcatctgggccaggggtttgaaggaggagggctgcaaaggccaggatccaaggcgctcagtgatcatttgtgtcacgattatggaagggcagctagcttcaggccagggcggcttccactgggctgtgtgcccttcctggtcgctcagctccaggagctggcaatctagctggaaaccatcagccaacaccacagggatatggggacatctgtgtttttgtctccctcgaattcatccagcttttggtaacatggaattact

SEQ ID NO: 476611 - DNA, 2498 bp, Homo sapiens
cctctgacgtttgtctcagaagtgagtctgtgagactggcgctatgccagaccccagcttccacgcacgcacgtcccaggctgccctttcccaaccgcagcgtggctcttgtgcttattttagcctgatgaagcctcttgaaatgtcagagctgcaaccaaccaagctagggaccatccagttgaatcctttcattcaaccagggagaaaatggggattcagagagggagtgagagatgcgcttcaggtcacacagctaattggttgtgcagccagaaatgaactgcaggcttccggagcccagatccagctgtccttaactctagggggcaatgtgcttcagaccctcaaggccaccaaccttgagcaggcagcaaagggtggcatggagtctctggctgccaattcctcattcaattattccacagatgtttactatctgcctggtcggtgctggggcctgggcaaggcccttgggctccagaaaggcgagacgcagttctgtccttcaggccacaaggtctagtgggggaagcagtggcagtccagaataagagcagcagctgctggggcacagtataccctgagagagctagagctggggatcacggggcacgtatacggatttttgacattgacactatactgaacatactcttagcattcgtatttttcagcaataacttcccaccttaataaacagtcatgcacaatacgatttttcaaggccacatcgtatcacaccacatgggtgctgtaatttatctagccctccctctgctgctggatatttagttttttcagaggcatcactgaggagggcttattttccttgcacaatgagatgcacaaaggtggcagcaggctaccgctgatgttacagccgtgtgtgctgccatccacagcccaggctccctctagctttctgcccctcccgcctgaatttgtggcttcctcgttcttgctcagagaacggctgttggacttccagccatcacatccacgttgcaggcaagaaaagtggggagagagaagagcagagcatgctgcctgctgaaaactcccccctttaagcaagaaaaccatacagttgatcctgcaaggacatgctccccactcaccagggcccccttccctcccccagcaccaccacacccctccttggcacaaccagggatgggaagcccaggagtacagcctgggcctgccacctccatgtctcagggggcaagaccctccctagagctgcccacaggccccctccaccaggcctcaggcctggagaaagaaacatggccagggccatgtctaggcccaccctagttgcaaaggagcccagaaagtctagcctttgctgggcacactgctgctgccctgaagagagctggaattgtattaggaaggagggtggggaggaaaagcaggcacctaacaccgtctgccaccttgatcctatagcacaacaaactgaatgccttattgtggatacgcagcctgggaggcagtgggtcccccaggcacagattatcccaatagaggttagctgatgactttgccagaaatgtcttggcgaggattcaaacaaaagaaggaaatcaagaggctccacagctctttttggccttagggctttgggggaagagtcccacacccttaattaggttattctataacttgagtttaacggagaaagtatgatgaattggaagtcacaggttctaacctcactctacctctcactgtgcaacctgtagcaaattcttaaattttctgagcctcagattcctctgctataaaatgggaataaagtaacttacaattatttgtgattaatatgtgctggacactatgtgaattatttacatgaattatcttacttaattctgacagctctatgagatggttgttactatttcccccattttacagacaaaaaactatggcacaaaaagggttaacagtgaaacaatgctcttccccacccccctcaagcattattgatgtatagttgacagataaaattgtatatttttaaagtgtccaatgtgatgatttgatatatgtatatattgtggcatgattcccgccatcagagctgacagttgtaaggaaaggaagggcagctcagggaggacatctaaagggctctcttgtctcctggttacctggcctcagcacatcgcccacaccctctgccacttcaatccctgcccagaggggacagaggggacactggaaaatcccctccctccctccctctaaccctctcctctctccaacaagccctgggcacagcaatgttcacccaagagtgatgctgaagtcagccaggttcctaagaaagggtcatggccagaggacttcgaaactgcttcaagaaatggagggagggtgcggtgacttcatatgtttaggaccaaagaacagtcctagggatgctggaggagataggggggaggacgtggtcactgctttcagaagctgctgcatgaaggctg

SEQ ID NO: 476612 - DNA, 721 bp, Homo sapiens
agataaattacagcacccatgtggtgtgatacgatgtggccttgaaaaatcgtattgtgcatgactgtttattaaggtgggaagttattgctgaaaaatacgaatgctaagagcccgctggcttggccgccggacgcagactctggctcctgtattcccggactccactttctctaatcctgcgattagtgaggagggggaattggcagtgtggctcagaacaagctgctcagcgtggaaactttctctgagcatccccaggcctgcctcatccccacttcatctcccttttatatcccagacctctctctctccaggcctgaggcctggtggagagggcctgtgggcagctctagggagggtcttgccctgtaagacatggaggcggcaggcccaggctgtactcctggacttcccatccctggttgtgccaaggaggggtgtggtggtgctgggggagggaagggggccctgggatcccccaccaagccctctgcccctgaaggtaatggtgatcaaccttcttgctgagggcaactagaagagctatatatttttttaaaaactaccactaccaccacaacaccagaccatttgaagcatctgagcactaataagacaaacaagatagtagacaattattgagctaggatatggagaggactgagactagggagatgcagattttataattaaaaaaacagcaatgcttattatgttc

SEQ ID NO: 476613 - DNA, 1130 bp, Homo sapiens
gaagatgaagaaggtgatactatacagctctgccctaccccaatgggctgagcttctgacaaccccatgatgagggctccaggccctggctcaccctgcaaggacttcctaagtgcccaagcagtgccccctagaggccagtggcagcactgatcagcacagcgggcagcgccatcatggctggaggcccaggcgaagacgtgcaggccagggcgtgcctgtgtggggggaacaggaccgagcttctgccaagggcccgctgccggctgttgctgagcttgtgctcgccagaggggtgggggcggcaggcagacaatggaccccacggcccagcctcctggccttggccccttgagctgggcaggcagccgctggccaaagcagccgcctccattggtccctcacgtagcccacgtcctgcctgctgggtggcccttatcaccgggcagcaagttcttaggttggcttcccactgtgtgggcaaacacgcggcctcactcttactggaagccaagacttgctccaactgggctcggcaggagagagttctcaagaagcccaaccctcaaatacatactctgtaacctagatggaggctctcacagaacctgccagaggcaatcactaaccctgctttacacacctaaaggtagctttttaaactttaaaaaatttgtgataaaatacgcagaacatttaccattttaaccacatttaagtgtacatttcagtggcattaaatacattcacattacatacgttcacattacatatgttcacattgttgtgcaaccatcaacaccatccatctccagaattcttttcattttacaaaacagaaactctgctcattgaacactaactccccatctctccagcccctggcaaccaccattctactttctgtctctatgaatctaactaccttagttacctcattaaagtggaattatacaatatttgtccttttgtgatttgctgatttcacttagcacaatgtccttaaagttcatccctgttacagcatgtgtcacaattttcttcctttttaaggcttaataatattccattgtatgtatgtaccacattttctttctccatttgggtagctttttttatttattaactac

SEQ ID NO: 476614 - DNA, 693 bp, Homo sapiens
agaagcgcaagcgcagccgcaaggagagctattccgtgtacgtgtacaaggtgctgaagcaggtccaccccgacaccggcatctcgtccaaggctatggggattatgaactccttcgtcaacgacattttcgagcgcattgcaggcgaggcttcccgcctggcgcattataacaagcgctcgaccatcacttccagggagatccaaacggctgtgcgcctgctgctacccggggagctggccaaacacgcggtgtcggagggcaccaaggcggtcaccaagtacaccagctccaagcaacaggatagcctgaagttggagcaaagaaatgaaaattcccggtgctacattcagacgcttttatctgtcataggaccctcatgggtgaaagaatatgagaagcatcgtgggcaggaaggtctctctgatttttcccaactcttctcccctgaaacaggtcataggaccctcatgagtcctagagagtctgagagaaatctgaacaaaaagaccttgctaggtttctgttttacccttagctgacagtcttctttttgtcctattatatttctgcatgactctccactcttcatcaaacctagtgtaaaaatactcaggtttaccccttctccaggtcttcatttccttacgaagcctcccatgtcatgtgaaatttatattaaataaatgttgt

SEQ ID NO: 476615 - DNA, 620 bp, Homo sapiens
actcttatgtttttaatcatgaggaggccattagtttttggcagtcccacaaaatgtattaaataccgaatgcatgtcaagaaccccctgctaggctcctccactgctttagagtcctttcccttgctccttttcctcacttcctgtctctccagcccttctctctgcccctctcatccctcacaccctcccctccccttagtccctgccaccctctcacccctgaattgtggcactaacactgtccctcacttcctgcccatgtctgttctccccacagtgctcagcagttctgctaatgtgactcaggtcgtgtcatttcttcacttacaatggttgggttttggtctaccattttgctgtatgttttcaatttgtctcgtatctttttgtttctattcctcctttcctactttcttatgtgttaagtaaacattttttagtttatggttttaattctagtggcttttaggtatatttctttacactaattttttattgttgtaagaattgaaacccgattccttgacttttcatggtgaagttcagatgttaaaccaaccttactttccctttaaaaaaaccaatatggcatggcatattattcattttatgtatat

SEQ ID NO: 476616 - DNA, 592 bp, Homo sapiens
tctcctgaagaagaggaaaagccttgccaaatgcgtcttcccagcaggatgcaaacctccttcagcaaacactgatgggggctgctggtgctgggtgttggcgggggcctcctacccagcagctgctgctgctgagctctggaagtttgctatgggccatggattgggaggaaaacatggtccaattgaagaaagggccagaaggaagaaaagaggaagatgggctccagtgctagaaaagagagaccaaatacagtcgaaaaagcagagaaatgtatttttcctcaagttcttctgctgtcactttcactgcagatctcagctttgctcttccagagtccctcctttggcactgcactgcagccctctagccgaccgagggcggctcctgttctctctgcagactgcacatccctgtcctcgctcagcgctccccatctgctgtcgctccttccaagtgcacgaatacttagagcttaatccccgcaaacctagtttgcgtgacagtgccccaagccgggagacccacagctcctttccctctggacctctaactgacctgcagcagcgggcttagtactcagctcagcac

SEQ ID NO: 476617 - DNA, 758 bp, Homo sapiens
ggccaaagacaaggaaaaatcaattgtctgaggactgttactacaagaaagactataatgaaatgtggggcaagtgtgagaaggcagtgttcattatctctgattgcccaattaaggatccctacttgggaagatcaacactcacacatcaagacagaaattccattccgagagaaacattttcttgttactttgatttcccaagaaaggactatgcccctttccaaaatctacctttttcacatcagcaacctggacctgttggtccaggtgttttactattttctgtggaaaatgctgatcgcaactcacgagctccacgtgggctttgttagccccacacctgtggatttgagaaggaacccagatttctgcgttttaaacaaacgccacagctgtttctcagaaaggctgtgtcaagagccctttgagataacagtccttaggattggattgagggaaaattcggagaaattctgagagcctcattgacctgataatttttttaacaaaattaattaaagtccgctctacagacttttgcaaaggcaaacgtttccggatcttctagaagttccgactccacgattgtgttcatgtgaaatatgttagaaataaaatggtcacatcttaattcaatgctatttattattgattcattacatcaaaggatggatttaaacgggaagatcaagagtcaaggtgttaggaacctttgagttatttagactttcctcgttgctacagcgtcaagtact

SEQ ID NO: 476618 - DNA, 598 bp, Homo sapiens
gccaaaacaatggtacatactcgtggagcagtaatttctctaatggagcaattttgccttcacaacggtcatctgacaatgtttactgcgtacctgctgcgagctgatggaagaggccctgggttctttgcgagcgcgtggtcccttgagtcccttgagggtgaggaaatcgcaccaccgacctccacgtgtaggggaggacgtggtgcagcagcgccagataacgccggaagaaccccaagtggaggctgcttgggtccctcgggagttcttggcgtcttgaacaaagaactggacaaaacgcacaaacagagcaaggaaagaatgaagggttttattgaaaacgaaagtatactccacagtgtgggagtggggctgagcacaggagctcaaaggccccgttacagagtttttgtgagtttaaatatcatctacttgggggagatctacaaaaaaaaagaagaagaagaagaaaggaagggttggatggcagaggacagacagtggtaatttgtcactgtgtctccagtgtgctcagagaatcttcacagacttcccatctctcagttaaatctaaagtccttacaagcccagaagg

SEQ ID NO: 476619 - DNA, 727 bp, Homo sapiens
agcagcagggggtgaggaaggatttagcagcaggacatcaacaccggggcgagcagtgcaggcctgatggagatgtggcagggagacacctcagtgctggaagtctggataaggcaccaagacctcagcacagatctggggccgtttacagttaaagaagtagcagtgggtaaacagatgtcactggaaaacagtacagatcacaaacagttcagggatgaaactctgaatgtagcatcttcagtgaaacttgaaaaggcctttttgaacacacactgttacggagggctgacttttagtttccgtggttctgcagggctgactgctggacttgaagaaatcccagtttcttccaatgataaccactattttgcaaaattagtacaatcatacaacctggatattgacaatgatacagccaagctacagaacatttctatcaccccatggatacatcatgtatccttggataactacacctacctcactccccaacccttatacatgacaaccactaagctttgagataattatatttgtaattgaattatgattattgaactgcattctttttggttgttgatttctcattttctcaaagcagatgcccaaaatctgtggaggtggttgtcattgcaaagaagtaccacagggcttaaaaaggcaaaatggaaggattccctctgcaagtgttaactgctttcagcttctctcactcatttaaaat

SEQ ID NO: 476620 - DNA, 755 bp, Homo sapiens
gcagacctgtccttggcttgtgcagggccttcagcgggaaagcagggctctactaagagcaggtcttctcactgatggcccagggcaaggcgcagtggctactcattctctgcaaagaaggaggagaaagggaacaaggagaaagtcacaaagggaaaactcgtgctgccaaaatgtcaagtttagggtattccgggacagaaaaaggcacatcccagcaaaggaggacatgtttacccacatttatcatgtcagcacctgaggtggacagcagaagtctttctgcagagctagtgcccacgacacttcatgctgcagaacacatcctccgtaaacactgtagcatgaatgatgacagaggtgaaagaaaaggaagaaaagattctggagacgttgtacaggaaggatctactttatttgcaggagaaagcgctatggcagttgctggaagattgcttctgaccattggctatctctctgacctgatgggagaagggtgacaaaaattggacacttgaaaaacaggccaaaaaaaaaaaaaaaaatcaaaggaattttaaaagaaccatgcacaaattcttaattagattcttttatccaaatccattttgtctggaaaattatgccttagtatgtatctgtattctattcctccataatctattttattttattttattttattattttattttattttattttaatgttcacaagaagctggatgctagctaccaaatgagcaaatcagctac

SEQ ID NO: 476621 - DNA, 515 bp, Homo sapiens
caggaggaaatgagaaaattatcacaattctttcagattcacaaatgccatgttccctttgttttaaggccacgaaggtcaagtaaggacccaaataactaccaaacatctcagagaacgctttgggcaagagtgcggagacaatcaattgcattgttcccattacagtttgcagttattaatttcatggaagagagcacgtcacaccgggggcaagacacagtaggaactgccagattaagtagcacagatatcccggaatgtaagaagcaccgccgttgtcaacaggagaaagaagcgggtatacaaaccaagagacataaaccggacaaggaactggagaatgcgggcgagcctgccggtactttgggccgccaaatccctggcaggacaagattgagggcggagcttctcagatactgccttgggcaaagttctacgagcctgagagtgtgaagaatacggatttccaaaataggtcatgagggagacctctctcctcacttctcaatttc

SEQ ID NO: 476622 - DNA, 604 bp, Homo sapiens
aggctcgaactcaggaccttcagattatgagactgacgcgctgcccgctgcgctaagagggcgacgaagtataatgccgcgccagcttccacaggaatttcctaatttctttccccaggtgcgcacgcacacgtgtagatgcctgtgcttatatgtgtacatacacgtatgcatacacatatgcattctcgtgtacatacatgcacgaatgctcgcatgcatgtttaggtgggtaaacacacatgtacacacatgcatgcagacatgtgagcacatgtctatctgcacatatatctacacaaatacatgcatgcatactgtgtacacgatacatggatacacatacatccatgcacacacacccacatgcatttgcacatgcatgtgtacatatctttatacactcacacatgcacgcacgtgtatatacatgtatacatacacatatgaatgtgcagctacgtgtgtacatgcatgtacttgcatgtatgcatatgcatatgtgtcagcaaatacacacatacatacacacatacatacggtgtacatgcatgtatacataaacatgcatgcatgtatacacatgtatgtgtagatacctttg

SEQ ID NO: 476623 - DNA, 2118 bp, Homo sapiens
cgccggatgttcctgtgtaggctgtgtaaggagtgaccggaagtagaaactgggtgctccagtggcgcaatcggttagcgcgcggtacttatatggcagtatgtgtgcgagtgatgccgaggttgtgagttcgagcctcacctggagcattgttttccaacccaaaatagcattacttgaagtgcctttccccctgtaatccgactccatcgtctttaacgtgtttggaattgtgtacacagtttattgttattggtttccttagcctttttagaaccaagcaacgccaattaccaacaaaatccgttgcgccgcagtgagttagctaccttctatctccactttgttctgcacgtcgatctcaggagaagccagctcccatgttaagaagttcaaatacctagagactgcgatggtttgcagaggctcaagctaaccacatggaaagacatggagagatattccttgccaaccctcaactactccaactattctaagacatcaaacctgtcacccaccggtctgaagaggaggatgagagacaaagaaaaaagttgtctggctgcctctgctgtctacagattgaagaagatccatccagctgagcccagcctagaccagctgacttctccaataagcctgtatgaaataaatgcttattgttatgtgaccttgagctttgaagatagtttgttatgcaataatttaaattaccacagtcctaccactgaagatggaaacttagaccttccacagccctcttcctttatattcaattgttcactaaattctccagaagataaaagccatattacaggaatgacggaatgggaggccagaaagaatcttgtctttacaatttcctggaacccctgaacaagccttagattgcctagtaccaggattcttcttaaaataaaaagtaaatctatttttaaagccttgattaagttaatactctgacatatgcaggcaaaagcaatccctaaagtatacacccttagttcctggaggaatcattgcagaaagtaatttcccccagtttcctagatgaggcttatggttgtaaaactgcacattaatcacagaaatgaatttacaaggcaatttggagagagatttgagttggctttatgtttccttatgaatgtcaaaactgaacgcatggaggagtcaatccactttggatgatacattcagtagcgactttagtgtctcctcagatgtataaataagtcaaaattcaagacttcccttgatccagagaatgacatggaccattatttgagagacataaattatgttcaattttcacatgtcacatctccgtattgacctgcttctgactgaatttttttttaggatatacttttccgatatcttagacaccaataacagattttggaatatgaaaattgtctttgctttcctgaagagcatcatacctagatgggaaaagctacatgcttatatttactctgggagctattggtgagagagagagaaagagagagattcctttatatataaaatatttaaaatatatttatatataatatatattatatataatcttttaaaaatgtatatataaatatattttaaatcttttcacacagatgacattttgttgatccttaaatgctgaaaatttagaaatttgtgaaatttgtgaaatttagaaatttgtgaaagctgtctaaaatatataaatatattttatattttaaattataatataatatttatatattatatattattatatataacatattatatataatacatattatatttccagcttcacccatgttattatatatattatatatattatatatataatatatataatatatattatatatataatatataacatattatgttatatattacatatatattatgttatatataatacatattatatataacatattatatataatatatatattatatgttttatatatatattatatatataaatatatacgtattatatataatatgtattatatatattaaaatatatttatatacattttagaaagctttcacaagcttattttcagcatttaaggattaacaaaatgtcatctgtgtgactct

SEQ ID NO: 476624 - DNA, 664 bp, Homo sapiens
ctacgagcacatccggacatcatgaaggaacaaactccagacctgtcacctttaagaactgctcactgcgaggactctagcaggcagacacacacgcggctggacgtcaagacaaacacattggcagaggaacacacaagcacctggatgtggagagggtgtcgagagcacgctgacaggtaccggcaagcctgcaggccatcgaccgaccggccgaacgacttggagtttggtcagggcgggctcacaacactaaagctttcacatgaaagggttgtgactgatttgagcaatcaggcagtacgtgacaggggctgcatgcaccggtgggaagtggagtggctgaaactactcagcaggtgcttctgtgcactgttgactgagaaagctgaggtcaaacctgcttccctgggaattccctgctacactgggaattccaccatggctgcatcttccatgaagccctccctgatgctcagtttatttgcagaaaggttggggccacctagagaagtcttcactggcttcatcatgtgggtcctacacttgaattaccagcattcagataatcaatagtgtctacagtggtctatcttttctaagatgaaaagaactaatgataggttaggccagtgctttcaaactgtgtttaagtttccattag

SEQ ID NO: 476625 - DNA, 519 bp, Homo sapiens
ctctcgtcttctggtcacttctcacaatgtcccttcagctcctaactctggagacatgagacatcaatcaacatatgtaagatgaacattggtttggtctggaaaggtgggacaactccaagcggggggagagggcttccaggtcataggagagagaaattgtattatccttcaaatgagataacacttttgaaatgtgagaagcaaattggtctagggaaaccagaacattcactaatgtgtcaatttcccttgcccagaaagccaaaccatgcagaacatgaaaatattcacttcctgacaacacctttcaaaaagagagatttaagaaaagcaattcataaccaagcttccccagggctccaattcccgcacaaatttcaaacatggaaagctagaacggaatgctacagaattttatttcaagacctccctatgctgtctatgcacgtttctttatctgcaaaacccgccccgatagtcatatcttggtgacttttgggaaaaccatgaaggagc

SEQ ID NO: 476626 - DNA, 1151 bp, Homo sapiens
ggtcatagattcccgtttgtccctgcctaagaacactttgtggtggttcctactttctctctctcataaagaagtttcacacgcctcccgctcctcctgttgtgtgaccgctacgcgcgccgctaccgtgctctcccggctccaagcgcagaccaagagttccgctgccagcaaggctgctctccgcgtgccgcaaaaggatctcagagtaaagacgatcttaaattcgatatgtgaagttgattcccatggaaacctcgtcatcctctcatgacaattatgacagctttgcttctgataattttgcaaacacgaggcttcagtcagtccaggaaggctgctggaccagcagccagtgcagacactctggacttctcaggcaggcgatgaagtttccagggcgaaacaccaggggagcagccaataaaaaagcagagtaccccaaaccctcaaggaattctatgactggttccaattccgattcagaagatgaaatattagaagcttctctggtttgttccccggaagacattccccgccaggccccaactcacaatcaaggagaccccaaggtcaggatcctcgggtcccttggcgctctacctacggaagagaaggaagaaaagacagaggctaagtacatgttggtgagaaagaggaagattgtggacggctacatgaacgaagttgagatgctcagaaatcgtcccgccagatcacccatgatccttccacatataattcggccaccggaagaaattacagaggaaggtttggagaacatctgcagcaactctcaagagaagatatataaccgttcgctgggttctatttgtcatcaatgccgccagaaaactattgttatcaaacaaactgcagaaacccagactgttggggctttcaaggcctgttctgcggccccgaccttagaaacccttgtggtgaagaggtcaggaatactctgctggatgcgaactggcattgtccgccttgtcgaggccgtgcaactgcagtttccgctcgcagcgagatagactgtgggaaactggggtccttgaatatttagccaaatacaatggctttgggaatgtgcatgcttacttgaaaagtctgaaacaggaatttgaaatgcaagcataatattggaaaat

SEQ ID NO: 476627 - DNA, 863 bp, Homo sapiens
gaagagatcaaccagaatcctagaaaagttattcccaggtgggatgaattcattatatgaaggaagcggctctgagtagagcaagtggtagactgtaatggatatgatggtgttctacctagaacccaatggttttctacattgcccaatgttttgtggagcaagctctttggtggctgaaaaccgacgagtttctctagaactaccgagaaaaagtactgaggaaaatatgtggccgatatggggatcgaacccacgaccttggcgcttttggcaccagagaggaccctgttattatataagtgcagcggcctgtcttccagggctgtccggagatcttggagcctcagggttcttggggcaagcagatgttgagctgtgtctccaggctccgactgggacaacatgtctgaagagttcaggctacaagccccaggccaccagtagatatccttcacctgaggaaattggaacaccttcgcctcggggctctatgggcatcttctgggtgattgccatctggcacagcctaggggattgcgaatggatgaatgggacccgcccagaacctgagttccccacagcaagtccgctcagtccctgtcttaagccatccctgtccttccccacaacagaggataagaaggcttttgttcaccatttcaaacagttaacgttctaattttaaagtgtatttggagaaattgaatttagcatttttattatattctctgagaacttctttagtttcactgagaatcatttcatgtatctgattttgtaaatcagttacccttttaaaaaataacaatttttcactgtatttgtctttttcgttattttctctatgaactagctaatac

SEQ ID NO: 476628 - DNA, 879 bp, Homo sapiens
ttctgtgaaggaaaaaacaacaacaataaatgtttgccagaaatggaagaaacctgttcaaaatggatcataaagcagcgaagacaactcgcaatatcaacaatgcactttggcccaggaactgctaatgaacgtacagtgcagtggtggttccagaagttttgcaaagtgtcttcttcctttatcctacgcaacaaggaaccatttctccatcggattgtgacgtgcgatgaaaagtggattttatacgacaactggcgacgactagttcagtggttggatcgagaagaagctccaaagcacttcccaaagccaaacttgtaccaaaaaaaggtcatattcgctgtttggtggtctgctgcttgtctgattcactgtagctttccgaatacccgtgaaaccattacatctgagaagtatgctcagcaactcaatgagatacatcgaaaactgcaatgcctgcagccagcattggttaacaggaagggcccaattcttcacaacaacgttgactcgactgcacgtcgcacaaataacgcttctgaagttgagcgaattgggctacgaagattttcctaatccatcatattcatctgacctctcaccaatcgactaccacttcttcaaacatctccacaactttttgcaggtaaaacgcttccacaacgaggggatgcaagcattttctgtccaatcccgaagcacagatttttaccctccaggaataaacaaacttatttcttgttggcaaaaatgtgttgattgtaatggttcctattttgattaataaagatgtgtttgagcctagttataatgatttaaaaattcatggtccgaaactgcaactacttttgcaccaacctaaatgttaattttaac

SEQ ID NO: 476629 - DNA, 868 bp, Homo sapiens
gccttctgaatgtctagtcaatacatgcagacaatgaatcagattcggatcctttcgaggaccccagtgtatgtacatgccgggaaacaccctagctttaccccatatccacctggagcgtccttaagtggaactttgccatgcttcggagggagccaggttcacagcagtgagccattaaacaaggcgcctgcgaccctaatccctgacgtctttgtggcgatcgggaccatcaagggaaatgatcgtggagaaacaggcgacgcatggtcagggactcttggtctagaagcggagactttacttacggaaatccccaagagcctctccttgaataaagccagcaggcgacagttcgcattaggaagagagcagagacccctccaccccaatctcgccccctttaaaggcagggatctcctcctattcagaacactgccgacaacatgcagagagaaacacctaatagaacagtattctgcttttgaaagctgagagtgatcgagagatcgtgcgatggtgccattgtaaagacgtccactgtcaaggtcagctaagggaatcttggaaaacagaaacaccccgaaaaattgcaagttgtttccgctcggtttcgacccgaggacctttcgcgtgtaaggcgaatgtgataaccactacaccacggaaacctgtgtgctgcgttggcttccttcgttaagggagaattaaatttttctgtttcagctttggtaacatcgagttgattggcctttcctttcagtaaattatcaaggttaccatgcttttctttactacaaagtcctccattaaaacttttttttttcagacgtgactggagaatttaagaaaatttcccctcagatgc

SEQ ID NO: 476630 - DNA, 686 bp, Homo sapiens
gtttctatcctaactggaaaagatgactctggagaggtctccgactcttcagccaaacatgattcccagcgtgtcccagttgttgcgggtgtctcctgcatccccatcccctgaaggagcaggaagcttgatctctgggaatgcatcctgcttagtctccttctgtcagaacgtcagaataaggggtcctcccagagagctaaagttcagtacagtgacttatgctaatgggcaaagcattctttgtgtagtcgtggccgagtggttaaggcgatggactagaaatccattggggtttccccgcgcagggatctacttcagtaaagtaaacatcctcattcatacagaaaaggaaattccaggaaatccaggatcaaatacaagtgaaagcaaagactcagatatggtcgccaagatgggaataacttgggctttattaagcaaacaactaagcaattaaatatattaagtaaggcaattttccttgaaatcatataaaaacgaactgacgacgtcaagccagactggcttgtccaggtgtccaggacgatgatgaggcaagaggtactgaaaagaaactttttaaaaaatcccacttaccagaacgtcttctttctactgtctccctccaagtgggcaagtgggccaaggtgctctgaagggatgtatggactctccctggggtg

SEQ ID NO: 476631 - DNA, 479 bp, Homo sapiens
ttctaaagccacctggacgcagtaaatttgtgccacaatgtcatcgtttgctcttgggggcaacgaacacacaactaaagcaataaaatgtctttggaaaacaggaggggaagggcccaagcttgatctgagaaacccagcaattgctaaaatagcagtgcagcatttactgaagtctcttctgccagtggctcccatatgtccataccttggaatgcttttggctggtgcttcaagaacagaccatggacctagcctcctagcttcccccaaaggaattcctgcagaagactatgggaaaagcttctttgtgatcttctttgtttggaatgatggaaaacatgagaaaagagccattttggcccttctgatgatagcgctgtcctctgaggcgcagatcttcctggggtgcctgcaccctctcttcaccgccctccaatagcttgacctaggagaccatgtagggcacctgcggttcc

SEQ ID NO: 476632 - DNA, 666 bp, Homo sapiens
ctgtcattcccgacactggctggcagactggcagagcccagcggattcacagaccaatagatggaaatccgctgcttactttctcgcaggagaaaatgatctccaacagtgctgcgggactgcgtccaaatggcactgaaaatatcccaggattctgtaaatgtggggttttcctttgtcgattgactatccgaactgtgatttcaccaccggaagtcatccttacatgtttcatttcgttacacagttcaaatgaaccaagctattgcttaaagccagaagctgcatcgcattcttccccaggccagatgcctcctcacccttttttgacagaagtcattgtaggcctaaagaaaccacattataattatcgattttatgatgcttatttaatggactgtaagctccctgatagcaggcatcatatcttatttaatattgtatctcagagccttgcagagtatgaaccctggtctctgctaagtaacagtttcttgaatgaagcacagctaaagaaatacaaccaggctgggcacggtggctcaagcctgtaatttcaggccaagtcaggatctcaagagaatacagatgtcttattctaattgcaataattttagaaggatttaataaagggactgtttaataaaggtgtctagtaagggtatg

SEQ ID NO: 476633 - DNA, 606 bp, Homo sapiens
ccagcagtaaagccccctagggggtctacagaagagggattaagttcctgcagcctaatcccgggatttctggggtgtggcataatggctgtcattcccgacactggctggcagactggcagagcccagaccaaaatcgaacaatcaagcaacaaagttggccttaaaattgaggccccagagatgaggttactgagcgggtatatgtcacagagccaaactttctgcaatgaattggaaaagaacatcaagacagagggaggagcgctgggggtgaacaccgccttgacctttgtaacctgctgcacaaataaggagtggttgctgtgccagttttccctgaagaggtgcctgaccagctggctctgtgaattcgaatacagttttcaggcaggctctgggagagttttggggaatcccgaaagacagcccagagatgctggactgcgaatgcaggcgcgctgcaggcgaggctgggagggccgccaggagcgctgcgggtatcgggagacacgcagagggaggggcaggcggcgggctccgcttcttcgcgtcctggctctgaaagcaaccacaggccagcggggcggtgctaggtgaagctac

SEQ ID NO: 476634 - DNA, 899 bp, Homo sapiens
gaagtaccaccaggagcttcgatgtttttcattcttctagtcctcaagagggcaactgtgcattggggaaaggaaaatgatcagacattttgggggctactggacattggctctgagctgatgttgattccaggggacccaaatcgtcattgtggtcctccagttaaagtaggggcatacggaggccaggtaattaatggagttttagctcagatccgacttacagtgggtccctggactcatcttatggtcatttccccagtgccagaatgcataattggcatagacacacttagcagctggcagaaccctcacattggctccatgactggtagggtgagggctgctatggtgggaaagaccaaatggaagccattagagctgcctctatctagaaaaatagtaaatctaaaacactcagtcatcaaaggaaagcttgctacaccagacttgagccagtttatagactcagaaccctttgaatggagtggcagtcgggtcttcttgaggaaggacctggagaccccagatcactgtggtactccagtcagagtaggggcttatagaagtcaggtgaccagtgaagttttagctcaggtctgactcacagtgggtccattccctgacctatggaatgagggctattaaagtgggaaagaacaactggaaggcattagaactacctctacctaggaaaatagtaaatcaaaagcaatactacatttctgaagggattgtagagattagtgccaccatcaaggacttaaaagatgcaggggtgatatttttgctttcccacatcagagctccctccaggttctcaggccttcaaaatctgggactccagaggagtctcccttctccctggcccactgcttcctcaggctttgggatgcaga

SEQ ID NO: 476635 - DNA, 804 bp, Homo sapiens
catctcctcagaatctcatcagctgaggaaacaggagtccaggtcttatttgccgcggcacgctggggccaccggcctctcacacaggcggccttcgcccaggtgcagccgtagggactgcggctcgtcagcctgacgccatcaagctgcgccccagccagccagtcaatggctgtgtccagagcttcccgcctcgggctcagcccttcctggatcttgagtctagagttttggtatttttggttttgttacgtggaatgtataaggaaagggaaaaagcgccgcaaatatgacaatggttgttacagtagtttctctagagtagtagttctcacgttcacttcaccctggaaggaccctccgtctgaaactgggcggaaatacctcccagattcttcccactcccctctctatttcagcttgggtaacttgtttcatcgaactccaccccagctgaaggagccaatgctgtcccaagagaaggatcgctatggggccctaactaacctcagtctctatgctgatgtgacccaggttttgcatcttgccaatagtgcatttttgatctgcgacagcagcagtagcagcaacaacaacaacaacaaaaacaacaaaccaaaccaaacaacaacaacaaaaaaccagtatgatactgatacaaagacaaacatagagaccaatggaacagaagagagggctggagaagtgtaatgcctcctggtttattgttttttttctcaagattatttagtgattcagggtcctttgtagtttcatataattttaggattgttttctctgtat

SEQ ID NO: 476636 - DNA, 552 bp, Homo sapiens
tttcgaaccggggacctttcgcgtgttaggcgaacaaatacttgccgacctccttgtggaaaaccctccctttccgctgtctgcattcggatgagaaccagatcaccagggagatgcagaccagggggacacttcctcctgttaacactagcggagctggtggaacccagccgaccatgcaggagggaggagctggcaacgccctgaacgatgccccaggttctataatctcaaagctgccctttcttcccagaaactctcacagtggtggaacccggacctgtaagactgagctcttgggactattagcatttgttacagagcagaagcaagctgccttcttccagattcctccttataacttcactttgcatataaacaccacacactctctgtgcttagaggtggtggttgggctgccagaccagtctggagaaagtctgtgcttactttttcctctacttagtattctttcttccatgggtgccaggaacagagagccccttctcaccttgagatcatgtgagctggtagtagctggatcatgaataa

SEQ ID NO: 476637 - DNA, 951 bp, Homo sapiens
tctctctctctctctcgctctctctctcttaaaagtcctttcagaggctcgcgcggccccacgggcttcctactgccggctcaccaacgggaaatatgcgcaggggagactcccaaacggacacaaaaaagattcctcatccctgcttctcataccccctttttcgcacatacacaggagcccatactgtgaaaatccaccccctacaccacagctgattgctgcgatgggtctctggggatgttctcaattcgacgcctgttcatggacagcgtgcttagtgcaaattgaatgtaacagtttgcaggttggggttggtttccgggatttcagatttttaaacggacacaccgacactctggaagtggtcttcgaggaccgcatgctccctcttgtggatgacaacagttcccaacgccaaacaaacaagaaaaccacaacccaagacccggagaacagcaaaagtgagagtttaacgacgatcttgcaagatcggttgtctgatgagcgggcacacccagcacactttgaacaaccgatttatcccgtggtgcgcaggtccctccccgggttcctcacagggggtactaatcccattcatgaggacgccatccttatgacctattcacctcccaaaggccccacctcttaataccaccataatggggattatgcttcaacacaagtatttgtttcttgtttttgttttcaacataaatatttggagggtaaccattcagatcatagtagtaccagtatccaaaactgccaccaaatagtttgttgtaagttaagataattgcagagcatcacttaacttgaaaagcattttctaaaatgtccaaatattagacacagttgaatatcccatagatatatatctattcagtgtgcaattttgattcattggcttatttagttatatattgtgacggtaacaatgctctattt

SEQ ID NO: 476638 - DNA, 468 bp, Homo sapiens
atttcaaccaatggaatcgctgttatgaaacatgcttctttggattggacaaacttaaactacaacacgcctgaccccaccaagtcggccacagccccgaaaaagggcaagaagcgaaagcgcagccgcaaggagagctgctccgtgtacttgtacaaggtgctgaagcaggtccaccaacaccggcatctcgtccaaagcaatggggatcttgaacaccttcgttatgccatcttcgagcgtattgcgggcgaggcttcccgcctggcgcgttacaacaagcgttcgaccatcacctccagggagatccagacggctgttcgcctgtcacgcatgctgtgtccgagagcaccaaagcctgttgaaattaggagaccaactcctaaaacaaatgaccacttcaggaggtcaagattttggtttctttgacacccagcttctatattttattgttcaaacttcagttac

SEQ ID NO: 476639 - DNA, 834 bp, Homo sapiens
tcaggccatccttggcttgaagaagtggccgccgccgagttaaccatttcctctgtgaaagccagcactgatcaagatggcttgtttggatgttcgtgcagtggaaatgctggcttttgcttttgccgttctcattgtcctactgcccctcactcttattcttgtctcctacggctacattgctgcagctgtgctaagcatcaagtcagctgccaggcaatggaaggccttccatacctgtagctctcacctcacagtggtctccctgttttatgggagcatcatctatatgtatatgcagccaggaaacagttcttcccaagaccaaggcaagtttctcactctcttctacaacctggtgactcctatgttgaatctgctcatctatactttaaggaataaggaggtgaaaggagcactgaagaagtcacctgattgtctaaatcaggggtccccaacccctgggccatggaccagtaccagtccgtggcctgttaggaactgggctgcacagcaggaggaacacattgttaaatttcaagtaaattctaacccattagtcctaggaacgtattatgacttcaaagaaattagagatttacagacaactgtcttcttgttgtatcctcacatggtggagaacagaaaggatgagcaacatgtcatttctgttcttataaaggcacaaatcccattcatgactgctccacaatcatgatataattacctcgtaaagtccccatctcctaatatcatcacattgggggtaaggatttcaactcgtaaattttgtcatttatgcttgactaaatgacaagcatttagtccatagca

SEQ ID NO: 476640 - DNA, 1040 bp, Homo sapiens
tccttcctcgcctcttcaagatcccagagaggaaagggcagcatgcctcacaggaccaacagaaagcgggccatccacaccgagctggtggcccagcaacaggtaatacgagaaatgaagccaacaggtgcagacccaaggatcttatctctagctgctgaagttgcaaaaagccctgagtggaatgtccctgttatactgttgaagttaaaagccattgctgtgcaggcttggagccaggagaagatgcagaggaactttccaatgaattacttccatcagctgcagaaaattttctatccagtcataagaagtactgctgcaaaactcctactgttgatggctgaatcctatcaggaaattttgattttactgagacaaagtgcctgctacaaaggactcagaagtctactaagtaaacaggaaactgggacagaattcagtcaagaacttagacagctcattggccttttaagcccaacggtctatcaggaagtagaaaagcagaaactacatcaagcagcatgcttgattcaagcctattggaagggttttcagacaagaaagagattaaagaagcttccatctgctgtgattgctttgcagaggagtttcagatctaaacgagcaaagatgttgctggagataaataggaagaaggaagaagaggacctcagattgtgattgcaacttcaaagacagagagccatgagactttcccaagaattgtggctgagtatgctcaaagtagttcatccaggtcaagtggagaaacacaattgggaaatggaagagaaatcagcactgattatccagaaacattggagagggtacagggaaaggaaaaatttttgccaacagaggcagtctctcacagaatataaagcagctgtcatacttcaaagagcagtgtttaaattcctagcaaagtgccgtaagaaacagaaactatttgttccttggtgaggactccaagaactcactgatgcatgccgagctgaactgaagcaacaagcggatgactatgtcagaagacattc

SEQ ID NO: 476641 - DNA, 2068 bp, Homo sapiens
ttgaacagctgatttttccccttgttactaagtttgtggtgtcatttggcactatatgatggtatgaagactgagatcacaatgttaggcatgaagcaggaattttgtgaagtaacagaaccacatagggaggagtttgatggatgtaatgaaactgtgtctcagcatgccaaacatagaagagacagtgagcctaatggcaatttggaaatgcacgatggggatgccacaggtgaaaaaatatataaatgtgatgagtgtgggaaaactttcacctggatcagaggccttcagatgcataggaggatccataatggagaggagccatacccatgtacagaatgtggaaaggccttcatcacacatgcggaacttacccagcatcaggggcttcacagcaagaaaaaaacccataaatgtaaagagtgtgggaaaagcttcagtcaaaaggcaggactcttccaacatcttaaaatccacactggagaaaagccccatcagtgtagtaaatgtggcaggtgttttagttggagatcagttcttaggaagcatcaaagtctccatactggagagaaaccttttgaatgtatggactgtgggaaagccttctgccatagttcacacctcattgaacatcagcaattccacaacaaagagaaaccttatgcatgtaatgaatgtgggaaagccttcaggcagtgttcacctcttactgaatatcaacgaattcacagcgaagaaaaaccctatgaatgtaaagtatgtggaaaagccttcactcagtatgccggccttaaccaacaccagagaatccacactggagagaaaccttttcaatgtccctcaatgttcaggcttaataaacacaagttaggaggcaagcatggaaaccctcctgagccaagaaaatataaatgtgatgagtgtgtaaagacctttactctgtcaactggcctgaggaagcacaaaagaatccacactggagataagacttaccaatgtcctgagtgtggaaaggccctcacaaggagacaggatcttatcgaacaccaggggattcaaaacaaggtgaagctctatcagtgtcaagtgtgtggcaaagccctcagtcagaagacaggtcttagttgccatctcagaatccccccaggagagaaaccttttgagtgttctgaatgcgggccagctttctgctggaagtcagatctcaacaaacataaaagggtccactctgagggaaaactctataaatgtgaagagtgtgggaaagcccataggcagagagcaaccctggatcaacatcagagaagccacattgtgccaagacctgggagtggggtgagtggtgcaaagcctgcagtggaagctcagccctgattaatccccagagaatccactacaactgaacaccttgcccacgtgtttggtgacaacttcaagtagtatccaggattttttcttactgagataaaatgtttcttgaacttcattgtttaagaacatcatggatgccacatttaagactttttataaaaatcataaatactgtgaaagttgagaatttaggaaaataaacatcgaggaatttacctgcaattaccttttgtaaatgcaatgaagtatcagtgcaacaaaaaagtatacaagggcagttgtttaaaaattatatttttctgctgaattatttattttgttttgaagccatttcaatttctgactaactttagcatagcctagtgttgaaattacttgtttgagtaccagttgaggacactggaatatctaagagcatggaatgtgcaaggtatcatttttctttggctactttcaagaattttttctttgtctttggtttccagaaggttaattattacctgtcttggtatggatttctttgggtttgttatgtttagcattttctcaacttcttgaatttatctgagaatttcttgctccttggtatgaagaaggatttttgactgaaacctggaaattgttatattatgttctgaactctggatcttattcagaatcttttgtttaacctggctttctctgatactactct

SEQ ID NO: 476642 - DNA, 713 bp, Homo sapiens
acactgttttccaagatcatgcagcagccgtaaaatgtcgcaatggtcccctctttgagcaattgctgcctttttacgagagttggtgttgatcagtctatgataaatcagcaacaggacagtgaaagaaagaaagtctttttgtgtttagcacaagattggctcagtccagttgctaccgacactgggaagggcctgtggggacccagtttcccaaatatcaaccccaaagctgtaaaacgaagtttgctcagtgagcagttaaggagctctctcgatatctccggtggctttcgaatgacgctactccgagccgcggctcgctccgaggcgggaagttgggtttacaatcagttctacgcgctgccccgcggcccttcccctggccacaacctctgcatccacccaaatcagctgcccctgtttgcagccacgagggagtcgggaaccaatttatccactcatctgttgaaggacagttttgtaagctgagctggttacaaattttggcaattacaaataaagccgctattaacattcatgtgcatgtttttgtatgggcataagtttggggtaagtactaaggaatgtgattgctggatcatatgtgtgatgttatgtcatcatatgagttgaattgttatttgcgtgaactgggtagctacaatcttaccacaatagcataagcattagagacatataaatgctagcac

SEQ ID NO: 476643 - DNA, 1988 bp, Homo sapiens
aacaagacgaccctcacttaacgtggccgctgtcgccgtgggcatgctgggggcgtcctacgctgccgttcccctttatcggctctattgccagactactggacttggaggatcagcagtttcaggtcatgcctcagaccagattgaaaacatggtgcctgttaaggatcgaatcattaaaattaactttgatgcagatgtgcatgcaagtcttcagtggaactttagacttcagcaaacagaaatatatgtggtgccaggagacactgcactggggttttacagagctaagaatcctgctgacaaaccactaattggaatttctacatacaatgttgttccatttgaagctggacagtatttcaataaaatacagtgcttctgttttgaagaacaaaggcttaatccccaagaggaagtagatatgccagtgtttttctacattgatcctgaatttgctaaagacccaagaatgattaatgttgatcttatcactctttcttacactttttttgaagcaaaggaagggcacaatttgccagttccaggatataactgaagtcagcaactaagtcttccttcaaagttgtgatttttgggaaaatcatgtatcctatcttctcaaaggagaaatattgtacaataatatgaagacttatattttaaataattattttttctcaactaatttatttcacttaaaattgagagaacaagttcagcttttatcataacaaacccacatgcctagctagaatatatgagtgactattcaataccatactgaagagtttgatagcattaaaataagccgctttgttttttaaatatgcaggcatgggttcagcttaattctataattcccttccagattattaactcttcatacttatagcaaagaatctgacaatgtttttcaaaaatgaatgctcagggttatttgtttcaagtcataggccagaacttctgaccatgtttattatgtctaaaagagttggttgctattttccttcattataaacagtcagtattttaaaagctcaaagtagaagaggagtcaccaagccctaacagcttgtccaaagatttaaattcttatttcaaatttgatttgtcctttaagatttagggctattttatattcagagttctgaataattactttgaaattgtagtatcatgaaattgaaataaaatacatctactaggctgctagccaaagcatcatcattacaagtccatgaatgctaaaatgtacaagtgggattgtgaagatttactgacatcaaaagttcttctggaaacaaacctttgtaaaaaaaaaagtgtaaattattttaatagtgatttatttgtcatcaaatgtacaacttattctgaatattttcattttctgtgttccaaacagaaatgttaagttgcagtaaaaagagaaaaaaagactatttagaattacaaagaatcatatttaaaggctgcccaatgtagagtctagtgacctgttcaggacacctgaaatataattaaatgacaacatcaaggttttaacaatttataattccaaaccagaggattataaagaagtgcaaattgacttttacattcaactttagttaaatgaaggcactcaatattcttcctgaataatacattcagtttctcacattttatgttttcatctgttccaattattttgtagtaaaataatctactcttatcacagctgtgtgacgatttctaaatgtaggaaggcctgtgaaacatatgacactgcagttaaatttgttggcctaaggactaagtaatttttcttctgctgaagttttaataaatgggagtttattctattgcactcttgtgtagtctttatctctgccaccttggccactccattcacatgctcattgtgctagttatgtgtctgctggttgttatgataattgcagtcccttggttgctggtgtttaagctctaccttcttacttcac

SEQ ID NO: 476644 - DNA, 708 bp, Homo sapiens
ctgccagcacgctgtcacctctcactatatctggttgaagtgactgctatgagcttaataacatggcgatcagagtcatcctaagatcacttctcataaaagataaaggaaaacaaaaaatagatctgctagtgccttataagaagggcatagaaatcttggtttctactcatacactcctcgtcttctttgctaccgagttgggcgtatggtgttctgacagtcatttgcactcaggaggcagctatttggaggaccggagcgtcaaccccttcccaatttctggaggccaaaagtccaaactcagtatcactggtttgaaatcaaggtgttggcagggctatgctccctccggaggctctagggaagaatatgtccttaccttttcccagcctctggtggctgctcgcattccttggctggtggtggcattgcttctatctgtgtccgtgtggtcacattgtcttcttctcttctaacgttttctaatcccaggcacttattaaatgcggatatacaagttaatttattgcaacattatttatattgttaaaaatggctgctgaaataaattcagatacatttataaaactaaatgctatacagacaaaacaaagagggaagaggctctttctttgttgacatggaaattgctgcaacatacataaagtgaaaaaggcaaggtgtaatagaatgggtttggaaagc

SEQ ID NO: 476645 - DNA, 652 bp, Homo sapiens
tctggaaacgggaagaatattatgaaatgctttgttttgaaaaagtccacaaatgttgggaattattttttatcttatatcgttatggttatttttgtaaaattccaggtggattgcaacaaaggggtaacaggcaccatctatgagtatggagccctcaccctcaacggcgaggagtacatccaattcaagcagtttgcaggcaagcacgtcctgtttgtcaatgtcactggaattgaggagagggtacagaatactgtagaggatagccttggaatttctctttctctaccactcccagggtggagcaccaaggagtactcctgggaatgggactggaactggagtgtctggttgtgtcaccatgggacattgtatgagtggggccggggggatgcagggataggtggtcctcggtttattcatgtgataaatggatacattcagtgatctttcactgcttgagatgcctgcctattctggaaacttctgggataggccatagatacatgggttgaagcatatccttatgatgttttgaattcaatctattctattcacagtgctcaaatattctctttacttttgaattatttgatggtgaggctaagggaagattgaatggaaaagaagcatagagaaaagaagggag

SEQ ID NO: 476646 - DNA, 656 bp, Homo sapiens
ctggagctcgcatgtcattgcttaacggtggtggtcgcccttacccatccttacccattctgtctctagcaggattatcaaaaaaatcactccagcctcgcgtctatatcagcgtcactgggaggccagagctgttccctccagcggcgagctggatctcatttttctttttgaggcggaagggttgggcaggggcctcctcgtggctggggctccagcgcaaaccagctgcctcaccagctctggagctcgcgccgcttggcctcaacccactcacgcggtccctcccattggcttgcctggctttatctcacctgacgcgccatgcctcgcctacccgggctctgtcctcaactctgccaccaccgctgcgtggccctgctcgccctgcagcccgacccctgccttgcccactctgagcctccgcgccagcccatgtatgccatggaaatatggctgttggaattctggtgttttacgaccttcttaacaccgtctgcaacaaaattaacacattgatgaatctgataattttatgggtcaactttactgggccacaggatgcccagacatgtgattaaacatcatttctgggtatgtctgtgagggtgtttccagaagacagtagcatttgaattgctggactgagtaaagcc

SEQ ID NO: 476647 - DNA, 739 bp, Homo sapiens
cctggaaaacctttgtatggacactctgtatctagttaacctgatggggatgtggagaacctttgtgtctagctcagggattgtaaacgcaccaatcagtgccttgtcaaaacagaccactcggctctaccaatcagcaggacgtgggtgggggccggataagagaataaaagcaggctgcccgagccagcagcgacaacctactggggtctcctcccacagtgttgaagctttgtttttgttgctgtttgcaataaattttgtcatggctgactctttggtctatactgcgtttatacattccagcgaagccacgagcccaccgagaggaacgaacaactccagaagcgtcgccttagcagttgtaacacttgtctggagagtctgcagtttcatttctgaagccagcgagatgatgagcccactggaaggagggaacaactccagacgccctgccttaagagctgtaaaactcaccgcgaaggtttacggcttcactcctcagccagggagaccacgaatccatcagaaggaagaaactccgaacacacctaaacatcagcaggaacaaactctggacatgctgcctttaagaactgtaatttcgtgagggtccgcggctctgttcttgaagtcagtgaaaccaagaacccgccaattccggacccagtgttatgctgaaattttcaggggctgtcagatttattctcttaaccacatttctgaatatatacaaata

SEQ ID NO: 476648 - DNA, 788 bp, Homo sapiens
gaggacaagtcgatgagagattcccgagtacgtctacagtcagccttgctgtaagcttgtgcgctcggaagaacctagggtaacaatgggacaaactgaaaaactgtttcaaacaggagaagatagcgtttcagtttctgatgcccctgaaagctgtgtaatcgattgtgaagaagaggctgggatagaatctcagaaaggaacggaaagttcacattgtaaatatgtagcagagctggtaatgactcggtcaatgcaaaatgtagactataatcaattacaggaagtaatatatcctgaaacattaaaattagaagaaaagggtccaaaattagcggggccgtcagagtctaaaccacaatggccaactcctcttccagcagttcagatgcctgtaacattgcaacctcaaatgcaggttagacaagtacaaaccccagaagaatatcaaatagaaaaagataaagtctctgccatggcaatgccaatccagatacagtatccacaatatcagcaggtagaaaataagacccaactgccagtagcctatcaatactggccgccagccgaacttcagtatcggccgcccccagaaaatcagtatggacacccaggaatgtttccagcaccacagggcagggctctagatcctcagccgtccactgtgagacttaatcctacagcactacctagtggacagcatagtgcattacataaaattattgataaggcaagaaaacaaggagatactgaggcgtgacaattcccagtaacattagaactgatac

SEQ ID NO: 476649 - DNA, 638 bp, Homo sapiens
ccgccatcgtcatcatggcccgttcatcatggcctgttctcgatggtcgctgtctctttggagctgcatggggagacaccaccgttgatacaatcatcaaagctgcaagcagcatactctctggagtttgtgtctcctttgtgttctctagacattttgtagctaactgcgtcagcttctttaattgtgcccaagtcagcagctttgtcttcttggtggatggcaacttcatctattcttctgacatcaccattctgttcatcttagaaagaaaagtgggcccaggggaccggcgctcagcatatggaggacccgtgccgccggtactggtctctgagttccctcagtatttattgttcactatctctaccatctcggagaaggggatgtggcgggactatagggtaatggtggggagagggtcagcaggaaaaaatgtgaacaaagatctctgtgtcataaataagtttaaggaaaagtgctgtgccttgatgtgcacataggccagatttatgtttgactttacacaaacatcttggtgcattaaggaacagtattgccgccagcatttctaacctccagccataaggcggttttctctatctcagtaactggaacgtacgattgggttttacacc

SEQ ID NO: 476650 - DNA, 946 bp, Homo sapiens
aaaagtagcctaaggtctacgttttgggtgggcgttgttttggattcccgttgtgacttgaagggaaactttcacaatgttcggagcccttgatgtactgcagatgaatgaggaggatgtccttaagttccttgccgcaagaacccactcaggtggcaccaatctttacttccaaatggaacagtacatttataaaactcgtgccattgctgccattgaaaaccttgctgatgtcagtgttatatcctccaggaatactggccagagggcagtgctgaaatttgctgctgccactggagccactccaattgctggctgcttcactcctggaaccttcactagccagatccaggcagccttccgagagccacggcttcctgtggttactgaccccagggttgaccaccagcctttaatggaggcatcttatgttaacctacctaccattgctctgtgtaacacagattctcctctgtgctatgtggatattgccattccatgcaacaacaaaggagctcactcagtgggtgtgatgtggtggatgttggtcccagaagttcggcgcataagttgcaccatttcccgtgaacacccgtgggaggtcatgactgatccctgcttctacagagatcccgaagagattgaaaaagaaaagcaagctgctgctgaaaaggctgtgaccaacgaggaatttcagggtgaatggactgcaccagctcctcagttcactgctacccagcctgaggttgcagacaggtctgaaggcctgcaggtgccgtctgtgcctatccagcagttacctactgaagactggagcgctcagcctgacacagaagactgatctgcagctcaaactgctcaggccactgaatgggtagaagcaaccactgaatggtcttaagctattcttgcacaggctcttagacaacatggaaataacattgac

SEQ ID NO: 476651 - DNA, 726 bp, Homo sapiens
tgaccctaattcagctcgatggtattatggcatgtcataaggattaaggctttatatcccaggatttgatgttaagactatgttcgccatccagaagaaaatcctggtctcatggagcccacccaagccaatcaggcctttaactgatctaggcgaccctatgttccaaaaacaccctgacaagtctggagtcataaaagatactctccaaaaggttcgagaaaatctagatagatgccaacaagaaagagaaaataacatcccctggtatcaaagcatgtttaactggaatccatggctaactactctagtcactaggagagaatctgaagacataccagaagattcaatcttggaacttcgctccaggtggacggaaactgacaaagaaagttggctaacagcagtccttgaaatagatgacggctgtgagaggatccaagggtctttcggtccagaatgcctttctcctcttgacacagcgtcaagacaagattccattcagaagtttcagaaacaggagttaaaacatagcggactttaacctatcatgccttaagccctcacctttagataatagcatataataaatcagtaagaaaacggcattctttctctaaagaaggaatgtttagaattttttccgaacgaaagacgcttctggcgaaactccgagactttcaaaatacacagttgagaaaattattttcagagatggaaaaagcc

SEQ ID NO: 476652 - DNA, 846 bp, Homo sapiens
ctggagccacaacgtccccaagatgaaatccatgctgggtttcagccacggtgccggcccaggggctggcgagggtaaggacaggcagcgacccacttcctgggtcttcatttctaagagctgggaattccaccttctcacctcctcacctggacctaaatcccccaggcgactgggcgacagagcgtgtgaggagacgattgaaaaacccaaaaagaagaaaaagcaaaagccccaggagattcatcaggagaatggaatggaagacccatctatctctttctccaaacccaagaaaaagaaatctttttccaaggaggagttgatgagtagcgatcttgaagagaccgctggcagcaccagtcttcccaagaggaagaagtcttcacccaaggaggaaacagttaatgacaccgaagagtcaggccacagaagtggctccaagaaaacgaggaaattctccaaagaggagctggtcagcagtgggcctgaagaggcggctggcaagagcagctccaagaagaagaaaaagttccataaagcatcccaggaagattagaatgcaaatggacattctctgggaggtggggcataccatagcccaaggcgacatttcccaccctgtgccgtcttccccaataagaacaaattcacaaaaaagagagagagagaagtgaagtctctaatgtaactgcatttttaatttgcctctatttgtactgaattttagggtattttcacacatacctgagttttattttttgactatgggaaacactaagatgcttcccagagtcaaaagaaaaaagttataatcagaaaatttgcaagagaatgttgtatgcc

SEQ ID NO: 476653 - DNA, 565 bp, Homo sapiens
tttctaagagctgggaattccaccttctcacctcctcacctggacctaaatcccccaggcgggatcatactatgtcagtcaattcttttaaatttgttgaggcccaaggtatgagactgggcgacagagcgtgtgaggagacgattgaaaaacccaaaaagaagaaaaagcaaaagccccaggagattcatcaggagaatggaatggaagacccatctatctctttctccaaacccaagaaaaagaaatctttttccaaggaggagttgatgagtagcgatcttgaagagaccgctggcagcaccagtcttcccaagaggaagaagtcttcacccaaggaggaaacagttaatgacaccgaagagtcaggccacagaagtggctccaagaaaacgaggaaattctccaaagaggagctggtcagcagaacatcaggaacaatgcctttgtttttaccacaagatatctttctcctggtgtagccatgcccgagagagagagagagagagagagagagagagagagagagagagagagagagagagagagggcgcttagtgtcggg

SEQ ID NO: 476654 - DNA, 637 bp, Homo sapiens
gaagatcaagcaagaaagaaaaagacagaaaacaaatgcgaaaccacagcttccttggctctttttgcccatatgccgaagagccgagcattgccgccaagcattggcaccggccatgcggagactagcgaaagctttgcaattcctctacttctcagtgatgactcgggctttctccttacattcttgatgggcatgaccggtcctgtcagctggacgctgcacattggcctgcagggaatcggtggacttgttctgcctcctcggatccacagagatgccagtggtccgggtcaccttcttgtgaatgcccgccaccctgagctccaggctgaagcctctgccggcgcgcaccttgatgtgataacgcacagcagggcacagcacaatgggccagatgggtcccgactctccgggcgcggggcgatgcagcgccctttggcttgccgggccttgattctgcggatcttctggttgaaccactcttacaccacaataatcatcaacatagaagactactgtggccaaatgtgtgaaggtttttccccacacatcaagcagcagacaccagctaggtgtcctccaattcagttctgacactgtctacctgaagaagtggaatttgtgggttaaaggg

SEQ ID NO: 476655 - DNA, 735 bp, Homo sapiens
ctgccagcacgctgtcacctcagttccccgccacattttctgaatatccctatacttcctcagcagtccacaaaggttgagcgatggagcaattccaccccacctgcatgttgccgaccaccccaggattccccctgcagatgccctttcctgactcattgtttggtctctcagatcctgtttgtgatgccaattgttatgagcaaaacttgggactggacagtgaaaatgagaaaaggagaataaaagggaacaaaatggaagagaggaagctaagcacatatttctgggtatattttgcagaagacacaggatgcaaagtacaagtggaagagaaagtggggatggagccaaagcgtctgattccggatcagaagattgagggttcgagtcccttcgtggtcgtcgttttgcgttctctggttcgaaagatatttgttgattcagagcattttcccttttcttgctccggtctggctgccaattaacaactaaagatatttcatataagtggagttatacagtacttgtgtcctttcatacctagcctatttcatcactaagcaaaatgttttcaagtttcatccatctcacagcatataccagcatatatcccatattgtatgtatattcattttttaaaatttcttatattttgatgcctattctgcttacgcagttttatttttgttattttgcttatctgctcatctgttgatggctggattctccttt

SEQ ID NO: 476656 - DNA, 992 bp, Homo sapiens
ggaaaacaaagggggagcaggcatatcgcctagcgagaatggagcaaggaggccccaccggaccccacctccaatattggggattacatctcaatgaatttccttttccatttctttcattaaatcgcgaacgtagtaatgacttaacgctggttacgcattcattacaatcgaagattatattaatttgcgatgaaaccatcaaaaataaaagtgatgaaactgaaattgaaagcagcaaggttcacgctcaaggttatcggaaacaaggcaaaaggagagaaatgaaaggaaccctggaatcatttgctggcattcatcctttcaagcaaggtgcctgttacaaaatatctgctcaattagtatgtattggatacatcttttggaagtctcctagccttaaaagatggtctaaactaccccagatccaggccccttcttcagcattccttgcttctcagcatagcccgagaacccccgatccctgacactttgcttcttctcagctcccagatggatcctggacaggatgctgcaggtggtgcaggaggggaatcctgccccatttatcatcaacacagtaaaaaggggtcgaagagaccgagagcgccagaggacgccatgggctccacatccacttggattccagggaaggcggtacatctacgaaagccctaatcatagagggaaagactcctcgttcctggcccagaaatgagatgagaaatccagggccccgtacaggaaggcctttcgcaaagtccagactcaattgccttcgcagcccttaaagtttccttaggaaggtctgtgggagaacgaggttggtttaggaattggcccctgccttgtactacgtagttttgtcatccaaagtgttttagaagtgaattgaatcatagttacgccttattttgaaacactgtaattcagagaacgtaaaaccttattaaaatgcctcataatcatcttggtagagccgttggttaagc

SEQ ID NO: 476657 - DNA, 960 bp, Homo sapiens
gcaccgtgcatcgctctgagtgaggcgacttaaatgcgcgatgttaccgttttcagccgagcccttcagcccccccactgcactgtgggagcccctttctgggctggccaaggctggggtccacttcctcagcttgcagggaggtgtggacggagaggcacgagcgggaaccggggctgtgtgcggcgcttgccggccagctggagttccgggtgggcgtgggcttggtgggccccgcactcggagcagccagccagccctgctggccccgggcaatagggaacttagcacctgggccagtggctgcggagggtgtactgggtccccagcagtgccagcccaccagtgctcctcccatccactccatgggctcctgtgcggcccgagcctcccggacgagcaccaccccctactccatggtgcccagtcccatggaccacccaagggctgagaaatgcgagcacagggcgcaggactggtagccagctccacctacagccccggtgcaggatcctctaagtgaacccagctgggctcctgagtctggtggggatgtggagagtctttatatgtagctcaggattgtaaatacaccaatcagcaccctgtgtttagctcaaggtttgtgagtgcaccaatcgacactctgtatctagctgctctggtgaggacgtggagaacctttatgtctagctcagggattgtaaatacaccaatcggcactctgtatccagctcaaggtttgtaaacacaccaatcagcaccctgtgtttagctcaaggtttatgagtgcaccaatcgacactctgtatctagctgctctggtgaggatgtggagaacctttatgtctagctcagagattgtaaatacaccaatcggcactctgtatctagctcaagatttgtaaacacaccaatcagcaccctgtgtttagctcaaggtttgtgagtgcaccaatc

SEQ ID NO: 476658 - DNA, 3565 bp, Homo sapiens
cagctttttaagatttcatgtataagtgccccataatggcacacagctttactcagcaacccctgccagcttccaagccccaggatactgacctgcaccagcacatggggcagcattacctccccaacagtgtggagaagagaacatttcaccactgggtgatgagagtagacagtgactcttggcttctcaatgctagacatgattggagacctttcattgttctattagaaaagtccatgaagaagctgagtcactgcgggccaagaacatgggccagaaacgagtccgggtactctgcaactccgtgcaaagttccgaggtttctcaccctccagcccaggttctatgtcctccctctgtccaccctcaatgccttccctccgaagatcggctcggagtatgccagtcttcctgatatcctggcagaaccaataattcatgatgactacatagtggaggggtctgcaaacagccacatatctgtcaaaggacataacagccagaaggagacactctgtagcacctagggccaggaagatgatgaggtgggccacacagccagcatagctgatggtctttttgttgcaaccaatatttaccaacatatgagggactgtagttgtggtatagcagagatctaagatggagagattagtgagaaagaaatacatgggagtatgaagtttgggatccagaatgcacaccatcatgatggacacattgccaaatatggtgattgtgtatgatattaacaggaccacaaaaaggggcatttgtagccaagccctatctgagaagccaagtagtataaactcttttggggagctctcattttcccaattcatgatgactcacttatttcgcactcctaaaaaaatgtaagataggaaagcaatcaatgtttgtttattgaatactcttactggagctgaattaaatttaatgaatagctcagcatcaaatacaatttacagtcaagtggataaagcccttgtaaagtataatatggttatgtttaagcttaaaagtagttcctgtgttttcagtagtgtttaaattactttaaagaaaatcattacatttaaatgacataaagtatgtaacatatgcataacacatggaaaattgtgagttctcaatgcattttatgttctctcctcttcttacctcctaacctatcttaataaacagtttagaaagaaatattacttttactccaattattttaaatttggcctgaaaatgctgagtaatatagagggtataagagttgaatctaaatctgcaattgatctaaagaaattttgcttcttttagtaacatctttacgtgtttttttgagttgtgtctgtctcctaaatgccatgcatgtaggtccatttccacaaagaactaccgtgggtattagtaataaaattatggctacttgtgatatatagtaatgaccacagatgtcatctccccatctgcaaataccttaattaaaatagcaaaactgataacataattgttgctttacttaacatgtgccagaaactgctcagtgtgtgaaatacattctttgtaattctcatcaaacccctcacagtcatggtttgcattttattgcttctgtgattcagtaagaataaataatttgcacactcattattggtgaggtcaagactaacacctaggatttaaagatcattctttcttttataccgtatttccccctaaatacacagatagtacaataagaatgactgcatacagcacaaaagtggtcataaattaaaatagaaacaaaccaaaagtcatatattcaagttgattttcttcagtctgtaaaagtcatcagttatttagttatattacctaagtgcacctaagtttcttcagtctactttgcatgtttaaatgaaatgtcatcgaggtggtttacaccatttgaatttgcaagcataaaaatagaaagatagactgaagagagaagagaaaataagtattgacacaatttaccacagaataagataacttttccagagtaaaaacactgatatataaagtataatttgataatggaatgaataaatgaaaatgaacagagatgaccttgagatttttaacttcttccattatatatgattttttttagctatagatacacattattttttggcaaataacagtaatacacctttggttgaaaaatagaagagaatatgagattaggcttttttgaatgtccatgtaaatttacaaaatgataaatatgtaaggtaatacatacattagataacttgatttagccactttataatgtacacatatatcaaaacatcatgttgtacactataaatatatacaatttttactcattaatacaattttttatatcagaaaaagactacacagaaagataaaacataaatggcaagatagaaaaatatacaatgtttatggaaaaaatggttattatattaaaatataaataattattacataataaatagaaaaagatcaaaagtccaatggaaaaaaatgagcaatggacataaataagcagtttggggaagaaaacaacataaaatgacagtgaaagtataaaagattataactttttcattattgaagaaacacaaataaaaacaagaagaaagtatcacattgtcttcctacttagtagcattaaaaaaaatcactgttaaaggttagctgttaggtacagtgcctctggagccagaatctgccagggttttattactggattgtgtgatcctgggcaatgaatgaacattcttgtgctacattaaaaaacaatctctgacttgataaaaagagagtattgtgaagctcaagtgagacaatgtatacacatctgaacttaggaccctgtcccaagcatactaagcatttaatgaatgtgagcttgatatcaatagcagtatcattaatactaatcactaataagtcattaatagtaatactatatcattatctcagcttgtcttgtatatgagaaaacagaaaatttactattggtggttcaagtgattgttataatttcataatattataacatgaaattattgaatttcatattatcactttgtctttgtttctagcataatatactgagtacatagttttccagtaaatggaagttaaatcaatgtagtaggtgatatctggttatctaaagggcatggaataaaagaggaccctattcagtagctgttattttctactcctattttttcacgtcctcttctcttcacattttatatggcactgataatttctcttattttcttcatattttatatggcgccaatttctcttttacgttatcagaaaatgaacttacctcttgacaagaacatgttgattccactgtcacgttgactttttgtcctatttctattttctacatgaatcaaaagaaatcttaaatcccactgaccgtttttatgtacggagatataatgagcaaaccattcaaaagggtgaaaggatacgaaggatttttggaatcactgaaaatacttcatattaatttcaaagttcccaggaaacaaat

SEQ ID NO: 476659 - DNA, 1885 bp, Homo sapiens
gaagctgcaaacttttctctacgtaataggaaatgaatgatgatggaaaagtcaatgctagctctgaggggtactttattttagttggattttctaattggcctcatctggaagtagttatctttgtggttgtcttgatcttctacttgatgacactgataggaaacctgttcatcatcatcctgtcatacctggactcccatctgcacacaccaatgtacttcttcctttcaaacctctcatttctggatctctgctacaccaccagctctatccctcagttgctggtcaatctctggggcccggaaaagaccatctcttatgctggttgcatgattcaactttactttgttctcgcactgggaaccacagagtgtgtcctactggtggtgatgtcctatgaccgttatgcagctgtgtgtagacctttgcattacactgtcctcatgcaccctcgtttctgccacctgctggctgtggcttcttgggtaagtggttttaccaactcagcacttcattcctccttcaccttctgggtacctctgtgtggacaccgccaagtagatcactttttctgtgaagttccagcacttctgcgattatcgtgtgttgatacccatgtcaatgagctgaccctcatgatcacaagctccatatttgttctcatacctctcatcctcattctcacttcttatggtgccatcgtccgagctgtactgaggatgcagtcaaccactgggcttcagaaagtgtttggaacatgtggagctcatcttatggctgtatctctctttttcattccggccatgtgcatatatctccagccaccatcaggaaattctcaagatcaaggcaagttcattgccctcttttatactgttgtcacacctagtcttaaccctctaatctacaccctcagaaacaaagttgtaagaggggcagtgaagagactaatggggtgggaatgagcctgtgtatgtgtcatattaacaatataacagagtctcccctcacaatgattcatccttctatttatttatcaaccattcttttattcacgcactctgttagcacttgctgagcatgtactctaacaaggtcgtggagttcctggtaacaggtaggaataaaacacagtcagcctaaataccattcacttgtggagaaaacagctatgtaaaatcaagataaaacatctatagtgatgtttttccatggtacaaacctaatgtatccaagacagacatttctcgattgaaaataaggcatgaaatttgttgtaaatcttgataaaagcgaagctgtaaatcctatgaaaagatgatactctcaatttaaaaatctctacaatatgtcttttaatttcttgctttttgggcagaatacttttgtcttctatctttagtttagttaaatacacagcaaaatacttcaaatccttttctccaacaatgcttattctttgtcggatagtaaattttgagaggaattttggtccatattctttcatatccagtatcaatagtagaacaataagttttatgaattgtagtaagagaggctttgaaacagtatagcagaagtcagcatctgagatccctcttttttgcaaggcagtgagaaatatataggaagtaaaaggagctggtaaagctgagctatggagcttataaacaaatggtcatcataggctaggtatacttaggtgagacttttcattttcttttgggaggttataattatagtatatctaatgttgaatcctagccatattagcctgtgctgtgtaatttgtaatctgagaaatagatcagttaccaaaaattccaccaaagattaacactggtattactgtttttattgttttgtacttttcaaaccagtc

SEQ ID NO: 476660 - DNA, 918 bp, Homo sapiens
tctctctcggtgaaagcagtgcttcctggctgcaactaattggacatcttgtcccttcccatctgtgaaatatggtcatagttcttgtgtccttgaaggatccaaaactccacatccctatgtatttctttctttccaacctttccttggtagacctctgtttgaccagcagctgtgttccacagatgttgattaacttctggggcccagaaaagaccatcagctacattggctgtgccattcaactctatgtttttttgtggcttggggccacggaatatgtccttcttgttgtcatggctgtggattgttatgtagcagtgtgtcatccactgcaaaataccatgatcatgcacccaaaactttgtctgcagctggctatcttggcatgggggactggcttggcccagtctctgatccagtcccctgccaccctccggttacccttctgctcccagcggatggtggatgatgttgtttgtgaagtcccagctctgattcagctctccagtactgatactacctacagtgaaattcagatgtctatcgccagtgttgtcctcctggtgatgcccttgatcattatcctttcctcttctggtgctattgctaaggctgtgctgagaattaagtcaactgcaggacagaagaaagcatttggcacctgcatctctcaccttcttgtggtttctctcttttatggcactgtcacaggtgtctaccttcaaccaaaaaatcactatcctcatgaatggggcaaatttctcactcttttctacactgtagtaaccccaactcttaatcccctcatctacactctaaggaacaaggaggtaaagggagcactaataagattggggaggaggacctgggattcccagaataactaacaaggttaacatatgtttacctttgctt

SEQ ID NO: 476661 - DNA, 619 bp, Homo sapiens
acagtcaagtgcctattagatatgagggaaaaggccctgttggaaggctgcaggcctgccgtttttgtctcagtagagctgctgtggaacctaaaaggacctgacaaaacaatcacattcctgggttgtgtcatccagctctacatctccctggcattgggctccactgagtgtgtcctcctggctgtaatggcttttgatcgctatgctgcagtttgcaaacctctccactataccgccgtaatgaaccctcagctgtgccaggctctggcaggggttgcgtggctgagtggagtgggaaacactcttatccagggcactgtcaccctctggcttcctcgctgtggacaccgattgctccaacatttcttcgtgagcttctggatctgggtgtgggcatgggatagtcagatgggaatggcaccagttggaggaacatgggtaagagagggtgaaaggtaaagtgctatctctgagttttttgtaaaagctattttgggttttcccgaagatggacgtcttcatccaaactctactttattgctatggcaagtcttcattcatgtgatatagttttaaagttattttggctttatccatttggtactgatggactttg

SEQ ID NO: 476662 - DNA, 494 bp, Homo sapiens
tggagccaccattttgatcatgcttaatcccagtatttcttctaaccatcaggcctctctgctgcaggtctcctggagtttgctggaggtccactccagaccctgttcacctgggtatcaccagcagaggttgccggacagcacagattgctgcctgttccttcctctggaagctttgtttaggaggggcacctgctggatgccagctggagctctcctgtatgaggtgtctgtcgatccctgctgggaggtgtctttcagtcaggaggcatggggagactatttcgagcacctctatgcacaaaaactagaaaacctaaaagaaatggctgaattcctagaaacacactacctttcaagattcaaccaagaagacagtaaaaccctgaacagaccaataatgagttctgaaattgaatcagtaatttaaaaacttacaaatcagaaaaagccctgtaccaggcaaattcacagctgaattccactagacatat

SEQ ID NO: 476663 - DNA, 2072 bp, Homo sapiens
gctttattgctcacacaaagcctgtttggtgatctcttcacacggacgcagagagactatggtcaatttgacttcaatgagtggattccttcttatggggttttctgatgagcgtaagcttcagattttacatgcattggtatttctggtgacatacctgctggccttgacaggcaacctcctcattatcaccatcattaccgtggaccgtcgtctccattcccccatgtattactttttaaagcacctctctcttctggacctctgcttcatctctgtcacagtcccccagtccattgcaaattcacttatgggcaacggttacatttctcttgttcagtgcattcttcaggttttcttcttcatagctctggcctcatcagaagtggccattctcacagtgatgtcttatgacaggtacgcagcaatctgtcaaccacttcattatgagactattatggatccccgtgcctgtaggcatgcagtgatagctgtgtggattgctgggggcctctctgggctcatgcatgctgccattaacttctccatacctctctgtgggaagagagtcattcaccaattcttctgtgatgttcctcagatgctgaaactagcctgttcttatgaattcattaatgagattgcactggctgcattcacaacgtctgcagcatttatctgtttgatctccattgtgctctcctacattcgcatcttctctacagtgctgagaatcccatcagctgagggccggaccaaggtcttctccacctgcctaccacacctatttgtagccaccttctttctttcagctgcaggctttgagtttctcagactgccttctgattcctcatcgactgtggaccttgtattctccgtattctatactgtgatacctccaacactcaatccagtcatttatagcttacggaatgattccatgaaggcagcactgaggaagatgctgtcaaaggaagagcttcctcagagaaaaatgtgcttaaaagccatgtttaaactctgaagaaccatacaaatgaaaggcattgttattatgtttcagattggaagagaggtgaatcttatttctacccagaatgctcttccaagctgtctattgtatatattcctctcaaatataattctttaaaatttaagatgttgtgctctaataattttagctttccttcctccctccaattcaagtgttattttaagtcatctttggaaaatttttctgaaatgaaggagaaagacaattagtttggagtctggcctgtataatttaaaacttgttattaacaaataaggttggagatagatgaagctaactgggttaatattatggtgcatatatggtatttccagtgggcctcctagttttctatccatattaagtattcatattaagttcttttactattattacagtggtgatttcaacaatttattcagcccctacctaaatagcttgaggtgtttttttatttttgttttttcgcttttaactttttggaacactttttgctcatatctctcgatctgctttcttatgcctgtgctagcgtataataaaactataataataataatgacatgtaataagtactacttatgccaaggattattctaggcttcaaagaaggaagattacaaaaaacaatgcaactgaaattcatacttcataataatggttaaagcaataaccattaatagttcataagatttgagtccaataacttttaaaggcataattctttatgagcgtattttatttccctttatgcgcagctctaggctccttttcctacttccctgtttctaaaagaaaacatttttttaaaaccagcagttagtgcaactaatgttcacttagcatacagtgcaaacagatggaacaaaaaaaaaggaatattccttcttttcagcttttttctcttcaccagttaaaaaaggaaaaaaaaaattctgaactcttttaagtcttcatagttctgaaataaaagatgaaaaactcacaaagagaagagcactcctctctaaaaaatggtgaattctctaagagagcatgt

SEQ ID NO: 476664 - DNA, 757 bp, Homo sapiens
ttatacacctgagaaagcagcagcagttaccatactgagcatagccggaggagttcaccacagttagagaaatgaaggcagaaatggtgtgcctcatggttttaacaattacttctgcaagaggcctcttggggtgttgtggaagagacctggtgggaagtgattggattatgggggtggtttccccattctgttctcatgacagtgagtggattctcacaagatctgatgtttttatgactggtagttttttctacacttgcacaagctctcttgcctgccaccctgtaagacgtgtctttgcttctccctcaccttctgccacgatttttgaaaatgcaaaatcatcctttaaaaataaaaagtttattccatttgcaacaacatggatgaacctggagagcactatgctcagtgaaataagcctctcagaaagactaatactccatgagtccacttatgaccaaaaggtacataagtgcatggtgaagaagtgttttcatttgcaaaagttctatcgctagaaaaataaattcaagcaacatattgttaatttcttttctttaacttaggtcatcccaccttttcctatcccatgctcttcaatgttattggtatatagaaatactactgatttgtacattgattttgtatcctgaaactttactgaagtttttatcagctctacaagccttttggcaaagtcattaaggttttctaggtatagaatcgtattgtcagcaaggagataatttga

SEQ ID NO: 476665 - DNA, 1395 bp, Homo sapiens
acagctcccatgcaaagatcacaagtggaggctccaaccagtccagaagttcctttctatggggaagctgtggcagcaaggccgtgaagagagtctgacttaattgcaaagacgaggtttcaccatgttgaccaggctgatctcaaacatctgacctcaggaagtcagaggcaccaatgtgaggttccacctgctttccagcacattcttggtttcctcacttctgctagacaacgtttgatcagaaggaacagggaacgagaaggagctgctggatgacgataagcctgggaaagggaggctgggtgagcagagacagaaaagaaacacctacctgctgtgacctcacaaacacccaggctgagttttgataagacaggttgaatcacactggggtgacagcctcatccctccaggtacaaacaagaacaggccatggttaaccaaagctcccccatgggcttcctccttctgggcttctctgaacacccagcactggaaaggactctctttgtggttgtcttcacttcctacctcttgaccctggtgggcaacacactcatcatcctgctgtctgtactgtaccccaggctccactctccaatgtactttttcctctctgacctctccttcttggacctctgctttaccacaagttgtgtcccccagatgctggtcaacctctggggcccaaagaagaccatcagcttcctgggatgctctgtccagctcttcatcttcctgtccctggggaccactgagtgcatcctcctgacagtgatggcctttgaccgatacgtggctgtctgccagcccctccactatgccaccatcatccacccccgcctgtgctggcagctggcatctgtggcctgggttatgagtctggttcaatcgatagtccagacaccatccaccctccacttgcccttctgtccccaccagcagatagatgactttttatgtgaggtcccatctctgattcgactctcctgtggagatacctcctacaatgaaatccagttggctgtgtccagtgtcatcttcgtggttgtgcctctcagcctcatccttgcctcttatggagccactgcccaggcagtgctgaggattaactctgccacagcatggagaaaggcctttgggacctgctcctcccatctcactgtggtcaccctcttctacagctcagtcattgctgtctacctccagcccaaaaatccgtatgcccaagggaggggcaagttctttggtctcttctatgcagtgggcactccttcacttaaccctctcgtatacaccctgaggaacaaggagataaagcgagcactcaggaggttactagggaaggaaagagactccagggaaagctggagagctgcttaatatactttc

SEQ ID NO: 476666 - DNA, 605 bp, Homo sapiens
aggacatgtgaacatgagccatacgggaggtgagtggttggtggacaggcaggtggtcttctccctgacagtgctggtggccctctgtggactggtaggcaatgatgtgatctgctggcttctctactcacaggtctggagcagcccctatgtgacctacatccttaacctggccactgttgatatggtcaacctctcctgtgtaactgtgatcctgctggagaaaatcctcatgctgtatcaccaggcggcattgcaggtggctgtgtttctggatcctgtctcctatttctccgacacagtgggtctctgtctcctggtggccatgagtattgagagctttctctgtgccctctgtcccacctggtgctgccaccgcccagagcacacctctgccatggtgaggtgggccctggccctttctttgtatgcagttagccaggtctggggctcagctcctccacaaaggcagggactgcctatgcacaaggctgtaaaagggatcatgtctggaaaacatgctgaatcctccaaggagcagggtgaatgttcttgagattatttattacctttgtgtattttcagagtaaccagatttctgactg

SEQ ID NO: 476667 - DNA, 2443 bp, Homo sapiens
atgaggaaagggcaagccctctgccctctgcccttcctattgagaggcacatctcagcacagctgactgatcattctcgggtaagtgtgacctgctgtctccccttcctgctgacatgggggcagatgctaccagatggcatcactggcctccggggcgctgtggagggtaatgtcgctgagctcccaccaggtgctttctcttcactgaccatgtattgcagccgtctcattcaccctcacactgacttcgtggaatgggtgctaatgtacccatttgaagatgagatgcctgagactttaagtgtgggctctgatggttactgtgggacccaccaggcactggagttttccagtttgggagcagagctgggagccctctgccctcgaatagttgtggaaaatgaagaaaccctggaggtctggccgaaaggactgtggaatctgccctccctccaccaaagggaggctgctttggagacaatagatcaagccttctccgaaccaaacatcctccttcttgactggtgttattcttcaaatggattcactggccacatggacacaggagatgaagatgtttacatctacaaggcaacactgacaacaccaaacaccatagaggatgtggagccacaagaactctgtgcattgctgctgcaaaatgctgctgctgctgaatgcaaaatggtacagccgccttggaagacagttgggaattgctcacaaagctaaatgtacttgtaccacgtgaccacaagtgtcatagacgttgacctagctgacttgaaaatgtatgtacacctaaaacctacatgtcacattcactgccttattcattatcactaaaacctagaagctactgagatgaccttcaacacaggtcccaggggagatggaggaattcaggggaatgggcgcatcccatgaaatgaggttatacctgtttggtataataaaattacaggttaaatctataaatataaattataattatagattattaggttacatttatttggtataataaaattatacagtaggtattgtcaaatatgaaattaatatctaatgattgtattataccaaataaggcaaatatgtgtcttttggacttaaggggacctaatatcaaaaaaattaatgagtcaaaaggactgaatttagaatttaattttgaaaaaatcaaatatcaaaactttaaaacacctgctatcacaaaataggatcattggtcattggtcattgtaaaataagtcattcatttaaccaaagtgataactcaaagatttcaaaaaaaaaaagtcaaaagacaaaaccattactctttgagagaggagacttaattttccaaacaataagccctaataaagatagcatgaggccaatgaaatctgtttctcaaatcttataaacaaatctattaaattttaatgatcttcaccatactatataatttccaaaaacctttttgtaacattttataattttttaaatgaaaaagtgggttaatactccaagaaaaccttgttaatctgacacaggagctcagaggttagtcttgcatcagtgagcctttgatactaatctttacagagaaactgtaaccaagataaaaccaattttatctttcaaaataggctcttacaatcgcatgtacccacatcttccacaatagcccctggactttgaggggtaagatagtttcaatttctggccctgtgtttcatgagtgcagtttcttttgattatcatcttctcctggttctgaagatacggttttagaagctttcagtgtttaagatttagcaggacttggtgtcctttttagatacaggagtcaaagccctgtaactcaacagaacaaggactttaaaagcaatacagaacattgtatggatgttaataactttaattttttaaatctcagttttcctaggcaaataaaaaacttaatgacataggaattgtttcaataaaatataaaatctgtttgttaggccagttaccaaaaggcaaaaaataaataaaagacctgcagcaattgcttttccctagacttcaagtcaaaactaatgaaaatggtacttgaattagttagatataggaagggtgtgtcttgcatcataagtgaaaattttcagtttcatagaaaaacttcaaaccaagagcacagaatgttatattggaagaaaatatttcctttagacctttaagataaaacacttttagcatcatgtcacagtagcagttagaacctgaggaaaaaaaattatagaaactgacaagaaagttggagagagcgattatctcaggacttatgaaggggagagaaaggtgaaaacagtgagattcaataaaagttgaaatctggggtaaaaaaattaaaatatcttgtaatttgttaagagtaaattaatatcttaagaaaattttgttcttct

SEQ ID NO: 476668 - DNA, 1170 bp, Homo sapiens
tttgtctttgcagggtgtgcccaggcagccaaggcagcccaccatggcccagtttctctcagtgttctctgggaagctggattgggacaacaggacagagaccccaggacaagtgaacatgagtcatacgggaggcgagtggttggtgggcaaacaggtggttttcatcctgacagtgctggtggccttctgtgggctggtgggcaatggtgtggtctgctggcttttctgcttccaggtcaggagcagcccctacgtgacctatgtccttaacctggccgctgctgatatggtcaacctctcctgtgtaactgtgatcctgttggagaaaatcctcatgctgtatcaccaggtgacattgcaggtggccatgtttctggagcctgtgtcctatttctctgacacagcaggctttataatatttcacatgcttatttgtcttgtggtgggcatttccagcctgactttgatcatcaggagcctgtactgcctgaagaactgttcacccatccggatctaccacattgtccgctttgtggccatcagcttcctggtttggggcctgcccttagttgtccttgtgtacctgccaggaaaagaatacctgacctttgcctttgaccttctgttgctgctgtccatggtagtcagtatggctcaaccagccatctacttcttggctggctacctttgaaggaagaggcatagggagtccttaaagttgttctcccaagagctttgttgaatgagatggaaggtggaggaaacaaggggtttcaggcaagggaacagcaggttaccaggactgagctcctcccactccaggaagctgttccccaggactgaccatgatgccctgtattggtccattctcacactgctataaagaaatatctgagactgggtaatttataaagaaaagaggattaattggctgacagtttgacaggctgtacaggaagcatggctggggaggcctcaggaaacttacaatcatggcagaaggtgaaggggaagcaggatccaaactcactttatgacaaaagaaatgttcattaggcacttcaccatcttgtaaaatattctgagagggacaatctgcaacaacgcaaagcttgtggggtttgaggtgggaaaggaaaataaaactcaggactccaattcactatg

SEQ ID NO: 476669 - DNA, 1415 bp, Homo sapiens
atccgttgttgagcacattaatggtttcctcactcccactagacaatgctccactctccaatgtactttttcctctccaacctctccttcttggacctctgtttcaccataagttgtgtccccgggatgctggtcaacctctgggagccaaagaagaccatcatcttactgggctgctctgtccagttcttcatcttcctgtccctggggaccactgagtgcatcctcctgacggtgatggcctttgaccgctacatggctatcttcaagcccctgcgccatgccaccatcgtccacctctgcctgtgctggcagctggcatctgtggcctgggtcattgggctggtagagtcagtggtccagacaccatccaccctgcgcctgcctttctgcccccatcagcaggtggatgattttgtctgtgaggtcccagctctaattcgactctcctgtgaagacacctcctacaatgagatccagatggctgttgccagtgtcttcatcttggctgtgcctcagcctcatccttgtctcttatggagccattgcctgggcagtgctaaggactaactgcaaaagggcagaggaaagcttttgggacctgctcctcccatctcactgtggtcaccctcttctacagctcagtcattgctgtctacctccagcccaaaaatccctatgcccaagagaggggcaagttctttggtctcttctatgcagtgggcactccttcacttaaccctctcatatacaccctgaggaacaaggaggtaaccagggcattcaggagattgctggcgaaggaaatggggctcatacaaagttgagggagagctgtttaatgtgctttctaaattaagaagaaattatttatccttttgtgaacaagtttgagctcccaagtatactacctttcatacacccatcacagtgtttacaatgggtcacagtatatgagtgtgtgtgagagagagaaagagacagagaaagactaagagtcaggatggttcatctccacttgcttgaggtggactgacaggaagctgacactcagagaatttagtaatttcacccaagaacacacagcaatttgttagacctaaattgagatgcatatctgttaacttaccaagtgcatgctgttggttttacaccattataaatataccaacatcattaggatttatacccaaatgggttatcaggcagaaaactctatttttccagtcctagtaagttttctgatcatccagctttccagggatcacaacactaatctcctgccaaatcctgaaaatgtgctcccattcctggagatgattttcctttacctcttctcaacctctgcatgacagtgaccatgaggagttgtgagtctgctcttcagtggctacacagtgctaacagctgtcctg

SEQ ID NO: 476670 - DNA, 650 bp, Homo sapiens
gaaagtctgatgagttatgcccagtctccttcctcctcccgccggcatgaggtttggggccctgtggatgaaggaagttcatgggaggcaaacgtgcctgggcaagcaacagccgcagagattcagtccccacgggggccaggagtggataaagctagaaagagacaccacagaagagaagatgtttgaacagctgaagccaatcgaacctgtacagaagacgctcccatgggtgggcgaggtagctgccaccctgcaggaagccatgaagagagattgctggagggaggcacgggtgaagaagaagccagtcacctttgaggatgtggcagtgaatttcacccaggaagagtgggactgtctagatgccagccagagggtcctttaccaggatgttatgtcggaaacctttaagaatctaacatctgtggatgtgaaggggccatacctgggaccaactcaacgctttctcattcccacacatcagccagaatctttctgcataagccagagctaatcaccaagcttgagcaagaagaggaacagtggagagagtttgtccatctcccaaacacagaaggcctttcaggctgggccaccctttttttgctacacctgtggcaaatgtttcagcaggcgctcctacctct

SEQ ID NO: 476671 - DNA, 1325 bp, Homo sapiens
tgagggagtgaaggcccggactccaggcttggagctcacaggctgattcctgggatgagcagcctccacctgcaggagcagcagcaggaacaagggaggggacaggagggcaaggccccattttggaggctgagggactaggtcatgtggtagcaatggtttgggggtggatgagccccagatatgatcccactgttttggcctggaggtatctcttccctaaagccaaaatccagagtcactcagtggtgggaggaaacaaatccataaagaaaaaagatattcatgtctctgataaagaaaagaaatgccagcaatccagcactgagaagggaagctacgagaccacattttctgcatgtggagaagacacgtctaatggagagaagctcccagaagcccttctgaggccatctccaggaggctgccccagcgggtatgaggccttgcgcttctgccatcctgtgtgtccctgtgatggaattttggcccagctagggatggcaagaggccaggtcatcgcaggtggtctgcaggcctggggaaatttcctgaaggaaacaggaaaaggaacctctattcctcgctgcatatcttttatgtaggcctttcctgttattcaagcatatccccagcagatggcagagaagacatttcaatttcgtgcctctgcttttcctccccctcctccaaccggaaagtcaggaccaagggaatggatgaaggcattaaaggtataaatgagaatgggtgataatttccctttctctgagctggggagtcccattgcaagggtgggaatagaaatgtccagtgtaaccattcagagatgacagatactgccctgaaaacagtcacaaaatcaaaccatgatgtgcctccctgggctccttggctctgggctgctgctttcttttattgagaatctaagaggtgctgagcattcagttaaaacgggactcaagggttcctgcattgtcctctgccttaattgcatttgaaaatatattttgtcagttcaatccttctcctgcccgtctctgtttctctttttaaagaagctgaacattggcaccttcaaaagaaaattgctaacatgtgaaataatatattgtctaggatttagttgaaaataacctggtgttgggctatggttgaggatgtagataaatcaagagtgggtgttactgagtgaagggtacagtgaaggtcactttactcttctgtctacttctgtgtttgcttaaaatatttgtacaagtttaaaaaaataagaaccagggttaccagggggcatggcatatgctgaataatcatgagatacc

SEQ ID NO: 476672 - DNA, 819 bp, Homo sapiens
tggacagagcccaggtgaaagccacccctgctcctcctcccgcatctcccacaggctcagcaccatcgtcggcctggagtgcacctggactgagctcatcatgctctgtccctgtttgtgtcagtcacactgggtcccccacatactctgcacttgcatccccacaaggctctgcacacctctattctgtctccccgacctccccagccacagaaatcttcccagtgcaccccctggatttctcagtccacatcagcaaaacctcctcagcctctctcaggatgttcctgcatctcgcagctccagcagcaacctgggtttccctgaggacatgaccccctccgaagtcctcccacatgggggagtttccccagggacttgtacccctgggttcagagtcttaatcgttggaacctgtgaacaggttgcattgcgtggcaaaagggatattactcatgtaatgaagattaaggaccttaaaatagggagattctgctggactctctgtgtgggcccaatcaaatcacaagagccattaaaagcagagagcctgccctggttggagtcagattctgcagaggaggaaggcagaggagaagctggagaggggaggtcagaagttccaagcaggaggattgaatgtgccttaggcaccgtgtgtgagtatctgagagaaggctctaggagctaagggtggctcttaacaaggaagtggaaacctcttttctatctgcaaggaagtgaattcaggcaagaacctgaatgagcttggaagtggattcttccccagagtctatggaaaggaatgcagaccttccc

SEQ ID NO: 476673 - DNA, 949 bp, Homo sapiens
gctgggaatgggtctcacacccttcaatgggtacacagctgcgacgtggactcggactgcagtctcctcagtgggtatgaacataccctatcacggcgccagttacctcgtccgaaaccaggaactgcgctcttggactgcagcggacaaggcggctcagatgccctggcggaggaacaggcagagctgctcaaaacctacctgcagggaagggtacagaaccttccagaagtgggcagctgtggtggtgtcttctggagaggagcagagatacacatgccatgtgcagcacgatgggctgccagagcccctcaccctgagatggctgtcttcccagcccaccatccccatcatgggcatcgttactgtcctggttgttcttggtgctgttttcaccagagctgtggtcactgctgtgatatgggagttggcttgtatcctgcctagtcatgaggcaccatctctgtctatcaacacttactcttttgtaaagaacttgtgaaaatgaaggacaaatttatcaccttcattggagtcatgggaacctgactcccagcagtcacaggtcaggggaagtcacatcatctgtgggctctgaccagattttgtttttgttccacccgaaacagggacagtacccagggctctgatgtgtctctcaaggcttgtaaaatgacaacttagggggcctgaagggaaggaggagttggggcataggggacacaactaggctctggagattctttgatttggaatttttcagggtgtggtgggctgttcagtgtcacaacttactatgactgatctgaatttgttcatgactattttttttctaagactgccttgtgagggactgagatgcaagatttgttcatgcctcccctttgtgacttcaagggcctctgtcttctctttctgccaaggtgtctgaatgtgtctacatccctgg

SEQ ID NO: 476674 - DNA, 1435 bp, Homo sapiens
gggactcggagtctccccagacgccgacgatggggtcatggcgccccgaaccctcctcctgctgctctcggggaccctggccctggccgagacctgggcgggctcccactccatgaggtatttcagcaccgccgtttcctggccgggccgcggggagcccagcttcattgccgtgggctacgtggacgacacgcagttcgtgcgggtcgacagtgacgccgtgagtctgaggatgaagacgcgggcgcggtgggtggagcaggaggggccggagtattgggacctacagacactgggcgccaaggcccaggcacagactgaccgagtgaacctgcggaccctgctccgctactacaaccagagcgaggcggatcacttactccccgctccatgcctcacggacggccctggtcccctgagtctccgggtccaagatcgaccccgaggctgcgggacctgcagagatcctcgacccgggagagccccaggcgcctttacctggtttcatcttcagttgaggccaaaatctccgcaggttgctagggtccgggccagggctcggtgggcggggctgaccgcgggaactgggccagggtatcacatcctccagggaatgtttggctgcgacctggggcccgacgggcgtctcctccgcgggtatgagcagtatgcctacgacggcaaggattacatcgccctgaacgaggacctgcgctcctggaccgccgcggataccgcggctcagattacccagcgcaagtatgaggcggccaatgtggctgagcaaaggagagcctacctggagggcacctgcatggagtggctccgcagacacctggagaacgggaaggagacgctgcagcgcgcgggcataacgaggtcctgggttctgggcttctaccctgcggagatcacattgacctggcagcgggatggggaggaccagacccaggacatggagctcgtggagaccaggcccacaggggatggaaccttccagaagtgggcggttgtggtagtgccttctggagaggaacagagatacacatgccatgtgcagcacaaggggctgcccaagcccctcatcctgagatgggagccctctccccagcccaccatccccattgtgggtatcattgctggcctggttctccttggagctgtggtcactggagctgtggtcactgctgtgatgtggaggaagaagagctcaggacctgtgatcacagggacttggatgtcacctagggtggtccctacacatcgaagtccttccgtggagatagggagactctggcaggagtacacagaggagagggcatcgcaggcattcaatggaggagacatctatgaggaatgcaggtgaggggcccagatgcctctgcagctacagattcatcatccaatcactctcctactcccaccacccctgtgt

SEQ ID NO: 476675 - DNA, 707 bp, Homo sapiens
acacatttttatttctcttggacatatacctaagaatgggagaactgggttcagggagcttccaggtagctgaacaagtggaggtttttggagaatttgatttcctgaaaaagattggggaaaagatgcgaagaatagtccaggaaacagccctggaaggacaagagctgggtgggtctaaaaattggtctcttgataccacagagactcctgtgtgcaggggccaccccagggcttgtgaggacaatgacagaaaaagtaactcctacggctgtcctagaggagattggagacttggagaccagaactcagatacaagaagaagaacaggcatagtcttctgtcaaaacaaaacaatgaacaagatgggggctgagggccagacctaagcctgagcctaggctgacctggtcacacaaagcccttgccacagtcctagagacaggataaggcctggcccttctcctcctataccaaatgctctttgtcacacattctcccttaatccagagctaggagttacctttctccccaaatcaaacatatctgtgtgtttctcttcactctgggacttccctctcttcatatcatctgtacctagatgaaaatagatgttaagttttacaattgtgaggtagaaaaggattctgtaagcatgacccaaatatgaaaagccataaataaaaaaataaaacttctctatgtca

SEQ ID NO: 476676 - DNA, 747 bp, Homo sapiens
ggggactctgtctgtgcagtgcttctgtaagggctacaaaaaccgcatggagggcaaggtttggtgcaaaatcaggaagaagtgtgagcctggtttcacccaagtctgggtgaaagggccccgctacttgctgcaggacgacgcccaggccaaggtggtcaacatcaccatggtggccctcaagctccaggactcaggccgatactggtgcatgcgcaacacctctgggatcctgtaccccttgatgggcttccagctggatgtgtctccagatgacaccaagcagacccctgaatggacagcggcctgggaccctcgatacttcatccaagatgatcgcttctatggcgtcttcaccgtcaccatgactgagctcagagtagaggccttgggattccatgggtgtggaatctctaaatcccctgagatctctattgtcagaatcatctgcctggtggtatctcaagaaatcttctccttccaccttctcatcactgaaaactggggacatggagaagaaaagcccctggcctaaggtcacctgctgctgaagggcagagccagccccagaatgcaggcctgctggcttttggttcttccttccacatcgtacgtatcgcccttaacatttttgctgctactaacaggactcctccatttatttggaatgagtttaaagtttccccatgcttgagcacaaagggcttaatggtccattccagacatccctacccttgactctaactg

SEQ ID NO: 476677 - DNA, 853 bp, Homo sapiens
tgaccccagctttattcaccagctttattcttggccatgctgagagctgcccctagcaatagaggagcaggtgctgtgcctgaagaacttcacaaacacccaggacagaccctcctcctgcaatgccagtactcacccaagagagggccctatcagcccaaatcctggtgtcagcagacatctccaagtcggtgtaccttacttgtcaccagctccaagccctggacagcagttcagaagtctcattacacaatctgggacaagcccaatgctggcttcttcaacatcaccatgattcagctgacacagaatgactcgggattctactggtgtggaatctacaacgcttccgaaaacatcatcactgttcttagaaatatcagcctggtggtgtctccagttctgatcacttctccagaggggacctctggccatccctccatcaatggctctgagaccaggttacagccgtggagcccccaggccatgactcaaaatttggtagtgaggaaaggggaagaggatgcaggttgttaattgtggaggaaccatggaaaagacagttcaacatggatttctgcaataaaacaaaatggaacccagaaaatgtggaaattggaggccgtgttggtgtgttgagggatgggaccacccagttgtaggaaatcaagttcagggctcccacagattctacattatgttgagttgtataattatttcattatatattacaacatgataataatagaaataaagtgcacaataaatataatgtgctttaatcatcctgaaaccatccccgactctcaggtccatggaaaatttgtcttccacaaaacagttctcaggcgcc

SEQ ID NO: 476678 - DNA, 2665 bp, Homo sapiens
agtctctttgggttggtgatgtgacccacctgtcgtagagccgctggtgaatcccactgtctgtcaggctcctggtcaacccccttctctgggccatcccctctccagctccccaaacacccaggcgagactgactcagccagaaggttgccctggagaagaccaggtagtccctgttggcatgctcagaggacgtgtagatctctcatggatggtcaggacaatcaccagtaccaggatatctggatcagaaacctggatccccaccaaatggatctgctggcacctagacttcagccatctaggagttggggttttaagtgtgaccgcccaattcgccttacttgctgccctgcaaataaatgccttcctttcatctgctgcaaaccttggtgtggacgttttggccttactctgccagaccttcaggaaggcattagagcagttccccgagaggatccccagtggaactatcaggcagattccccaggcagcttacaaagctgttaattatgacaagcttaaagaaactactcaaggtaaagaagaaaacccagcccagttcatggcttatttggcaacaaccctgagacgctttacagacacagaccctgaagggtcaaaaggctgtctcattctaaacatgcgttttatcacccagtcagctcctgacattataaaaaagcttcaaaaattagaaaccggccctcaaaccccacaacaggaattaatcaacctcgccttcaaggtgtacaataacagagaggaggcagccagacagcaacgcatttctgagttacaattacttgcctctgctatgagacaaaacccagccacacctccagcacacaagaacttcaaaatgcctaagctgcacaagcctaagccgcacacgcctaagccgcagcagtcaagcattcctacaggacttcctccaacaggatcttgcttcaagtgccagaaatctggccactgggccaaggaatgcccgcagcccggaattcctcccaagccatgtcccatctgtgcagggacccactggaaatcagactgcccagctctcccggcagccacttctagagcccctaaagctctagcccaaggctctctgactgactccttcccagatctgctcggcttagtggttgaagactgatgcggcctgatcaccttggaaaccccctggaccatcacggatgccgagcttcgggtaactctcacagtggagggtaagtccatcccctgtttaatcaatacaggggctacccactccatattaccttcttttcaggggcctgtttcccttgcccccataactgttgtgggtattgacggccaagctttaaaaccccttaaaactccccaactctggtgccaacttggacaacattcttttatgcactcttttttagttatccccacctgccagttcccttattaggccgagacattttaaccaaattatctgcttccctgactattcctggactatagccacatctcattgctacccttcttccaacccaaggcctcctttgtgtcttcctctcatatcccccaaccttaacgcacaaatatgggacacctctactccctccctggcaactgatcacacgcccattactatcccattaaaacctaatcagtcttaccctgcttaatgccagtatcccatctcacaacaagctttaaagggattaaagcctgttaccacttgcctgctacagcataggcttctaaaacctataaaccctctttacaattcctccattttctgtccaaaaaccggacaagtcttacaggttagttcaggatctgcaccttatcaaccaaattgttttgcctatccaccctgtagtgcccaatctgtacactcttttgtcctcaataccttcctccacaactcactattctgttcttgatcttaaagatgcttttttcactattcccctgcaccccttgtcccagcctctctttgcttttacctggactgaccctgacacccatcagtcccagcagcttacctgggccgtactgctgcaaggcttcagggacagccctcattacttcagccaaactctttctcatgatttactttctttccacccctctgcttctcacctgattcaatatattgatgaccttctactttgtagcccctcctttgaatcttctcaacaagacaccctcctgctccttcaacatttattctccaaaggatattgggtatcatccccctccaaagctcaaatttcttctccatctgttacctacctcagcataattcttcatgaaaacacatatgctatccctgccaatcgtgtctgactgatctctcaaaccccaatcccttctacaaaacaacagctcctttccttcctaggcatggttggatacttttgcctttggatacctgattttgttatcctaaaaaaaccattatataaactcacaaaaggaaacctagctgaccccatagaccctaaatcctttccccactcattttcattacacacagccgaagtgcagggctgtgcagtaggaattcttacacaaggactgggaccgtgccctgtagcctttttgtccaaacaacttgaccttactgttttaggctagccatcatgtctctgtgcgatggctgctgccaccctaatacttttac

SEQ ID NO: 476679 - DNA, 2233 bp, Homo sapiens
agcttctcatcctaccctgtcctcactaacttggtcctcctcgatgaggataaaaacccaaatgcaagcagggatcgcacacacaacacagtgaaggctgtggaagagcactggatttggagttgagagaccatggccggagagtctgtgctacccttactggctgtgtgcacttggctggtaattaaaagtatcaaagcaaagtagggctgtctcattacatgtcctgtttatgtgactctaaggtacttagagatgatttgaagggctaggaaatcagcagcagaagttccttcacctccagcctgaagctggcaaccctgagatagaattccttcactccgtggctgtgccagagagtgagactcaggatggttccagaaggtgtagtaaccgcttcctgttgttgccagtacatggatacttcactcttccttactaattctcttaatcctgcgcatccctccataaatttcttcattaatgtctcttcatttgaaacaaagaaaggcagaaaaagggagaagaaatacctaaactttgatccttctctggaaatgactggtagatatttatgccttccccatagctgtcatagaaagacaatgatgaaaactacttgtccacaacctgctccttgctatgtatcgatcatcaccacagagaatcttcatcattgcttatatcatcatcatcatcttcaccatcacatcatccttataaccatcatcattgtcatcttcaccatcaccatcactattaacatcatcatgatcttcaccatcatcatcactatcattattaccagcatcatcattatcatctttaccatcactatcaccatcattaccattgtcatcttcactgtcatcatcaccatcactattaccatcatcatcatcatcttcaccatcaccgccacaattattacagtcatcatcaccatcagcatcactgtcactgtggagactattatcaccattgcaaccactttttacagcatcatcactgtcttcattattaccaaaaactacacatgcacttttgcaaaaggctcaacagagaaagtgaacctgcccctgtctgtgggaaaacttgtcattgatgattataacatataatctttgctaagaatttaccacatgccaggtgctgttctaaccactttacctgtattaacccttttaatccttgaacaaaccattatgtagggattgtcattattttaattttatagataaagaaactaaggcactgataggaagaccctgagagaacagcatggaatgaatgaattatcatagggaaaatgccaaccatgtctgagctgctgctccttttacagttcttgtgtaaaatacttagtgcacttgtgatcacctgtttaaactgtgtcttttcacttcaaacggtcaccgcaagagagcaagaactaggcctctgattcatgccatggtccagtatcatgcctgcaacatgtagctgctgaatgaatgaacaatgaaaatcctgattgctctctgatactattactacaggtctcagcatcttccagactctcagctttcccctctgaaaaatggaaataatactccaaattttgctatgaatattaaaaaaaacaaattcttcctaccagccaaggagcgtgaaaaggccacacgtaaatgttcccactgttggccctaatagaggtcagatggcagctggcatcgactgtcaggactgcgactgagacgcttctgagatgattccatttgactgtcactaatgtactaatgagagaccctgagaaagaaccgcccaactgagtccagtcagttctcagatttgtgtgaaaaataaataactgttactgttttgagccagtgtttggaggtggtttgttagacagcagaaggtaactggaacagtattaaatgaagtcagtcactttataccaaatgcctagcgccatgtctggcacattgtcagtgtgccaacacatagccattctgcagtgccctgagttcagagctgtgcacagcagggtgggtgtgcacacactctcagggatgcctgactcacacctggtgtttgaagatgcagtgggagaagatgggcctgggtagagaaggctggaggaagaacctggggagggaatcaaagaccacacaggagctaaccttgtctgacagtcgacaggcattgtactaggcattctgcaacatcacatctcttaatactcacaacc

SEQ ID NO: 476680 - DNA, 678 bp, Homo sapiens
gtgggttttctcacctgaatgtccacaagtgggttgaaagatactcattgttggctgaattgtatgaaaagactcctaagaagtgcaccctccaaacttgcctcctctcagtacctccttagtcatatgcattatctgagtgtggaaattctgccttctagaactggggagggagacagcaggtatcctccagcttggaagtggcaagagcttggatgtgaggcctaccgcagcctcatcactaacactgcggaagccagcaccggccaactgatacagtttggatgtcttccccctccaaatctcatgttgaaatgcaatctccaatgttgggatccccaatgcaatcctgtcagtattggagctttgccttctgccatgattggaagtttcctgaggccctcaccagaagcaggtgccagtactatgctactcatacagcctgcagagccatgagccaaaataaaccttatacatatatatatattaaataaatatatataaatatatatatgtaaacatatatattaatatatataaaaatatatatgtatatatatatacatatatataaatatatatgtatatatataaatatatatgtaaatatatataaatatatatgtaaatatatatatataaatatatatatatatataaaataaataaaacttactc

SEQ ID NO: 476681 - DNA, 1039 bp, Homo sapiens
ggagtgcagcagcggtaagtgggagaagacagaccctgagggaagacgctgccacctcctccaggcacaatctcccttcaccgggccaagctgagagatgcaaggataggctccatggagttgccatttagtgagatgaggaaggctgcgggaggaacaggtgtaagggaagaagcaagaactcattgacgccctgccagatctggagcacctgtgaggcaccccagtggtgatgtcagtgagagtcaaatggggacaggacattacatcccctggtgccggcttatccctgtggcttcccgccctgatgctgccactttgcacatgtgatccaatcaactgtctctttaattatgacacggaggagaagccacaaacaggtttaccatattcacggtttgctgcgtctgtgttacatccggggccctactgggctcacatccttgtctctcttccctgcgatgctctcaagagcctcctgaaagaatatgggcctgctgacaccttcatttcagaattctggcctccagactatgagagggtaaatctctgttgttttaatccactcagtgcatggctatttgttatggaagcaccaggaaacaaatacacaaggctctcgacttacctgagaaggtgcccaggtttcccccactatacctattagaccctgtgggcctgcctgaaagccccacatctaaaaaaacaacgaccctaagaccattttgcatgactgtgttcctgctgtgtgccaggaacacctgggtgtttgcattccggtgccaaaatgactacaaccaagtgggagttgggctgcctctgaggctggttcttgtgtccttgacccaaggagcatagctactgcttttcacccttcccttttctctccttccttggagagggagtcgtgagcctcaggtctgagtcctggacagcctttaataactgtgtaactatggagagccctcaacaatctgttttcattttcttcatttgtaaaatggagataaaagtattaaatattcccttcagggatctt

SEQ ID NO: 476682 - DNA, 1549 bp, Homo sapiens
ggatttgagtgcgctgagtgaccagaccatggagaccctgcttggtggcctgctagcgtttggcatggcgtttgccgtggtcgacgcctgccccaagtactgtgtctgccagaatctgtctgagtcactggggaccctgtgcccctccaaggggctgctctttgtaccccctgatattgaccggcggacagtggagctgcgcctgggcggcaacttcatcatccacatcagccgccaggactttgccaacatgacggggctggtggacctgaccctgtccaggaacaccatcagccacatccagcccttttcctttctggacctcgagagcctccgctccctgcatcttgacagcaatcggctgccaagccttggggaggacaccctccggggcctggtcaacctgcagcaccttatcgtgaacaacaaccagctgggcggcatcgcagatgaggcttttgaggacttcctgctgacattggaggatctggacctctcctacaacaacctccatggcctgccgtgggactccgtgcgacgcatggtcaacctccaccagctgagcctggaccacaacctgctggatcacatcgccgagggcacctttgcagacctgcagaaactggcccgcctggatctcacctccaatcggctgcagaagctgccccctgatcccatctttgcccgctcccaggcttcggctttgacagccacaccctttgccccacccttgtcctttagttttgggggtaacccacttcactgcaattgtgagcttctctggctgcggaggctcgagcgggacgatgacctggaaacctgtggctccccagggggcctcaagggtcgctacttctggcatgtgcgtgaggaggagtttgtgtgcgagccgcctctcatcacccagcacacacacaagttgctggttctggagggccaggcggccacactcaagtgcaaagccattggggaccccagcccccttatccactgggtagcccccgatgaccgcctggtagggaactcctcaaggaccgctgtctatgacaatggcaccctggacatcttcatcaccacatctcaggacagtggtgccttcacctgcattgctgccaatgctgccggagaggccacggccatggtggaggtctccatcgtccagctgccacacctcagcaacagcaccagccgcactgcaccccccaagtcccgcctctcagacatcactggctccagcaagaccagccggggaggtggaggcagtgggggcggagagcctcccaaaagccccccggaacgggctgtgcttgtgtctgaagtgaccaccacctcggccctggtcaagtggtctgtcagcaagtcagcaccccgggtgaagatgtaccagctgcagtacaactgctctgacgatgaggtactgatttacaggtgagcaagcggctgtggcaaaggcagggagggtgtctggctggggaaggaggaggggatggggaggtcttggggctgctcccacctatacccctcttccccaaaggtgtctgtggggatt

SEQ ID NO: 476683 - DNA, 1027 bp, Homo sapiens
cagcagacacacctggaaagggcgttcctgctgtccccccagctccgttagccctcctccagcagttctgcacagttccctggcaaaaggtgggctgaaggaatcctctaggaatcttccctgagcccctggtgaagttgggggcagggagcccctcttggctgttacatcagcaggctgcatttctctaccctcctgggctcacctactgcacagtaattacctgtctcctctttgagactaagaagtgggcagatcccagtgaggggctgtggcttagcttaaaagcatgagaaaagttggaggaagcccagagactgctcccttgtggagaggaggacgccacttggagcgagggaaaccagaccggctttctccggcagggaacgcatacttggaagcctcttgatcctcctctctgctccagcccttaccaaccccactcttcctgtggtttcagagattaactggcggaaggggcagggctgtgtcctccacatcggcccttggccatggagggcaataaacatgcatcagggcaagatctagctgctgccctcctgggtgggtcccaaggcaaatggggagacgtgctgaaggctgtgagcgcggtgcagagccagctgagtggagcactgaaaggcacagggcagcccaatggagcccaggagtgggcttcagatgccagcagcaaggcaggccccaaggaggatggtccgagggcccagactcatgctgcttcttcctgggagatccaaggtttcaggacttctcacaccttcggtaatgatttgtctaagagccaaactcccacggcgggctgtggtcccccagggtgggtggggggattcctgcacatctttgtctccccagtgcccacacagtggaggtcacatgggagatgccaactggacaaggaactgcatgaggctcagcttgagccctagctaggaaagctcacagagctcagaggactgtggattccccagggatgcagcactctacaatgacagccatcttctcctcc

SEQ ID NO: 476684 - DNA, 2218 bp, Homo sapiens
tcccaggcatcttcctactgactgcaagtgtggaacaaggagttccaggaacccacaggcaggtcgttaatgagatttccagaaaatgctctccagatgtgtctgttgtttccagaacttccagcccagctggtctctgtggtctccctaatgcttctactgctgcagctgtcccaatgtcctttcccaacctgtcacccaagaccagtaccacagagcaatgagagcagcagtggacaaacggacaaggctactcaggaagaaatttgtaaaaagattggcagtcgaaattcagtcctcacttcccccttatctgaaatctacaagacagtggtcagtatgttccaactggtgggggtccaggtttctgaagaacaactcagggacacagccctgaatccgggagtctatcagggctgctgcattcagctgcatgggttgtacactacacaactccagcacaatcttagtgaagccaaagagcaaaagacctccttaatcccaactctggatttacaacaggtgcctgcaaagcatgcagcctggcagacccagaagatgcagcccatcttcagcctgtcttccagacctggcagtcatcactggaagccccagtgtctcttctctgcccctacagctcagacaacctacaacaaacgtcagtgaagacctgtccttgtcacgtcccccgcaaatgggctgttaaaaggccaggttgggaagtcacaaggatccattgttgaaatctggcaagttatttaagttctcagttcctcagtttccccatctgtaaaacagagataatagtatatagttttcagggttgaaatcagatcataactacttggctccatatgttaaaaggggtaaaaatgattatgcttactatgtgctggacactgtgcttagtaatatttaattatcatagccatcatagctcaatgaggaaggtgcattagaatcctcatttctcaaatgaagaccctgaggtgcagagaggccacacaactcttcaagtatgccacctaccaggtagtggttctcagccaggtttggtactgtctccctaggggacatgttaaaacatgggtgtgtgcttttgggttgtcatgctggctggaaacactggggttggaagagggggcaggaaggattcctagtaagtgtgcccccttggcaatgtatggctcttatcatgtgttgaatagtcctactcaggaaaaattaatcagcctctgttttgagaaacactaattacagcacaatcccacattaacagaaaaggaactgagtcccaaataaagtgatgagtccagattcacttggtgcatcaggccagaagtaggacaagagccaagcccctatcttaaccaccaatctttaccacgtgggggcccaagccagattgtggaccacctgtaggggcaggccagttggcagcagtgggttggtgcttcctctcaaaaatccattgggaatggccctgtgatttccccttcccagcctgaggaaaacttgcccccctccaccctctatcccctggctagaaagatgttcttagttatctttgattggtttctcagatttccattgcccaaggccaatttccacaaagggaaggtgtcaataattacatttctgctctccataccctgtaattaataattgcgattaatctggcacacttagtcaaatattgcaggtcctaattggctgccgtgcctttcttcttctgattgagacaatcctattcttggcagttctgcagccagctgcggtgaactcagcaggacctgtcaaatgcttctgcttggcaatttgcatgacattttgggcggcaaagcagagtagaggggtgaggtagctgggccttatgcgttggggcagaggggctgagattaggaagcccctgggtcctggtcaaggtgttggaatagatctgtttcacccttaacttgccctgatcagacagagcacctcggggtttatttcagttccagatgcaaggtagccctgccctctcctttcacactggatgtgagagggtttaaggggaggtagtctggttccctcctcctcttgtcttcttgtcccagggggcaggaagtttacttcctatcgggtggtaaaaacaaaacaaaacaaaacacaccattgtaaccctggcctctgtcaattcatctctcaggccagaggtatgtactgcagcatccagtcc

SEQ ID NO: 476685 - DNA, 572 bp, Homo sapiens
tgacgtgggccattgctccggagagtgcaagcagtttaagaggatgtatcagaaagcttgggtgcccagaaggaaccctgctgcaggggcagagccctcatggaaagactctagtaagacaatgctgagcagacatatggggctggatccctcacagaagctctattgccaagggaggaatatttctgccaggggacacaactgtgattccattaagctggaagtgtggactgtcacctggtcactctgggctcgtcatatcactgaatcaacaagcaaagaatgggatgatatgatgagcccagagcgaccagatgacagtccaaacttccagcttaatggaatcacagttgtgtcccctggcagaaacattcctcccttggcaataggactcaaagtcatggggacaggaagcaaaagttttgctagtgactcactagggataatagcaagagaagacactctcatttctaccccttgattcctggccccataaatccttcctataggggaaaatatactggttactgatttaaagcatgtaccacattctggagggcattgcctaagcc

SEQ ID NO: 476686 - DNA, 547 bp, Homo sapiens
tggttgagcatgcatgggaagtctcaccatctttcatgcctgattggctatggtttgtcctccaacagaccctccctgctttcaggagacctgaaatcctcagggaatggacatcaactcagctcagccctcaggggagggtgcacagtgactggaatggcagggatttggcacctctatagtagcttggccctaggggacagagcacagcagcagctcagctcagggataatgtgcctccaggcagactgtgatgctccagctgtaacacaaccagggcttaacaactttgaccacaatgccagacaaagtggtcccaccttcaaataccatcacaatgatgagatgttttcaacatatacatttggagggggacacaaatatttggtctatagcactgcccattccctcagagaaaggtccaacttccccagcctctatattatctgatttcaacacctgaagagcctgcatgtctttaaacccagatttagtctaagcctaatgaattccagagactcccctcactgactctgggtctccaaat

SEQ ID NO: 476687 - DNA, 653 bp, Homo sapiens
ggcgcgccgtcccttgcgccgccgtcccttgcgccgccgtcccttgcgccgccgtcccttgcgccgccgtcccttgcgccgccgtcccttgcgctcctgatagtgagatcagttccttgcatcagtctacatgtgccagagatgagaattcacatatttagggtgcagatggcaactggaccatccaggcagcttgcagctcagccctttggctactatgtcctttaccagtatgaagccagatactatcagtggacggctgggtggctatggctgtccaagtgtaaggattgccttgtgatgagccatctatgtactagtcctggtcaggcactgggtcctgtccctcttgtacaaaagggggcatctggagggccagtagacctctgcctgcaccctatccataatggcaggcagaatgacttgagccttacccgacaagatgacagccaagtatttgtggaacctggactttgcattgactctccatcctgtttgccaagtaagagcaaggtgagggctgcggcttgtaagcttgtaaaagacttggaagttagcatgatgttctccatgtgatggagaacaagtaccctccagagtggtccattcactgaggtctgtggccactagactgtgacaatgaggctatgtaa

SEQ ID NO: 476688 - DNA, 585 bp, Homo sapiens
tgggtcaagctgtttgtctgatcagtcccgctgcttttgctcatccattaggtagtgtttagcagcctttggatgactcagctctgaatgtgggtcagatgggacaagctctacacagctgtggtagactcaagccttaattcccacacatttcatggaggagcaagtcaccagcagcacttcatatggtccattctattagggcttcagttgattatcagggtgctggtttctaaacaacctgctagaagacttatggcagtcaaacctaaggattgcacatacctgacagtgtctagctcttttacacctatgcttttgtggcatttcagtttagaggagaagcatgggaagtttctcccatgtaagatttcaaaagggctctgtttggacccaattgtagggaccactcttactctgatcagggcaataggcaaagccttattccagctgaagcacccaggtcagggtgatgagtttgatggctgctgtgaaaccttggtggttcttagtttatgagaatctaaacaagtcatacagcaaaggaaatgcaacatagagtaatttattgcaaaggagaaagaa

SEQ ID NO: 476689 - DNA, 751 bp, Homo sapiens
ctgctgaaaagatacctgaaaatgtggaagcaactttggaactgggcaacaggcagaagttggaacagtttggagggctcagaagaagacaggaaaatatgggaaagtttggaacttagagacttgttgaatggctttgaccaaaatcctgatagtgatatggacaatgatgtccaggctgaggtggtctcagatggagatgaggaacttgttgggaactggagcaaaggtgactcttgttatgttttagtaaagagactggcggcattttgcccctgccctacagatttgtggaatgttgagcttgagagagatgatttagggtatctggtagaagaaatttctaagcagcaaaacattcaaaaggagagccacaggaaagcagatccaggccaggtgcatgtggctgtggattctcgccaggacccagtgagcccggagtctggagcagagcaggccacctgtgatggcaaaggagaggaatggggaaagcaaaagaaatactgtgggacctggtcaaggaaactaccccgtaaaggctgagtggaggacccagcagccccaagaccctcttgggatggaaagtatggatatgcagggtcaaagagttcttccctgacccctcttattactctgctttgttttcatagcttttatgacattttattgcatttttttactatatatttattgtttatatgaaaattttctacacaggccccagaaggaattttattcctcactaatgtat

SEQ ID NO: 476690 - DNA, 544 bp, Homo sapiens
ttctgaggcagggctcgcgcaccatgaggctgaatccttcccccactggacctgcacctgaattggctccttgcttcttttcccctacttccctgcccagcctcccactcccttatggcattggaacttctgattggcccacagctttttccctcactctaagctcctcagcaaggcgccttggtgtatatccaggacccacaatgaggcccttggaggataaagccctgttgtgttccccaccaaccctccttgctgatgagacctctggagaagacaatgagtgtggcagagggtgccagatccctcacaatagcctttctcctttagggaaaaaatcatttcccacagaggtaggattcaaagctcagcaagctgattccagagcctggactgcaggggataatttggcagcggtcatgccaatgaccaaggtagggaatgaatcaggggaggcatttctgaagaggagaacatggtaagctcagtttgggatatttaatgagtcacattcagtggttattaaaaggggagtctgttgctc

SEQ ID NO: 476691 - DNA, 1488 bp, Homo sapiens
aaccccttagtttccacagtgatgtctcctcctctggatagcattccaggactgtgcaggtctacaatacatgacacccccaggtgctccccagcaccctgcacttctgccatcataagcagatggcatactatatgtgaattgcctgtttacttgtttgtttccctttcaatatgcagttatgaacatgtaatatctaataattcaatactctccatcaatgcaaataagagctccaatcctaagaaagggctggctgacaacctgctgaggaggcccttccagtgccacccgctgcacccctcaggactgtgcctgcacagccatgtgactcgtggggggcggggtttggaatgcctgctcgggggaaatgaaaaccacagcgccaagccctggactgccgaggatgtctgcaaatgccttttcttaccatcgttcagtgccacatttctccctgagctgactgtgaatggacagctgggtggaaaggaccactccagagcccacggcactgtggcggcagccactcctgggagaacttacaatgcactgagcaaccattgggactaactatattcccaacaacgaacaacacaaaacacttatcaccctctgaaaccacatgtatgtatgtattgtatggaatgaaaactcctcagaggctaacctgtcctgttcagtgctccttctccagtacagtaggatgaaagagaggaaggaagggagagagcagtcgcagtcccattgtaaacaggtcctctgataggtaccagattggcacacctgcctgcccacatcaagcccaaactgctctcctatgaaggtgccaaccctggaactgagctttttcctctctgcccccacaatcagaattttttaaataacctttctgttctgggggacttggctcatgtcaacatccacaggcccttgctaacctgtaccctgactaacctcatcacctcactattctgctgtctctttctcactaggttttcatttttgggagtttgtggtttgtttgttttgcttttatttttattttctacattttaactccatgaataattctctccaaagggggccaaacaaaatgccacgtataaatggcaaggtggctagtgagagccactctcttttcctggcaagagtttccatttctgaaagtgacacatgagaatctttggagacatctatcatcatttcagaatgctatggggtcatccaagctaatatctgtacctgttgtacatcctcaacagacagaagtaattgaccattatggatggattatgttaggctatctaggaaagtttcagaggagttttgctttcatagatgcattatcctataggagctcagagagggatatagtcgatacggaaggcaagtcctaaagatgtcaacctcatctatgcctgaggaggtaagaatatgcaaaaggcattactttactttttctaattatcaaagtatggcttgcccatt

SEQ ID NO: 476692 - DNA, 2059 bp, Homo sapiens
acatggtggcagccaagacagaatgaaagccaagtgagaggggaaacctcgtatgaaaacatcagatctcatgagacttattcactaccacgagaacagtatggaggaaaccgtccccatgattcagttatctcccacctggtccctcccacaacacgtggaaattatgggagctacagttcaagatgagatttgggtgaggacacagccaaaccatatcagggtctatggcagggaatgacttgacccaatttgcatgacaagaggcttagtgtggctgccacacagagaaggtaggagggagtgagaagcaggccagccgtgtcatgtagctttctgagtgagatcagtcacctaaaatggaaaagcattttggaaatataagtggtgagtccagttgtaaagtgtagtaaaatgtgacacgtggttgcctccagcatccccaagaggccagtgtcgtccatccctctcaccggagacagccagacggactcggacatcatcgccttcatcaaggccagacagagcattctgcagaagcaatgtttgggaagcaattgaatttccaggaaatatccatccatgaattatgccagcaagaatgaagcacagatgaaggcagcgcccctcacttgctctggcttcagaagtgaactatgggctgctgggagcaactagtgactttgattcccatggaggggactgtgtttctttaaggatgctgacctggaggccaccgagaggctggggctggggctgaccacaacatccttcctgtggttgctggagctgctggcagggccaggcaaggccagagtgctaggggcagggtgaaggcttcagctcactgttgtagtgacgttttgtgtagatctttataagcttttgagaatgtgaaatagcaccatcaaaatataataggtccccagcgggatggggccccagttgcccgcaacagtcacctgtgcgaaaacacaccctgaatcgactgccttctgttccccactcccctgcttgcgcatcctggatcaggtcccagatgaaccacgcacacccgcattgtgtcttgggacctgcgctgagggaagtccaacttagacaagggcatccatttcagaattacggtctctcttttgttctctcctccttattacaaaaacaattgttgcttgtcctggacagaaaggccaccgtatctgccacggcgagtgccttccaggtgactgctcaaagatactcagtgctacagagttactcagtcctgcctgaagccctgcagacatccacggatgagctttctaagtgatacacgagagagctctccatgtattgagtttctccagggcaatcgaatagggtttgactctcacgctgcctttcagatttaattctaactcttgcttaagccaggagctggtgcatctgtagcagaaatgagtgccagcactctgttgccccactgattccagatgcttccttctccctccaagacaagcccacatcccaacaaggtgccgtctgggaaagctcccggaccatgtgaagtggggcttgcacagaaccacttcagagatccccagatggcctcagaggattccagaagcagcagaattccagagaaggtgggctccatcacaccacccccagacagggccgtgcctaagccacagggtggacaaaagcctgcaggccaccgtatctgccatgacaagtgccttccaggtggtgcctacatggacacaagatggctcagcaggtccagacagaaagaggcagaaatgcggggccagctgcagctgaacccttggtcaacagacaacaattttgcccaaacctcctcagccaactctgcccaatcatggctggacctgggcacgtggccagccccagctgcaagggagcttgggaaagggtctctccacaagctcctggagccatctttcctgcacgtgcgcaaagccagaaatgcatgagtgacggactaatgtggggatatgaaggcccaggtcccctgctgggactcactggggtgcacttcacctgccagagctcccaggaa

SEQ ID NO: 476693 - DNA, 629 bp, Homo sapiens
ggattggaaacctgcagcgtacatgagcatggtgggtgcagagcaggcagggcactgtcagcgtctgctgcgtatatgtcaaccattcctgtaacgtacaagaggcatgagggcagacaggaacacccacttggctatgggagaggggagccaaggcaggacgggaatacatctggaaggagaggtgatacagtcagcctggaggcatcaggaaattctggatcaaggtatgaggacctgaactggtccctgatcagcaggggtagaaggagaaccatggagtctggcatcacacaggtcaaaggaagagagagcaatgacatggtggcattgcgttctcaagtcctgagtcctacccaaagtggaggccaaagccatctggaacactttccaggacaggtgagccctgaaccaccaggagactactgtgagcccaagaacatgagcttcgtgggaagaaggctgcagggaccctgggagtaagagtgagctgagggcaaggcactgtctgcaagccagaagggaggagggttccagaggttattaccggagctgtacaaatattgttgttttgactggtagtggagattgttttatttttttccccaggaaccacaagtgtgatgtgc

SEQ ID NO: 476694 - DNA, 700 bp, Homo sapiens
tttgatgctttagcctctaattcccccgcatcttcacagcttcttcaagatggggggctatgaatgcgagggctctgtccctatctccaagatgacaaatccgtgggcgtttctggcactggaaactcagcctcctcagacataacggagaaggaagtgactcgaggtggctttgcaattgggtccttgaaaaatggcacctgctgggcaaagccgcacattcacttgaggccaggtctagaggagaggggaatgagtgagttatcaaattccctttatgtggaaccaggggagctaattttgtctaacctgagtgtggacttgctggcagccaggttctcctggcagaaagtggattcctggcccactgctgaggtctctgccttctctcagcagcagatcttcagactgtctggcaagggccagcctgagggcgatggtgagcattagatgaaataacacatatacagctcctaaaacagtgcctggctcaaggcaaatgctcggtaaatattggttcttattactggacccattttataccaaggtttagtgctattaaggatacagagtaagtgactgagatggatttgactgtcagactctaaaaatctgtgtttaggggtacctaccctgcactggctgaatgcaaaaatgttctccaagtcagagaaagccccctggcagagaaaacatggcc

SEQ ID NO: 476695 - DNA, 640 bp, Homo sapiens
gtcactgaatacataggttcccatggagaatgttgcaacaattgctgattgtgccagtgtgattgaaggagtcagtcggagccgaaatgccttgctgaatggggacactaagaattatgactgggattctggctacacatgtcaccagctaggaagtggtgcgattgtggttcagttggcacaaccgtacatgattgggtcaatacggaaggcctcactgagaagggtgaagtgtgagcagatcccaaaggatggagacagtaagtcctctggggatgagcatcaccggcagtgccaagccctggagtggagcttgcctggcaggccacaggagcagctaggaggccagtcctatctgcatcactctaaagtcttcttttatcaccctcagacctcagagctctggttcccagaaaaatcatacagcaaataattttatctatggttcccaggtacatgtgcacaatgtgcagctttgttacatatgtatacatgtgccatgtcggtgtactgcacccattaactcgtcatttagcattaggtatatctcctaatgctatccctcccccctccccccaccccacaacagtccccggagtgtgatgttccccttcctgtgtccatgtgttccattgttcaa

SEQ ID NO: 476696 - DNA, 1108 bp, Homo sapiens
ccagccattttaaatgggttggatagtagctactcagtgtttgtgaacccagagactttgtgctagcttcaaaaactatcgatggatttggtctatggcatggaaaggtctgtctgtgtgtgtacaataaagggaaatctgcgtgaacacacgctttgccgaatggcccagaggagcatctgcatgggccgacagcagcaggacagaaagtctgcaagtggctacttgagctgccctccaggaccactcggctcagggcctggagtgaggcagaatttatttactggcttcggtcagaccagtctgattccactctctctggccccccgaggatttccccggcagcatcctccagaggaccatcgtctcagcccagaagcacctcaaagcagtcacatgctggccccagggccagaacccccagtgggcgctctctgtgctctgtggcagagcacagagagagcaaatggagaggcagccctctccttgcaaaagctcctggtctgcagagagcaccagttccagccttcagactccacttctgtgtgggagggaacctggccctccaggggcttcatgttccagcaactggaaatggatgcccacaaagaaaacctgcttgggaatagaaataatggaaacaaacttaggtttcagatggcagcacggaggccctgtatggtgcatgcgaggtactgggccagagaggaggcagtgcagggacagccgggatagtcaagcccagcgggcagcctggtacctgtgaatctgcattgtaccagtttaggaggcaagagtgaggatgctgtcaccgcagccttgttcatcctgaacccaacgggataccacgagcgtccatccacagaggatggaaccttccaagcatcagagttccaattatctgtggatatcctggcctatgtgaatatgagaaaatgatattgtaaagtttttttaaaagctgttgccgtacataagcattgtcacccagaaacttacctccatacttagtgcaaaaatatttgggtatcctatcaccctaagcaatactgaaaatttgttgctcgcaatttggaaatgtctccctatgaagtaattcctagttttg

SEQ ID NO: 476697 - DNA, 655 bp, Homo sapiens
gaggtgaagtgacttgcccaaggcctaatgatgggacatactccttgataccctccctccccaccaacatgcacacttaggaagtatggcctgctacccttgggggcatcccagccagttggaagtggattcacatgagggttatggaatagagtatggttaccatctccccagggaaacggcttggtcctgatgcggagatgggggtaggcgatgaactcgggtctctcgtgctctccgtggtgcgacttcaggtacacattcagcatgctgactgccaccccggggagcgcgacgaagaaggccgccccagctgtgggcgggaccgacccagcagccgagaaaccgagaacacaccaactgccgccatttttgatctggactgccgcagcgccgcaaagcattattttaaaataggggctgacatgccaattttcatgtttgccaatttccatggtggaaatactctcattgtggccatcttcaaaaagaagcaggtcctggtatcaagccatgagggcgggacaggcagtaaggagcactacgtgaggcaggtggacaaggaagcctgtccgagggccaatgaggcagagactggagagaagtgagggagtgcatcgggcggatttctggaggaacagcatccaggctgaac

SEQ ID NO: 476698 - DNA, 1450 bp, Homo sapiens
cgtggttcacagagcttctcccatttgagtgacctcacccactcctcacaggatagctctccaaggtgagtctcactgtcaccccgcataaggagactgatgctcagaaagctgttgggtacacctcccagaaggggtggcggcggggcagaggggctcctcacttcccagaaggggcggccgggcagaggcgccccccacctcccggatggggcggcggccgggcggaggcgccccccacctcccggacggggcggctggccgggcggtggctgccccccacctccctcccggacggggcggctggccgggcggagacgctcctcacttcccagacggggcggctgccgggcggaggggctcctcacttctcagacggggcggctgccgggcagagacgctcctcacctcccagacggggtcgtggctgggcagaggcgctcctcacatcccagactgggcggcggggcagaggcgctccccacatctcagacaatgggcggccgggcagagacgctcctcacttcctagacgggatggcggctgggaagaggcgctcctcacttcccagactgggcagccaggcagaggggctcctcacatcccagacgatggtccctggcacttcctggattgtcgagcggctccctgcctctgcccttttgtattcggagctacagccttgcctcccctgttcccaccaccctgaccacccctcaacaccatcccgctgtcagctccgccgccaactgaggcgacacctgttcatggaaaccctgatcactgctgagagcctggaggtgagcgatcctgtcagcaccaccatgcaagagactgatgactccatccgcaggaatagagctgccactccccttctgcaatgtgaggacacggtgaggagattgccatctatcaaccagaacgcaggccctcaccagacatcgcatctgctggtgcctggatctctggcctccagaactgtgagaaataaatttatgttgtttataagtaattagtttatggaattttgttatagcagcccaaacagacaagataccaacttattagaaggttgcctggtttttgctaacttggttctcagtaattttccttagtgggggtgaaaaataaggattaaaaaaaaaaaagtgaagatagaaaatggtaggtggttaagaaaatcttagctcctgattagcacagagtgaagaaagggaaagtcaactggaggtcaggaagggaagtacagtttcagttgtttacctgttgaggagatacctcagttacaacagagtaaagatgggggcgtttcatggcaagtactaaatgggttgcatgaagcaatgcttttaaaatacagtaaaatgttaacatttgttaaatctaagtagtggctacagatacttttggaattaataatgtactcatattttacagaagcaaacaaaac

SEQ ID NO: 476699 - DNA, 679 bp, Homo sapiens
atcgttagggggcaataattttttttctttaaatgtgtacttgggattttatattggaagacatggatcttgctgccaacgagatcagcatttatgacaaactttcagagactgttgatttggtgagacagaccggccatcagtgtggcatgtcagagaaggcaattgaaaaatttatcagacagctgctggaaaagaatgaacctcagagaccccccccgcagtatcctctccttatagttgtgtataagggcaccctaatcacaatccagaataatcttcctagaacatcgagaaattcctgctcaaaagcctccaacaactttgacccctggtggacaaacgactgtgagcagaatgagtcagagcccattcctgccaactgcactggctgtgcccagaaacacctgaaggtgatgctcctggaagacgccccaaggaaatttgagaggctccatccactggtgatcaaggaggagacctctgaacagatcacaaatgttacgtgagctttttcctgttttcactcacctgccatttccaaaagatgcctctttaaacaagtgctcctttcttcacccagaacctgttgtggggagtaagatgcataagatgcctgacctatttatcattggcagcggtgaggccatgttgcagctcatccctcccttccagtgcc

SEQ ID NO: 476700 - DNA, 690 bp, Homo sapiens
acgagtagactggctggcttggcggtgtccccttctgaaaagcctctgtgcccagcggaggctgtggccttgcatcatggcccatcgcctcctggcctcatattctacctccaccaaccctgaccctgtgctccagccacactacagcccccatgaggaagtgtttgcccctctggaggacacagcaacaaggaccatcttggaagcagagacctggccctcaccagacaccatacctgccggcaccttgatcttgaacttctcagcctccagaacagtgaaagtgcaacgactaaaagggaatggagtgacacagacaagtgtctacaagagaccctggggctgctactccaaatgctgtcactttgcaaggttactgggtagaacttcaatcttactactcacctgctcaacaacctgcaatggctccctattgttgcctttcccaacaaggcctcatttcatggatgattttccatcgtctggccctatcctaaaagagagtggagcctcttgctcagagtcaggctttggtctcaactgccttgtttcacattctcactatgccagtccccagctgggtgatgatgagtaagttacttagcctctctgggcactggcttccttacttattaaatgtagataatattaggttggtgcaaagtaactgcagcttttcccattaaaagt

SEQ ID NO: 476701 - DNA, 3814 bp, Homo sapiens
tgtgggctgcgggactggaggcagctgggaggagcaggcaggcactggtcgaggagcagcaagagccccttgcagagaagggaagggtgaaatagaaagcaaggccacctgctgtacatgggcttcaggcacctggggggctggggacccaccaccccttcagagacagtgcatcctgacatggcccccgttgtccccacctgcttggacccggctgacttccacgaatgcacatatgtttctgttccctgtggacgtggagacagcaatgacgcacagcctcctccatgcaaacacgccagccagaaatccgtgactatacccagcaaggccgtggaggagctgctaacctggaccccaaaggctgagcctggcagactggtctccacagctgacaagggctggctcgttggagctaaagaacccacttccaaactcacccttctggttgccagtgggtatcagttcttggtcaatgttgacaaaagctttagtgcctcatcaagtgggcctctctattgggagccaactttcttggcagctgactttcttcagtgagagatgaagagagagaaccagggagggagtgttccaggttgaagggactctttcccttccatgttttttatactttcagtatattaatatgtttcataaacaatatatactatcgttttataaatctttttaaaaatttcacataaacaaacacattgcctttattttgcaaattgctgtttttacttggtgttatgatccctggctccagtcttttccattttcctgctttctggtgacccattatgagaccatgggacaacatgtatcattctcttcctgatggacatttgggttgtttctagtgttttgctgtaaccagcaatgccacagtgaatccttttgtgtacatccttccttggccctgcataggaatttctcaggtcacaatgtgggtttatcaatggtacccacaggatttcagttgatggaggtgactgagttaccacatggagaggctagtgtcattgaagagatttctgttgcacatacttacatttccttgccatgcaggactgcatggggaagctccaggttcggtcatggggcagaagggacgaaaggagagcacagcccagagcctttacggtgttttccgtgggaaagggaagggaagcggggaagcagcttaggggcagggaagcagcttaggactggctgattcaaatcaaggtggcgggctctgggtcatagggttggtctctagttgactggtgcctggctctgggtgattttgcctcttggagtgtaaaagccagatagagagggtggatcagagcatgggctagtttacatatgagaggcgccgctgccccacccaccccagccctctgctatctctaagaatggggtagccctgggaggggcagccttgcccccatcagtgaggccacaaatgccagaacatcaaaaattcacaaaataagaaagcatggttaatacaatgggcatttctgcaactctgcaaggagttgctcgattgctctctagagtgggtgtgccagtttccactcccattgagtgtttataagagtcctaatcacgtcacttctcttattaccagatttaaaacgttttgccagtctgagggctatgaaatgctatctcactgttgtttaatttatattttccttattttttggtgaagctaggcatcatttcatttcattcattggttgttcctgtttccttttctctgaataccttgttcttagccttttccatttgggaatgcagggcagggggagtgttgtctttttgttaataacatgtagacgttggtactaatattggctccgctgaatgcattggaaatatcctctcccggtgtgcagttttttagtcaacattttaatggtgtcttcggtgatacaaaagatttaaattttaatgtaataaattgtgtcattcttttcttttatagtttatatttttttgtgtttatggtttatgttttaaaggcatcaggatgctctcccatataaaataaaatcttggttattttaaacgatttgaccatcaagcctaagctattcattcagtctcctttgaaaagctgcattttggtgggcaatttggcaccatctatttaaaaatcaatacttgcaggaatttatcctacagaaatactcataggagtcctccaaaaatatatgcaaagaatttttaaatacagcatcaattgtaatagcaaatatccagaaataacctaaaagtatatcaatggcaagctagttaaatgaatgatggtatagccacataatgcaattctctgcagctactgaaaagaataattgtggacctgggtgtgctcatagggaacgttctccaagatatattggtaagaaggaaaaataacgataaagaaacaaggattcaggcaatatagtatgctaccatttatgtctaaaaggtagaggaagagcttctgtatgtatatgcatgtaacatttcagaaataaaaccgctgaggatggttacttctgaggaagggactggggcttgcgggtggagggaaacccatttttcactgctagcctcttgtgttgttttcattgttacttccattacagtaaacaaagaagaattactgtggatggtcacattttctgtgcgctgctatttgttttggcatttggaatattctgaggtgaagagggccttttgttccaatagctatgaagaaattgaattattagaaatggggcaggaggtttcattacacgtgctgcgtagccccgtctggctgatgagatttaggcttgctgttgtctggggattcagggcagagtgggagagtggaggatgggagggttgtctgtgggacagaggtagggtgggacgaggtgggggacaggggaaagtggattgaaggtgggacaggtctgagccagaggatcagcctgggcttctgtagccctaggaccaactgtgtgaggtctgggtcacccccaggctctcagtctccttgcactgcctggctgcagggttggaagaacctctgcaccccctccccagtggagaaggagaatcccaatctcaaaggctctggcaggcgattctccccagaggataaaaagccgtgctcatcctaggaaaatgttcatccaataaaaaagaaataaaggcaccctgagtttaccctggttaaaagaagagaaagggatcagatcagcatccatggagcaaagacaagatgtgccgccagggttaagtccagccgcctttcttagggcggtacagtatggccacttagggagtccagctgtcttagttcaagacacagctatgttagttgcacctttgacaaattatttgacatctctgtgccttagctttctcatctagaaaatgggaaaataatcaaacttgcctcctagggttttctcctggcacatggcaagtgcttaccaagtgttaactgtttttattctttatttctcgcttttgtaagttcagcacagctgggccctaagactgtgatatggtcagtgcacgaagattggaaccacgtctgaggtgaacacacgttcaccaaactcacaagcctgatgaatgaattgtaacctaacttgttaatttacattgacctgaatacgtaggtaaacccatcaacactttcctcctcccttttcctcatgtgggagcccagactgtcctcagaggctctttaggggatgggagcacttctgtgccttatttacttccctggctgttcctgctgtttgactgtaagccccttaggggaagacacttc

SEQ ID NO: 476702 - DNA, 1627 bp, Homo sapiens
aggcctgtcccctcagttcccaggtgccatgaggaagcctcgtcggaagtcccggcagaatgccgagggccggcgttccccgtccccctacagtctcaagtgctcacccacccgggagaccctgacatatgcccaggcccagcggattgtcgaggtagacattgatggacgcctgcatcgtatcagcatctatgacccactcaaaatcattactgaagatgagctaactgcccaggatatcaccgaatgcaatagtaacaaggaaaacagtgaacagcctcagttccctggcaagtccaagaaaccctcatccaagggcaaaaagaaggaatcctgctccaagcatgcatctggtacttccttccacctcccacagcccagcttccgtatggtggactcaggcatccagccagaagcacccccgctgcctgctgcctactaccgctacattgagaagccacctgaagacctggatgcagaggtagagtatgacatggatgaggaggaccttgcctggctggacatggtgaatgaaaaacggcgagtagatgggcacagtttggtgtctgcagatacctttgagctgctggtagaccggcttgagaaagagtcatacttggagagtcgcagcagtggggcccaacagtcactcatcgatgaagacgctttctgctgtgtgtgcctggatgatgaatgtcacaatagcaatgttattctcttctgtgacatctgcaacctggctgtacaccaggagtgctatggcgtcccatacatccctgagggccagtggctatgccgctgctgcctgcagtctccctcccggcctgtggattgcatcctttgccccaataagggtggcgccttcaaacagaccagtgatgggcactgggcccatgtggtgtgtgccatctggatccctgaagtctgctttgctaacaccgtgttcttggaacctattgagggcattgacaatatcccgcctgcccgctggaaactaacctgctatatctgcaagcagaaagggctaggtgcagccatccagtgccataaggtgaactgctacacagcattccatgtgacatgtgcacagcgggctgggctcttcatgaagattgagcccatgcgcgaaaccagcctcaatggcaccatctttacagtgcgcaagactgcctactgtgaggcccactcgccaccaggtgcggccactgctaggaggaagggcgactcccctagaagcatcagtgagactggcgatgaggaagggctgaaggagggtgatggagaggaggaagaagaggaagaggtggaggaagaagagcaggaagctcaaggcggggtgagtggctccctcaagggagtgcccaagaaaagcaagatgagtttgaagcagaagatcaagaaggagccagaggaagcaggccaagacacaccctccactctccccatgcttgctgtcccacagataccctcttacagagaggtacctggaaccattggagggatgggagcttggcagagaagcaagagatagggaagatttcctagcagagactcatctcaggggtggtgttcattaaacagtatacactgttagagcaggaaggagtcttggagactgttcatctga

SEQ ID NO: 476703 - DNA, 648 bp, Homo sapiens
aaaagggagctaggaaatgtctttttttttgtctttaggaaacagcaatggaaatgcagccttctactctcttaagcccccttctcttgtcttatcttagaacttgcccaagctcagacaggatggctagaaccttggctcaaagctggtggcccctcaggcttctggaacagggtggctggaaggctcaaggcaacagccacggtctggtgaatcacccttgggtggtagtgcccctgcattcagaaggccaacaagaagccttcaattctctagatcaggagttgagaataaaagctaaaatggctcttggctatagctctgggtatagcttaactaaggaaatcaatccagaaatgcacattgaacccaggtatcagcaggatgtgactccagactctctaagggatatgaaaacattttttaaaaaccaccttaatcaagttataattcacatacaataaaatgcaaccacttaaagcagcagtccccgacctttttggcaccagggaccagttttgtggaagagaatttttccatggaccaggaataggatgagaaaactgaaactccctgagattgagtaatttccctgaagtcacagaggtagaaagcaccagagctgagatttgaattgcaggtttgttt

SEQ ID NO: 476704 - DNA, 1350 bp, Homo sapiens
gctaagtgaaagaagacacaaaagtgtatatatgctttccgaagttcctccatccttagtgtgttgacttttgttcttaagtctgtcccttcaaaatcacacgttaatattgcatctgccttttcagcaggaaaatgggggtggcagcagtgccagccgaagcaaaatgtctgtcctatgatgaatgtgccctgatgtctcattggctatattggtcacatggcttcactggccacaaaggattctgggaagtagatactgctattgttatcatcatcatcatcatcatcatcatcatcatccccatatttaaaaggagaagaatggggcacagagagatttcacctccttggaaaacagaaccaatcagaaatgtgtttcaaaaagtcccaagttattgcaaggagaacattttggaagtcctgagggtgggtaagaacaacagctgtcctggtgatggtgatggtaatggtggtgatagtggtggtggttgtgatgtgttggtgatggtggtggtggtgatggtgatggtaatggtggtggtagtggtgatggttgtgatggtggtgatggtggctgtgatggtggtggtggtggtcgtgatggtggtggtggtggtcgtgattggtagtagtgatggtggttgtgatggtgatggtggtggtggtggtgatgatggggtggttgtggtggtggtgttggtaatgatagtggtgatagtgatggtggtgatgatggtgatgacagaagccagccctactgagccacaattctaagcacttatttaatcctcacaacaaccttacaaagttgattctgttacttcccatatattacccaagtgattttaaagccattttccagggcaaaacactcccatggaagcatcccacctgctctttgggaccttgagcaggtcaattcacctttctggtagactccccatcagcaagacaccagcccggcttgttgagttcctcctggtgttatgggactcaattgagaccaacaatgcaaatgtgctttgaaaaagttgtgaggactcatcagacttatgctcttatcctcccctcctcagccagtctggcctgtgtgtggacaccaaggcccaccaggcatcctccagggagggaacctgacccttccatgtttgcattgtcctttctatctttttcctccctgcccatctgccattctgtatagcacagggagggtctagccagtgtggacaagtgtcccaacactggttctgcacctcaccagctatgtgacctcaggaaagttacttcccctccctgggcctcagtttcctcatctgtgtataagggggttatactgagctatccctcc

SEQ ID NO: 476705 - DNA, 842 bp, Homo sapiens
tctctcagatcctccacatccctactggctggatgggcttgctgcctcctcccagcctggccagatggatccctccacgtaccaccaccaagggtgtggccttgaaatgggtagctacattcctgtcctcaaggggcttgcattgagtggggtgcacgaggggatagacaagtacacaggcaattccaccagcgtggtgagcaacgctagcttttggaagctggaaaagggactgccctgtggaggggccgggtccaggctgctggaccctcgataccccgctcgcccaaccccacagggacgcgcaggcccgacccgggagtgcgggcagcggccgcgtaccgtgagccggccgggggtgtgcgtgctgctgccggcgccgcgccagcccgggccccgcccccgcctgccacccggcccgccgcccagcgcaggggagggcggcccggcaggggcggggccacggcgggcagagggggcggagctcgggaatggcaaagaaactgagccttaggaggatgcacccttgtgagcctgctatagggaaagactgagggaaatgaagacagcgactgactcgggaacactgcattttcccattgccctttcagcccagaagttgcagtgtcttgtcatcactgccggtcccaatacccaggttgatccccttcaccctgcccccacccctgtcgtccttccattaaagcctcttgcaccctttggttggattccatttcctgcctgggccctgtttgctatacagcagggtgagcactaagtgaggcagcacaggacttagcatccattaagtgctcaataaatcacagctcttaccatcatca

SEQ ID NO: 476706 - DNA, 810 bp, Homo sapiens
ctgggatctgcttagctaggctccttctctgcttccttttctttccagcctgtcacttccagagttcctcaggtgctcacttgcacctgtgtttgctggttcaaattaaatatcatctcttgccatgtccccacactcctggcggtggctgctgccatcacgccagctgcagcagggaggagttgagagggattcgacttgcagcagtcagcagcgtggaggcacgggcgccgtgtgtgccgacttgggaagcggaagagtagtgcggctggtggcccgcgtgggcctgaccctgggagtctcgcgtggctgcctggcgccccctcgcggtcgtggcccgcttcgccgcgcctattcagcggagctgctggagggcgcggggacccggagtgtgactgtggaactgagacgagctcccgggccagccctcctcagcagtggggctcccatggctttggtggctcagtgccagcagccagcgtctatcttttgccttgagacacctccaagctggcaacatgattaaggcagccaaggccaacatgtaaacctagatactttaatcaggaaggttttgcacataaatgaatgaaaaagcggtcaatataaaaactgggtagaagcacagtttcctctggctggagggtaggtgatctctagggatctggggtggtgccagccagccctgttgtcaggtaggggcactgagtcctagggacacagggcagggggtggaggaggtcagagaccctgggattccaggcagggatggaaaacagtgccctcttgttgtcgctcccctgccctgcc

SEQ ID NO: 476707 - DNA, 1006 bp, Homo sapiens
gctttcttccctggacagcatgagcttcaccactcgctctaccaccttctccaccaactaccagtccctggactcaatgcagccgcccaggtacagcgcccagctgaaccagaaggagaccaatcaaggcttgaacggctgcctggcctcctacctggatagagtgaggagcctggagactgagaatcggaggctggagagcaaaatccaggagtatctggagaagaagggaccccaggtcagagattgggggcattacttcaagaccatggaggacctgagggctcagatcttcgcaaattctgtgaacaatgccagcatcattctgcagattgacaatccccatcttgccgctgatgagacagagctggccatgtgccagtctggagagcgacatctctctgggttaaccgtggaggtagatgcccccaaatcacaggatcttgccaagatcatggcagacatccaggcccaatatgacaagctgtctcagaagaatcgagagaagctgaaccagtactgctcccaccagactgaggagagcaccacagtggtcaccacgcagtctgccaagatcagagctgctgagatgacgctcatgaagctgagacgtacagtccagtccttggagatcaacctggactcacccagtggggtcctgctgcacctggagttggagctggcacagacccgggcagaggagcagcgccaggcccaggagtacaaggccctgctgaatatccaggtcaagctggaggccgagatggccacctaccaccacctgctggaagacggcaaggacttcaatcttgggatgccctggacagcagcaattccatgcaaacgaccaccatccaacagaccaccctccccccgccgccaggatagtggatggcaaagtggtgtacgagactaacaacaccaaagttcagaggcattgagccagcagaagcagggtaccctttggggagcagaaggccaataaaaagttccaaggtcattgtgg

SEQ ID NO: 476708 - DNA, 1220 bp, Homo sapiens
tgggtcacatgacccaagatagccaactggagtccttccctgggattttctgaattagagtgccagggtttgacatgctttttggggctctgcagttcctggcatctccaagcttctgggcgccaccatgttccctggtgcccacagtggaagctgcttgtggtacgtctggaccagctgcagcagggagccagtgcctgtgctggcgcctggagcggcctgcctcgccgcagctggtgtgcccggctgtgtacgcagtggccggaccctgtgcctgctcgctcacacaccccttgccactccgcacctggctcgcctttggcaggcatgggatccaggctggggtcaagctcagaccagggtcagatgacagcaaaaggtccttggagacccagaggagtaacacctgtgacaagagcagaggcagggggctctgccagggcagagaaacaagatggtggctctccctggtggcctgagcctaggcctggctgagggaacagggtcagagggcagcagtgtgggctgcttcaggccacagggccccagagagggcaagatgggtggaccaaggacaaacccatgccagagaccagctgaggaaaccaggcagggaaccaggatcccaaaggaaacaccagattccacaactatctacataaaaagcaccttaataagaaacaaaaatgaggatcccagatgacatttctaggcacactcagggctagaagggaatctgctgcgttgaagggaagggcccaggcctggcgggatccatcacttgctgactgtaagagcccttgggccctgaataaccagcagcaatacccagctcccagatggcacctctggacccacttggggcccaggagaactcaccaccctgaagggaaggacacagcctggctggcttcaccacctgctaatcgtagagccgtagggacttgagtgaacataagtggtagcgaggccgcagttacagcaggccttgggcaaggcccagagctgtgctggctttaagtctgacccagtccagtcccagccacaggagtgcttgtatcacccctccgccaggactgagaccaggaccaggtagctcaggagagagagggagagggagagggagagggagagggagagggagagggagactatttatttgggagaaagtaagggaagagaataagggtctttgcctgctgatccagagaattcttctg

SEQ ID NO: 476709 - DNA, 424 bp, Homo sapiens
aaggacagagtttgaggcactgatcagtgtgattatgaataaaggttatagtgtatttgccactggaattatgatatgtcccatgccaggtgaaaaggaggtgctaagatgtcccagggtttgtgtcatccacggaagctgcatcatccgggaccgtgggtcctgcaggcatatttttaaggctggagtgggcacgttctactatggcccgtccttgggggttatacgggatgcctatggaacgttggatattccacgtgtgacaaaattgttgaaattggctgaggaacttgcgggtggtaaaatacatgatggtgccttgtccttcccctttttaggctcttctgtgtataatgggaccaaagccgcccttactaaggcccatagcattaaagatgatactgggacccgttacccttgaaca

SEQ ID NO: 476710 - DNA, 473 bp, Homo sapiens
cgtgcatctgtgtctgtgcatgagcatggtgtgtgtctttgtgtgtgtgtgtgaatggagagcagaactaaagtcccataacacaggagctataaaagcagccaggaagcaggggatcccgcagaggagcagaagtcttttaggccttagtgcctgctctgtgaagcaaatagcaagctttgtgaatgccacgtgtccatcatcttggagatatccagaattgccagtcataataacggaattatatgaacaaactgaaaccaatgacatagacatagaaaaaatatggagaaaatcagtaaatccaaaagttggttttttgagaagatcaacaaaattggctaacctttttattattgaaaaagaggaagaggagacacagatcatcaaaattaataatgaaaaagtggtattactattgatctttcagaaagtagaggattaaaagggaatactaaaaataactttatgcc

SEQ ID NO: 476711 - DNA, 546 bp, Homo sapiens
cccacagtgggaatgtgctaccatgattgatccagccatctgcctactaaagggcaaaccccacactgggaatactcgccacaatgcctggtgtagggaagaggctggacagctccgagagaaggagctgggaattctgacatccgtccttgaatgggtggccaagggcggctctgaagaccgcgagagtgtctcctggaagagagaatatggagactgtgcagctcagggcgtcaccctccagactgaattgctctggcctccacacatccaggacacatctcccatggggactgtggtggtgacttgtatgtgtcaacttgcccaggccatcgagtgcccagacatttggtctatgattaggttgggtgttttagatatgattgaccttgacactggtggactgcaggcagcagattccctcccttatgtgaatggaggcctgaatggaacaaaatggtggattctgtccagagcaagagaattcttcctgcctgatggccttcaaacagaaaggtcagcttcttcctgccttcagacttgaac

SEQ ID NO: 476712 - DNA, 1013 bp, Homo sapiens
catcgtctttttattttattttttttaagggacaggatttacataatggacatttgtcaagggtttcaagtcacagcttttataggcttccatctttttttgaaagaagacagattttcagagtggtttgaatttcatgacaatgtgggccggccacatggacaattgtacaaaagctacacaaggagaaatgggttaaaaggcttgaattttcaagccaaggttctgctatataaaaataatgatgaaactctcagcctgaacaagatggcaaaggctcatttctctctgccacactctgccaagtccagaatcagccctggaaataaagcaagagtgccagaggagaactctgaaaggtggaaggagggaagtggcctgatttgggaccaagaactgaaaagcaatgcaatacgggggtcttataccccccatccaacagacgaaggtgatagaaggtggcccaggccacgagaagaggataaaaaggccagctatagactaggagaaaatattgcaaaccacatatctgacaaagaactggtatctagaatatatacattctcaaaactcaacagtaaagaaagagatgattcaactacaaaatgcacagaagctgtgaacatttttctgaagagcatatagagatggctataagcacaggagacagtgttcaacattattagccatcagaccgtataccctggtcccacttattggaccaaccttactgacaaaggaactgttagcctggtctttgggatcttgtggggtgtgaaggcttcacaatctagatgcttctgtgtcctgtctgtacctgtgacttcatagcttaatctgggaccaatgcagagttctaagatttgtactttacagaatgtattttttttttaatattaaccattctttttttcccaacatcctttattttagatctattgttccttagagatttccaacaggttcactggtcctgtttggaaaaacagtgggctacaattttaggatagatt

SEQ ID NO: 476713 - DNA, 558 bp, Homo sapiens
tggtgtctgtgatagtccctggcatgtggcctggctgtgtccccagcgatggtgacagtgttcctggcagcaaggccagagctgaagctgcatgtggttgatggtgggatccctgctcagacatagcacagagctcagcccacggaatgtatttggagactgcccggtgaaagggaaacctaaaaatatgtgcggacagcctcattactcaaatatcaacaaataccaagttgcagtcctggaagaagagaatctcataagcttgagcagtagtccaagaggcattttaataacacctcctgattttcccgcagcatatggtcctgctcacactggagacttggacctccacatctcattactctgctggaagaagcagccagctccaggactgcatgggccagagagaaaaagcaatacaaaaaagagagcagaggatatcacagaaaaatggcaaagttggggacttcagggctctgtccctccagaaaatcaactaatgagctagtcagaatgtcagaaacagtgttggcagaactctggaatctagtgaaaaaa

SEQ ID NO: 476714 - DNA, 637 bp, Homo sapiens
ttcaggaatgtgaccaaagaattctctctagagtaagacagggcaccccgatgtccagagtggagttggctgtaggtgagcaggtagttgtgagtgagcaggatgtggaaggctctgtagtggaagactccagtgccgacttcacaagaaaagcacatccaaaaggacagggtggacattcgtctaggctgattggcattttcagtgtgccctgctctgtaacgtgtaggactgggagcctgttggaaatgcagaatctcaagccctgttccagactccctggattagaatcaggcagagactggaagagtttggaggactcagaagacaggaagatgagggaaaatttggaagttcttgaagactggttaaatggttctgaccaaaatcatagaaatgtggacagtgaaggccaggctgatgaggtctcagatggaaatgaggaagttactggaaactagagattcaatgctataaatttctcttttggcactgttttatctgtgtctcacaaattttaagtcagttctaagtattttaaaaatttccctgaaacttcctttttgagtcatggattagttgtttaatttatcaggttgtggagattttccagttatctttctgttattgatttcca

SEQ ID NO: 476715 - DNA, 636 bp, Homo sapiens
tgcattaactcccaccctctagaatgatgctctctgcagatgtgctgcggccgtgctccactcagttattcccaacacctggaaccactctggcacacaacaggtgccctggaaaaagtcctatgcttagatctgacagccctggttccgcttccaggaggaagcccttttctacggcccactcagactccagggttgacctctggggatcccttggtgttatttatctttatcacctcaaggtgagggggcccagtgacaatgacctggtccagcactgcccagattttgtagccagaacatggagatgcagattgaggcaacaggtcttcttggagaattgtcttcctgtttgtgtaatgtcactctttatccctgatgatattcctgttctgtagtctgctttgtctgaaattaatatagtaactttacaccacatctgggatctttcttccatcttttgtgatactgtgctcattcatttctcttatctatatgctatgaccttccattagatttttcctattattaatttaaacgaagttattttatgtccattaaaaataagaaaactaaaatattttattttacctttatttattccttttctgatgttcttcctttttggtatggacc

SEQ ID NO: 476716 - DNA, 488 bp, Homo sapiens
tgctttctcatcccgtctccacgtggctggggaagcctcacaatcatggcagaaggcaaggaggagcaagtcacatcttacatggatggtggcaggcaaaaagagcttgtgcagagaaactcccattttttaaaaccatcagatcttgtgagagccatgcactattatgagaacagcacaggaaagacccatccccatgattcaatcatctcccactgggtccctcccacagcatgcgggaattatgggagctacaagatgaggtttgggtggggacacagagccaaaccatatcattctgccccaggcccctcccagatctcatatcttcacatttcaaaaccaatcatgccttcccaacagtcccccaaagtcacaactcatttcagcattaactcaaaagtccacagtccaaagtctcatctgagacagggcaagttgcttctgcctatgatcctgcaaaatcaaaagcaagttagttaattcct

SEQ ID NO: 476717 - DNA, 521 bp, Homo sapiens
gagtctacagaagcatctagcaggctctgctctctggtcgcacaagggtggagtttgagatgggccagagctgcggcaccatcagggacttcttcagcaggggcgccgccgatggcactccctggtcttgttttctcctgggtcagtgtcagcgctgagcacgtggacagcacatggccgactctctcctcaaagggctgccacggacttggctgcaccaggctacctccgcagaaaccaacaaacactggttacctttccgcagtacccatctgcttccaagccccgggagcctccgccttccgcccctctgctccttccctccaacctcctccacttgctagcaccctctcttccatggctctggggacaccctgctccccgtctcttcagcttcaggcccagaatagctactgctccagatggctggtgcacgcagcccagcgttcctccagcctcttcgccaatccttccatcttccaagtaactgagatacagcctcctgcgcgtagctagcaagc

SEQ ID NO: 476718 - DNA, 754 bp, Homo sapiens
tgcaactgctacccttgccataatggacaccatacggcacctgcttctcccagtgggcagtcccagggacccgtgtctattacccagctatagagggtctgtgctaggaggatgctgcatcagaaggggaggatcccccagccccatgaaggcactcagtaacactgcgtggcccactctcttcaaagccttcctttcatgtccagaacagcccagcctgagaaaggtggccaaggactgtgtggaggagggtggagtagagactttctcctcccaattccctggcattgcccttaggacctttgccctgattccttcttcttgtgagatctctgtgtctttggacaattggctgcctcccattgggaccaagaaggttctaagtgttcccatagctcaggatcaggatctcacttgtgtcctttcagatttcacagagaaaattggagcccccaaactcacactccattgctatggtcccagaattaccacagggaaggccgattatggccaggatggtgggagtctgtgagctgtcgtggaacatcaggagaaggggaatccagagccctggccactggggaatttctaatgatctataagctgataatacccttgtgctttctttcaattgtgttgaaagcaaacaattggaatttctatgatttgccaagggatttttaaggtctaggcattaggataggcaaaatgtgatttttctttacacctccacgtgaaagctgacagaagggag

SEQ ID NO: 476719 - DNA, 863 bp, Homo sapiens
cgcccctcggtcctgagaactgccctacagggggaggcgcgggagtcactgtgcttctgtgagatagtgatgagcaaagaagcaggaatagcaaggaaaacggaagggatcttcacctgggtccacagagtagcccctgcagctctagccatcatatcaccttcaaggcaagaacatagctcagacctctgcccaactctcagtgccctccagactctgccaagtggctctcacagcgggctgctgcagttttctgggggtcactccagaccttatttgcctgagtccctcctgaacccagaggtgtcaccagtggaggctgcagaacaggacctacttgatgaagcactctggctgcccctttgtggagggggtgcgctgtgctgggggaatcccactcgttggaactgcccagattcctcagagctagcaggggaaaatactaagtccaccgatctgtggagaccacggccgcccctcctggcagggacttcatttcagggagatcagatttctgtctgtaaactcctggctggagttcctgaaatccccatagggagaccctgcccggtgagtggggatgggcctaggtctggcctaaagaggcagtctggccaggatctgccacagccactgtgctgtgccgtggggaattcctcctgggtccaaactgcccagtctccccagcaccagcggcggaaaacagcagactggagccgcagtgatggcagccgcccctccccacgggaacttggtagtcttaggcagcctccagccaagtggccaccgagaatctccacagctctgggcttgggacccaaggccctggtggtgtgggctcatgaagggatctcctgattagc

SEQ ID NO: 476720 - DNA, 712 bp, Homo sapiens
agacagcagacggtctgcagggagacctggaacagacgttctacctgcatcctgcaggaagaatgcatgagattacattttaatgtgattaaagccctggaatgcagccagcagtttcttggagcccaattctgtgtcttgcagattattaatcatgtgtatccatatcactgtactttaatgctgagcatatacagtcaatcttccagtgtcagaagtggtaggaaggacaaccaccatagcagcagctatggtgacagcaagagcaacagggttcccaggtgtttaaaaccctacagaaagaaaactccctcccaaataagaggagctggtgtcccaagagagtggggcaaactcctgctacctcttctctctttggccttccaccacttgacccgagatgtcataagaagtgcgtggcagagcagagtaaccatagcaccaggttccaaagtgatatcaacagggaatcagaaagtaccagggagttcacaaataggtagggatccataaaattgtttgtgaattttgtgaactcctgtgtttactcccatgctgtgcatacatggacctgactctaaacaacatgctgaagattctgagacctgaaatatgggataaaccagtgcccagaacctagcctggccagtggatggcacacaggtgggacagatctaaatagcaccacagaagctttgaaaatgtaactgac

SEQ ID NO: 476721 - DNA, 682 bp, Homo sapiens
agcggaggccagcgggaaggaaaaaggactgagagatggaaatgaggaagaaggtcccttgggctctggctgcctcttcttgctggttacagtccatccccagtgcgttgctgagtgaccggggctacagtctagaccttaagagaggtagagagacctatgaattcctcctggacagcctgacaagctctcagcctctaccacaaggtggtaaagtaaggactcaggccactttgacagcaaaatgcgctggtttcttcctgcagccttcagtaaagcataatggagaagacaccaaccagctcaagggcaaagctgctcaattgaaggaagtcagaggaagcagagccatcaaacaagataataatagagaagagagacaagctaaggcaccaaatcctgctttagaaaggattattagatgcctaggttatctccattatattcatggtagtccataattgtcatttaagtgtgtgtgtgtgtatgtgtgtgtgtgtgtgtgtgtgtgtgtgagagagagagagagagagagagattgagagagagagagagaatgtcactttttccctctggctgcctattaatgattccagtctacatgaaatactattttctcacctactcaataaatgctactaaagtgaatttattattgattagaccaatttttagctttcaa

SEQ ID NO: 476722 - DNA, 782 bp, Homo sapiens
ccgagtgtgggtctcctgggggcagataactactctccttttgagagacagctcttggcctgttactgggctttggtggaaactgatcgtttgaccgtgggtcattaagtcaccacgcgacctcaattgcctatcatgaactgggtgctttttgacccatctagccataaagtgggtcatgcaaagcagcattccatcataaaatggaagtggcatatgtgtgactgggctcaagcgtgtcctgaaggcacaaataagttacatgaggaagtggctcaaatgcccatgttctccactcctgccaccctgccttctcttccccagcctgcaccaatggcctcatggggagttccctatgatcagttgacagaggaagagaagactagggcattgttcacagatggttctgcacaatatgcaggcaccacccaaaagcagacagctgtagcactacagcccctttctaggacattcctgaaggacagcagtgaagggaaaactttccagtggggagaacttcgagcagtgcgcctgactgtgcactttgcatggaaggagaaatggccagatgtgcgattatatactgattcatgggctgtagccaatggtttggctggatggtcagggacttggaagaagcatgattggaaaattggtgacaaagaaatttggggaggaggtatatagatggacctctctgagtggtcaaaaactgtgaagatatttgtatcccatgtgagtgctcagcaatgggtgacctcagcagaggaggattttaataa

SEQ ID NO: 476723 - DNA, 917 bp, Homo sapiens
ttcctgcagccttgggggtggattgaggccgagccctagggccatgaatggcagcaggaggcagattgattcttgggcagaaaaggacaggtccccagtaaggccccaccttcaggccagggagggcctaaagactgggggccaggctgccagtcccaccactggagtggggactcatggtgcctcttccgggtgcccatggctgcccatggaccaatcagccggcccttcctcccctctgaggtccataaagccctgggctcagccagagcagggtagaggatggccagaggaggaagaggacagagagagggtgggaggaccagctgcagagaggagtaccctctccactgagagctgcagagatgatctgctggcagagaggagccaccctctctggaagagcttcagagacctgcagagacattcaaatgacttgcctacggagggaagccaccatctccagggccttctctctgctgagagccgaacactcaatgagaagacctgcctacagagaggagctacccactcctctgaactattctaacactaaataaaactcttcttcttcacccttcacttgcctgcatacctcattcttcctggacacaggacaagaactcaggcaaaggcgcctcggccacagaggtttctgaccagaaaagttgacaccccagagatcctatttggggtcagtcaactgtagcctgcagagaaaattcagccactccctgtttcggtaaataaagttttcctagaacacagccatgcccattgtttacatattgtctgtggttgctttcccctacaacagcagagttagcagctgtgacagagcctaggtgtcccataaagctgaaaatatttaccatctggccctttacagaagaaatgtgccattccctgttctaggg

SEQ ID NO: 476724 - DNA, 557 bp, Homo sapiens
gcagctgacatctacttggcttctggaaaggcattatgaaacttacaatcctggcagaagggttaacagactcatcttacatgaccagagtgggagcaagagaggttggggggagtgttcatcagctctttggagatgaccatgccagacctctctccagcagttctccctgtgggtacatgtactgtgacttcttcctcacctctacatatctggcattcaccgccagcttcctgcccttccaggcagccttactggactggatccaagggcactgtctcctgcatggcccatatctgatccatgggaaacacaaatgcatcttgggacccctcggcatgtgtgggctgacagccgaccactgcatgcctttttcaggtgggaggagaaaaagagctaagagaatgacacagaaatggagctggagccttaatacacctcctaactgttaatctgtttgggtggggtttctgtcacttgtggcctacagcagtcttactgtccccccaacctcccacaaagttcttcaggttgaagagagtcactactttgtagaa

SEQ ID NO: 476725 - DNA, 1590 bp, Homo sapiens
ccacagtctgagaaccaatctgaggcagagcacaggtctctcagccatggataccagcacctgctccgatggagggtgtctgcgcttagactctccttgggcagtgcttgctgtggctgctgtggggctgtcccagggagcctgcagcagcagtccacctccttcaaatgatctgtggatcctcttcactttcctggtgttagacttactagcaaaaggtatgtctggtgagggcacaacagaacaaaatgtaacctttgcaggactggaattatttatggatggcttggaggagtcacttgggctagatgtgaaatatgagcaagtatcagacagcagtaaaccagactttgttggatatacaatacatcaaactacacaatttggagatgatggtagtaaacaacatggttatgaagataatagtcatcatgatataagaggaaattatgtttttcttgtttctatggtaaaatttatcaagctaaaagaaggacctaagaagtttaaaagagattctgcatacaataccatagttattgaacaaaagttgtattaactacattattaataatgctctcattaatttggatcatgtgatctttaaattacacttttggaaacagtgacaaggaaattaaccaaaaccaaccagacaaacaaaaaaagaggagcaacaatctgttgtttatatatcaagtatagtttaacatcttctctataaagttttctgaaacagatctaggcctcttttgactcccatatatctctggtaatactgcagttgtggcttttatcacactgtattataattacctttcactttaacatcttcctaactatattgtgccttgaatccaggtttatctttggaaatccagtacctagattaatgcataataaataattggtacaaactaaacagataattgattgccaataactacatattatactagaaagactaacaagaaagaaaaaaatagatacattaatgtatgaagataatgagtgtataaacagccccagagagatgaattggctttctttttactgttctgatggggaaaaatgtcaagaataatttttagaacaccgttgctatgtcattttatataatggcatatgctgttttagtatggtcaaaaagaatttgggatcaaattttaactgtctttagtgaaatgtcagtatcaggacacctatcaacttttcagaattacatgcttgaagcttcatcaatataattatgtgtggaatgaatgagtgaagatctacttttagataaatgacctgctgaatttccacagtgaataataccccaagaaagtatgaaaaaatgctttgcaataaaatgatatcttaagcccaatagaagtagtgcaaattcatttgtaaagtgtaatgtaattctgcaaacaggttaaccatttgcaaaataaacttttggttaaatgaaatatttcatatatccactttgcttaatggtaggcacacctctataaaaaggtgtagaatgacctagaactgacaataagatttaatgtggtttcactagatcagagatagtttagagataaggaagtctgc

SEQ ID NO: 476726 - DNA, 1106 bp, Homo sapiens
atctcccttcgctgactctcttttcggactcagcccaccggcacccaggtgaaataaacagctttattgctcacacaaggcctggggatgggttccaatggccagactccactggagctgcccagtgaacaaaggcccctggctccacactggctgaagccctatctctgcctaccttcatatgcggcagatctccctaacatgcaaatgtccatgggggatatggggtcctctgttgctaggatcccaggggtccatggcacgagtgggcagtcccacagtctcttcactcattcattccccaagagccatttggagccaggaactaacctcagtattagggtatgccacacagggctcccagcttctttagcctgtgtctgtgttgcatctccatccaccctcggtgttttctctctgaagatctattcaggttatgttggtttacttgaaattttggtctctttctgtgggagcagcactgcctggctctgtgctgttggccatcttgttctggtctcccaataagcattattaaatgtcagtttgtggaaatgaatctcttaataactattttgatttattacaaataaaaaataatatcatgtattgtaataataaactactgttcattaagagtagtgtttggtatatttgattttaaattatttttaattacaggataagtaatgtgtacatacagttctgttttatattagattttaaccaattttagaaatgcattatgataatttatgctacttattaacattatttgtcctgatccccaagtatagcatctttttgcatagccctctaataaaagacgttttcttcagattactatataagccattgaaaaactttactcattttcacctctttaactgtatgaattagtattaatttgattttatacaactcaaatatctatggaaaaacaaaggttgcttagattgatatgactgctacagtcaaccaaaatcttctttttcaattttaggtttagcaaaatagcttcattattcaccttggtagaaattataagttaatgtttaaatttataagataaatttattttaataatatactaccttttatagttt

SEQ ID NO: 476727 - DNA, 901 bp, Homo sapiens
tatagagcgtcagctgcaagctttctctgaaatgtttattgcaggcatacgttcagtacatcacaatgtttgctttatgaagacccctgaagtaggtctaacaccggcaccttgaagctcctatcccttggtgagctcggggatatttatcttcccattggacaggatgcaaagtatcgatcctgggtgtgtctgtgagggtgttgccaaaggagattaacatttgagtcagtggactgagaaaggcagacccaccctcaatctgggtgggcacaacctaataagctgccgacatggccagaataaaagcaggcagaagaacttttaaagattatactggtttagtcttctggcctacatctttctcctgtgctggatgcttcctgcccttgaacatcggactccaagttcttcagctttggtgcttggactggcttccttgcacctcagcttgcagaaggcctattgcaggacctcaacttgtgatcgtggttccctctcacattgcatcacttgcttattctaagggaagccctcggttctattgtgagctatcctgtgggaaggcccatagcaaggaattgatgccagcaaccaataaccagcaaggacctgtggccagtctacagccatgggtaggatatctgatctacacaagaagtgcatttgacggaccaaaagcaggggaggagtgttgttccggggcacctgaaaacctgctatttgtgtgttctgaatatgaccccttgagtctattgcccttagtcctaacattcacaggtaagccaagactgagcaattcggtctgttcccagtcattgaaaattatttcattttgtcccaggttcctgcatttggtaggtgaacaagacatcatacctgattctgcctacaaataaga

SEQ ID NO: 476728 - DNA, 928 bp, Homo sapiens
tgagggcatgttcatgatttctttccaaggtagtgatttcatttcatctggatatatatctgaaaaagggattgtgggtcatatagtagttctaattttaatttctttagaaatctccatactgttttccataatggctgtaccaatctacatttttcaccaacaacatacgagagttcccttttttctacacccttgcccacatttgttatctcttgactttttgataatagccatcctaacgagtttgagatggtgtgttatagtcgttctgatttgcattttcctgatttttaatgatgttaagcaacttttcattacacctgagcattgggaaagaagtcgagatacagccaggcaaatacattcctttatctttacttcttgaatcgactacttccagggacagtttctccttgcatggtgttcgaagaagggcccctcctaagtagccaggcctcttggacatgctgcattctcttcactctgtgccttgctctttgtgatgttagatagtgcacaaagcctccttccattgcattgatttatatcttttctttctttccttgcttccctttttctcattcttgctgctcttgctttgcaccttacaagtaaagcgtcattactttaatctttggctctggttccattttctggagaactcaagctaaaatgtgtgggaattataatggctctgtctttacagtggattataggcttttcatagcacttagggtgtttcctgatttatagcccatattaagcaaagtcaaaacttttgaatgtctatgtttgcctttgaataggcaaaaaattatatagggctaaatgtaatgcatgtatcatgtataaatggaatataaaaaatatataattatataatttatttctaggtacttcaatcagtagtaggtttggtcccctt

SEQ ID NO: 476729 - DNA, 864 bp, Homo sapiens
catgcaatgacatccatataaaccttgcaaaatgatggctgtgatgacacccagtgatggtctttctcaactctctgtacctcatctcactcatcagagactttggagcctcagttgccttgcaatgctgtttcaggctgtactcattctttctgcaccacaaatgtcatgccttctcaagtgtttttatgccctggacccattgcatccagtgatgtcagaggaattctcagctcaatatcgtcacatgatggatcagagatacagaactagaattcatgagggatacatatctcaagtgaaaggtgcatatctacggattgtccacaagaaaccaatcagttatgcaaaatcttttccaaaggaaatgggaaattaaggaaaaaatttcccatctcatcattgggatcctatccagggtcattcactggtactgcttctctttcagttggataaagttcaaccccttccctgatgctatatgttatacaaaactcatccccaaatctctctgctgcttgcagatcagcattcttctcagtgttcatcagggtctgattcaaaatgataacctagggtgtgatggagagaaagtgggcatcccccctttctcttccatctttttgtccccaagtcccagtaaccttggcaggtgccacccatgggtgcaaaagtggctttcatccacattaacgggaggtctgggggtggaagtgtccacccttatgcttgtatgccctatctccctggctgtcgacaacatttgagttccctgggccttgtctatgtcaaggagcatggcctgctttcatgaagcaagggtttaatcagcaagaattggtcctgcccatttacattgtgtcc

SEQ ID NO: 476730 - DNA, 1071 bp, Homo sapiens
gctgggccttgcgagacttcaccaggttgtttcgatagctcacactcctgcactgtgcctgtcacccaggaatgtcttttttaattagaagacaggaagaaaacaaaaaccagactgtgtcccacaatcagaaacctccgttgtggcagaggggccttcaccgccaccagggtgtcccgccagacagggagagactccagccttctgaggccatcctgaggagttcctgtttgggggtgtgagggaaaatcagcgcggattttaaaaagatggctgtggcctgcccggcgtggtgggaggggagctggtttcctggtgaactttctaaaaggaaaaataattttaagatgaacttggtggggacaaggagcttgaaagaagggagagaaactgctggggctaaagggatgcattcatccccaggatgtgggcatcaaggtcctgtgggttccaacttaagctccagcacaggccaccagagcagccaaaagctattaccaaggggagccctagcctggcttgggagcagtgaattgtacctcacactggcctgcctttacctctggagtttgttacatctgtcacttctggatactgttcatccacagctggctactacgacacagagatctgtaagtgacagccaggttttcattgctgttttcattttagttttaggaaaccaattaatacaaattcagggaagatttttggcagttactcaactgctagcagtactggggaagtcagcccactcgtggtcgcgaggggcacctggcccttccaagcttccccaattcatctacactcagtctccctgctccaccattcatcaagggttgcaaactcaaatgcccttagggacacggagagcagtgaaaggaagcaggccaggagaggaccgtattgaactgggagaacattccccatccagagttccagctgatttttgcctttgaggaatgtatgacagtgttttcatatttgccagttttttggaagaagctggaaaccagatatgtgacatctcccttctcctaatctcaaaacattgacaattgcaagagggag

SEQ ID NO: 476731 - DNA, 2255 bp, Homo sapiens
gcacaggggctgcaggtggagctgcctgctagtcccgcgccgtgcgctcgcactcctcagcccttgggtggtcgatgggactgggcgccgtggagcagggggtggtgctcgttggggaggctcgggctgcacaggagaccatggagtgggtgggaggctcaggcatggcgggctgcaggtcccgagccctgccccgccgggaggcagctaaggctcgtacaccctccgcagccactggcccaggtgctaagtctctcattgcccagagccggcagggccggccggctgctccgagtgcagggcccgccaagcccacgcccacccggaactccagctggcctgcaagcgccgcacgcagccccggttcccgctcgcgcctctccctccacacctacctgcaagttgagggagtgggctccagccgtggccagcccagaaaggggctcccacagggcagtggtgggctgaagggctcctcaaatgccgccaaagtgggagcccaggcagaggaggtgccgagagaaagcgagggctctgaggactgccagcacgctgtcacctctcaatacgatcataatcaccacacacgcaaagccatgggcccccccatcaaagaagcacgcatacttttttctttaacaatttaggcatcatagagcaccttccaggcaaaagaagctgctctagaaattatagaacataagaagatgactaagaccctgtatcaactgcaagtcacagaaaaaccaacttacaatagggattattttgcctagcaacaaatctaaaagtaggatgtttccagaatttgttaattcagcagctcaggacctagtcttttccatatttccacactgtcatactcaggcgaatgcccctatggacacgagctggctgtcacacagttccagtcatcacgtgcagacttgctagcaaccaccaaaagaaaaaggactatttctcttctccacatgtctttttaaagaaagactgaacaaacttttttctctgaatgctccccccagcaaacttcccttcccagaatgagattacatgcccacccttgagccactcatggaccaggagaatggcaccaccaggcttggcttagaccaatcagaacttaaccgtaaatcatgtaagagagcaggaacaatggaacaaaatggaagaaaggaaaagaatcaacataggctacttcagaccctttctgtatctgaaggggtacaatcagagaaaagagacaaaaagacgctgaccctaagtggcatttctccaagccctttcgtctcttcctcaatcctctgacctgccagtcagtcttactaaccctggctgtagacccttccactaggacctggtttttatctctccacttctccttttgtgatttacactaattagtagcagagttagctctcagcctggtgttctcactgctaaatcaagatttgaacacgtgaaacttcatggtgacagagggccctaataaacaaagacaattagagacaacaggcccctgcaataaggcggcttgaggaacagcttgtgaaaaaggccgagctcagaagatgaaagaactggaaaacagtattgctcaggatcataaaatttttgtttaaaaaaaggatttcatgcattatccctttgtgcactgagtggaaatttgcaataagaaataacgagaaaggacaagtataatttatttataatgcatctttctcttgccaacttccctgggcctctccaataactgccagtctacatacaaaaaaggtcagctttctattttcatctgaggttttgttaaatttagatggcttctttgaaatgtcaattacaaataactcttgtctattcaccaagccaaaacccacccctgtgtaccaggcaacagttggttagcttgcttccactttttgtatttgaaaataataaacctgaagttcttttaaagtagtataatttaattcaagcttttcactaattgagacggtccatcctatagtgtggattgaccacccatttacttcggcctgcttacattccccacacctgggggccccacttaactagaaaacctagccccaactgtgcctggattgtgcctaacttgtgacaaagactctctgtttggccaaactttagtcaggctcctctgagccctcttctcaaataggcctcaatcttgactccattctgtctttgacctgcccaacccaattttggcaagaatcctactggataagtttatc

SEQ ID NO: 476732 - DNA, 3138 bp, Homo sapiens
tgcctgattgccctggccagaacttccaacactatgttgaataggagtggtgagagagggcatcttgtcttatgccagttttcaaagggaatgcttccagtttttgcccattcagtatgatattggctgtgggggatggaccccatgttcctgaggaacacgtgcttttccaagaagcacaagaaggtcctaaagaagatgcacgtgccaaggctatcaaggcccttgtaaagcccaaggaggttaagcccaagatcccaaagggcatcagctgcgagctcaatcgacttgcctacatctatcactacccaccccaaacttcttctgagggtagaggcaactgtgcaccacctgaccccagtggctgcaggctcgtgcaggatggatgggtgaatagcagctccctgctcccttcctggctggggctggggctcccaagggttctgcatggcaggctggccagccttccctgctacgcatccatggagtcttcctcttccctggccaaggggtccagctccatcagacagcaattaagtttctctccctgttgcaggaatccatttgcataagaataaaaggttcctcccaaggcatctttttcttttctccaccctgtcagcagttaacatagccctgcatttaagctttttttgttttgttttgttttgtttttctccaccaggtcaggagttaacttttaagtgaggcttttttattctttttagaggacattttactaggccaggaccccaactaacacagctaatattctctgtaaagttttaattatgaaaaaggatttgtgaggtttgtcttaagctgtagccaatttggtgtgctttgcatatctttctgtatggtcactagcaaactttgctgcaggtctccatcttgttttacatccttggaagtgtgacctgtaaccacaagacaatgctttattttagcatctgccattttacaatggcagcctaggttcaatcctggcttagggagtgagttctttctggtttgacgtctgcattacttttttgccatttgttgattctcttcccctccatgaactgccttggattttcctttctctgagcttttaataaagtttgaaagccagaaatattggctgcttggcatggctaaactgtatttgtttattaggccctaaaaatggcatattttcctagccttgttcttaaagggctccacccagaggccaataatctatttaggagatggcaaatgaaaaatcttatggctactggattttcttttacctctctgtttagtaatacaggtattgtgtatgtgatgtctacaaaaagagctctaatttattgacttaaagaaggataaagacttggatcaaatagtttttaaagggaagataaaagctgtagtaccttttagttcatgtgactttaatctttgagaaataaaaacagccttaaagattattggtaaaatgtagatattgtcaaaatgtaaatttttgcctggggttataggattgttttgaattaggtaagataaaactaaaagtttaaacaagttatggaaggtttctaaaaaattaatcttgcaaaataaattctgtgtgtgaacactgactacattcaaaagggttataaaaggtttttgattttttaaaaatttttgagtcaccattttgacaaaataaataacttatggtaatctggaattctgttttataacatcaagtgttttaaacctctaacatatttaacaggcttcccaaaatcaaacttcagtttcaaaattgtctttcctgatacctagcttttggatgctacagagggcccctggagcattcagaagagaggtaaacaggattagttgacatgtttaggtacatgggatttccaaattgatgttcaatcttcttcaagttatattttaggacataatattaatacatgttccaaaattatgtgggattttaaaaattctaatgtctgagtatatgctatcaatcacaattaaggttgttatgtattgtaaatcacggggataaccaaatttctttgtcaatcatgtttctgactgtaactaccctggacattttgttattcacagacgattttgtcttgttttgatcctcttcaaaagatgattataatcagctatagaattttgacaggtgctctcaaatggaggtttctgataactttggacattatgacattggaataaaggaaaaacatacaggactcatgaagagccgaaatgttcacgaatatcaagcaaaaaaagaattaaccaaattgactaaactaatagagaattaaaataatctttttgacttttgcttggaaaattgctgatccttgttttctcagagtcaaggaaacttattttgaactatttatggcctttaataattcagatgcgattggagaaactggttgttttaccaaagctttgattggatgagtatgcttccctttaaggaatcacgctcaacttgcagagctgataaaagccccttgggaaaactggcctcataccttgtctacacattccctgtacagggttcctaacctgtggtaattgtgtctctgtactacgatatactctccttggatacatcttccaaactggaaaaagttatttgccaaaccttaaactcattggcttaggactgggcttgggggatgagaacccagaagcctgacatgctggcaaaagggcttgtgtttcttccactgaaatctctcttcaaggccatctcagacatttcctctgccatccacaagtccagatgtagcatcctaaatctcggtttccccaagaggctcatatttggctccctgcttagaggatctctgccaggcaccatcctgcaaggttcaccattttcagcattgccctcatcaatcagttacctgcttagaaaccttccaaggctctccatatcatctggagaatgaaaaaccaagttaatccagtcattcttaaaatcagaaacactgtgtatatacctttccccttaaagcagatatttgagaatgcaaacccagagatttaaagtgtgtgctgataaatttgacacacaaaggacagacgaaaatttccttgctgcttgttgtggttgaggctttctaggcttaatataac

SEQ ID NO: 476733 - DNA, 2000 bp, Homo sapiens
tattctcattctcttaaaatttctagtttttcttccaagcaaaaatggtgtgcatagcaaaagttactggttcagcctgcaactcagcaatcacactaatacttttccttgagataaccctggtaatttggtatgtagcaaacgtgatgtatgtggactcctcacctcatcacacagaacattaaaaaaagcatgtacttacttcaagacaatgattctgcagcttcagaccctgatgctgaaaccactgccaggaccaatgggaaaggaaatccaggtgagcagtcgccgagccctgagcagttcataaacaacgcaggagcaggggactccagccgctcaactcttcagagtgtcatcagtggtgttggggaactggatctagacaaagggccagtgaagaaagcagagccccataccaaagacaaaccttatcctgactgccccttcctgctgctagatgtgcgtgatagagattcttaccagcagtgccacattgttggagatcatggtaacatcagtttgcaaaagaaacgaataccagcttgtgtggtttccatgatgggaaaccatccagtccctgctggtgtgacggtaggaatgggcttgtccatcaaaaatgcccatggcaagatcatcattctgtatgacgatgatgaaaggctggccagtcaggcggccaccaccatgtgcgagcgtggatttgaaaacctcttcatgctttccggagggctctgtcacaaagccctaatgctgaagactcgagcaaaaggatttcttgtggaattctcagaatcccatgtaacaacagatattttctggtataatttgcttaatgatgaaatagttaagaaagatttcatgtccttgtgttggcctcaacttgatgaccagagattagaagacatgcaggcttctttccaggttttggcctggccttgccatattaatgcagctttttctgatgattttccaaacctaggtctaaaagtcttagctcagaaattcccggaaggactgattactggttccctgccagcatcttgccagcaggcccttcctcctgggtctgcccggaaacgatccagccccaaagggccacccctaccagctgagaataaatggagatttaccccagaagacttaaaaaagatagaatattatctggaagaggagcaagggcctgcagatcatcctagccgactgaaccaagctaactcctccggaagagagtccaaggtgcctggtgcccgaagcgctcagaatctgccaggtggcggccccgccagccactcaaacccccgctccctcagcagtggtcacctgcaaggcaaaccctggaagtaaagactttgtctcacttaggcaaataaatgttcttcctcttttcagaacccctgagcatttcccaagttgggtcatttccagaaacttctgcagaggaaagaccatgacatatgtatgggataggcctcttccctgtccctgtctccagttcctctcccctcaggaggccacctcaggaaggattttgacaggtgaccataaaaaccagaggtgtgacaggctctagtctcctccctgttgtttacagcatatttaagtcttgtgaaactgtataggaaaaaagtatctacgtttttagtttttttgttttgtttttttttaataaggtccagcttgttgggtctctctgtgttgttttgtaaatacttcagtcacatctgcccgtgtgcctgtccctgccaccttttcattcactgttcttgacttcatgaaggcttctccgggcagtcttggtgtgagaagctgtttccaagggtgcagatgagccttaggttccagccgcctgcagaccccaccccagcaggctcactcagcaaggagctctctgcccagcatattgcaggccctgttttgagtatggaagccagtgcctgtgtactcactgaaattgaagatgaggaaagtagctgtacactcactgaatgctccccctt

SEQ ID NO: 476734 - DNA, 1885 bp, Homo sapiens
tccttctaaaccagaaccagcattctaagtttatgtagtgttctaagtgtgcttttcttctgaaatgatcatctgcagtatattaccaacacaaaaggaaggaggcctgagattcagcgttcagttgaggacactgacagcttcttaaaacaacagatctttgatgtttgttgttccctcgtcttttatcatccaagttgcttccctctctgatcaaacactggaagtgacagctgaggagattcaaaggctggaagggactgaaaagtaccttcaggaaagatgcaggatgttgtgggagagttccaaggaaggaaagacacttccagttagaagaccaagatcccctgaaagggccttggggatgtttggggtccactacactttgggaacttacaatgattctgcagcttcagaccctgatgctgaaaccactgccaggaccaatgggaaaggaaatccaggtgagcagtcgccgagccctgagcagttcataaacaacgcaggagcaggggactccagccgctcaactcttcagagtgtcatcagtggtgttggggaactggatctagacaaagggccagtgaagaaagcagagccccataccaaagacaaaccttatcctgactgccccttcctgctgctagatgtgcgtgatagagattcttaccagcagtgccacattgttggagatcatggtaacatcagtttgcaaaagaaacgaataccagcttgtgtggtttccatgatgggaaaccatccagtccctgctggtgtgacggtaggaatgggcttgtccatcaaaaatgcccatggcaagatcatcattctgtatgacgatgatgaaaggctggccagtcaggcggccaccaccatgtgcgagcgtggatttgaaaacctcttcatgctttccggagggctctgtcacaaagccctaatgctgaagactcgagcaaaaggatttcttgtggaattctcagaatcccatgtaacaacagatattttctggtataatttgcttaatgatgaaatagttaagaaagatttcatgtccttgtgttggcctcaacttgatgaccagagattagaagacatgcaggcttctttccaggttttggcctggccttgccatattaatgcagctttttctgatgattttccaaacctaggtctaaaagtcttagctcagaaattcccggaaggactgattactggttccctgccagcatcttgccagcaggcccttcctcctgggtctgcccggaaacgatccagccccaaagggccacccctaccagctgagaataaatggagatttaccccagaagacttaaaaaagatagaatattatctggaagaggagcaagggcctgcagatcatcctagccgactgaaccaagctaactcctccggaagagagtccaaggtgcctggtgcccgaagcgctcagaatctgccaggtggcggccccgccagccactcaaacccccgctccctcagcagtggtcacctgcaaggcaaaccctggaaggtgcagatgagccttaggttccagccgcctgcagaccccaccccagcaggctcactcagcaaggagctctctgcccagcatattgcaggccctgttttgagtatggaagccagtgcctgtgtactcactgaaattgaagatgaggaaagtagctgtacactcactgaatgctcccccttactagatatttcctggagccagaaaggtatgcatgtgggtgtcttcacaccggggaggagggcctctcatgggaaagccctggccaccacaccggcctgtgccccttgaagcccaccaaagcggccctcacttgtgatggacaacaaatttcatgtctccatttcacaagcattt

SEQ ID NO: 476735 - DNA, 682 bp, Homo sapiens
aaagttcatccatgttatgaagatgctctgtgatagtcttccaggtgtctgcatcttggctgaaactgctttggaggttcggggaaaaagactcatcaacttcaaggatttagagttgctgattgggaagatggagcatttgcaaattaccaaatcctcaggtgatgccgatgctgcaggtcagaggccagcactgctgactgggaaccctgtgttggtccatagtcagcaattgtccagggaaccactattcagtgtggggctgataccaccctgttgctactcagctccaagcatggttcctgtgacccaggcctggtcattagagtcccagtgttcagggaaggttgatggatacttgtgtgaactcagtggatttgccttaaagtgcttgaacaactatgacaagcagagtgttgtacgatggagatagtggaaatgggggtgggaattgaacaatgagatcacatggacacaggaaggggaatatcacactctggggactgtggtggggtcgggggaggggggagggatagcatcgggagatatacctaatgctagatgacacattagtgggtgcagcgcaccagcatggcacatgtatacatatgtaactaacctgcacaatgtgcacatgtaccctaaaacttagagtataataaaaaaaaaaaaaaaaaaagaa

SEQ ID NO: 476736 - DNA, 1116 bp, Homo sapiens
ggcaattggagagggcagggtgcacaggatgacccccttcccctgtgggtcagaagacagaacccagaaaatgtggccaggccagcccctcaccctcaggcccacatgggattcttgtgcccttcagaataaggacctgcagacgagggtgaggcagctggagtcctgtgagtgccaccctgcatctccccagtgctgggggctggggcgtgcctggcccgagggggcacgctgggagcctgacgcctgcacagcctgcgtctgccaggatggggccgctcactgtggcccccaagcacacctgccccattgcaggggctgcagccaaaatggccagacctacggcaacggggagaccttctccccagatgcctgcaccacctgccgctgtctgggggcctttacagacaatgggtcctttgagctgggtcttcatgggaaagtggggttccacctgaaggagagggagtacgtgaggttcctctgggcacaaggacagggtggagagaggctgccccagggccacggggttggggaaacatggcatccagggccctgtgtcatctgcacctgccagacaggagccgtgcagtgccaggggccctcgtgttcagagctcaactgcttggagagctgcaccccacctggggagtgctgccccatctgccggcccggtgacctcctgccctgtcctgccctgccccgccatcccttcaaccccaagggctgtgattatgaggggcagctttatgaggagggggtcaccttcctgtccagctccaacccttgtctacagtgcacctgcctgaggagccgagttcgctgcatggccctgaagtgcccgcctagcccctgcccagagccagtgctgaggcctgggcactgctgcccaacctgccaaggctgcacagaaggtggctctcactgggaacatggccaagagtggacaacacctggggacccctgccgaatctgccggtgcctgggtacagaggtgcttaatcagaaagcatcggcatggcgagggccattcataactctgagttccaacaaaagttgatatctggaagattaataaaagtttaatttaagaaaacgttgagtaagcttatcctt

SEQ ID NO: 476737 - DNA, 925 bp, Homo sapiens
gtgacctttaattagataatatgtcttagatattacactaaaagcacagtcaataggaaataaatttgataaattggacttcatcaaaattaaaaacttcttttcctgaaaagatgccatgagaagaatgaaaagaccagccactgactgggagaaaatatttgcaaagcccatatctgataaaggatgtgtatccagaatatataaagaactttggaaatcaaataagagcaaagaattcaactttttttcaaaaagtgatttcacctgcaatgggttgatagccgtgattaagaatcagagtgacaaccagagaggaatgagtcctggaagttggagtcctggaagaacgctggaggacattgatgagggctttgagtttgttcagggaaagagcctctggggtctaaatgcagtggtgtggaaccagagcagtgcagtcagcatggctttgcctgaacttttactataatctgtgtaccaaagaagtctgatgttatcgtattctttcgggcaaggatgagggccttctactaactctccaaggccagtgggcataatgacagatgttatggactgagttgtgtccccccaaaattcatatgttgacaccctagcccccaatgtgactgtatccagacatagtgtctttaggagagaatccatatttagcttgcttgcagaaggaaggagtcagggctctttttgttgggggtgggtttggtctcatgaaactttgcattagagtccagttttcctagggttaccattgtgcctaatgacaaaagttatggggttttgatattttaaatattttatatatttctaatattttatttcaaatgtattttctaacaatattcgacatctctggtgcatttatttggtgcttaaagatgcgcgtctcaatcactcctttgtcttt

SEQ ID NO: 476738 - DNA, 990 bp, Homo sapiens
gctgcattacaagtcaaggaagactggggatagaaagaagtataggcaatggcatttcaggcagcaatctatgcacacctggagactggagaaagaaggatgttttcaaggacctcaagatttctctgggccagcaggcccgacctccgagaccatctttggacatcagtagactgggagctgtacgtggacgggagcagcttcatcaacccacaaggagagaggtgtgcgggatatgcggtggtaatcctggatgctgtcattgaagccaaatcattgccccagggcacttcagcccagaaggccgaactcattgctttaatttgggccttagagctgagtgaaggtccaaccgtcctgtctggcatacaagcttatggagaagccccctttgaagatctcaatatagacttcaccaagatgcccaaatgtggcagtaacaagtatttgctagttccagtgtgtacatactctgggtgggtggaggcctatccaacacgaaccaagaaagctcgtgttcttctccgagatctcatcgctaggtttggactgcccttatggatcggctcagaaaatgggccggcgtttgtggctgacttggtacagaagacagcaaaggtgatgagtgtggatcaaagactggaacgtagcccccttgcagccacggtggaaaggaccccagactgtcatcttgaccactcccacagctgtgaaggtagagggaatcccagcctgggtccaccacagctgcgtaaaacctgcagcaccggagacctggtaggtgagaccaagcctagacaacccctgcaaagtgactctgaagaagtcgacaagccctgctccagtcacacccggaagccgactggtccactcatggccgaagcatgaggaaactcactgcaggactcattttccttaaattttggacttgtacagtaaggacttcaactgaccttcctcagactgaggactgttcccagtgtatacatt

SEQ ID NO: 476739 - DNA, 673 bp, Homo sapiens
ctgttctcccgcaggctgcactatgcatgttacatgccgtgagcacaagcagacgctgcgtaaacaggctggctctgcagggcatgaagaaggctgctctgagctagggccacacggcacctgctgggacacagggaggggtggggagtcctggaagatgagtgaccctcagggagaggaggagactcctgttggagagcacacagatttcctggggtctatgccgggctggaaggctggccatcttaaggctgcatttgttcccgaacctaaggaccatgggagccacgcagccagagggggtgtgatcagatgtgtgttctggttggatggctcttgtggctgtgtgcagaatgaaaggaggagttggacttggccattaagtccacgatggcagaggaagcaggtgccatgggagaaggaccttggatacatgcccaggaaggagatgtgggctgaacggtttagtgtagtgatcaacagcagcataatcgcggtgcccaagtactgctaagtgctaagcatggagacctgcgactctaatagctccacccatctttgcagatcttagatggcccatggcgggaccactggggtggtggccaggggcagctgagcccgttgtatccttgtgctcccgtggttggcggttctcttgagaatgtggggttcc

SEQ ID NO: 476740 - DNA, 639 bp, Homo sapiens
agtgggagattggaggagagcattatggttgttacagcaggaatgcaaagaacacacttcgggtatgatggtgggaagttgccgtctaccgagggagaaagtaaagtgctcttccagttgaaagagccaaggacagggggcaggtttgaggggttgagactaactgatgcttggatccctgggaaggaacccctcagtcccttcagtctttgggccttggcccagaatgggaagatgggcatgacatcaggaaccccagataagttgaaggagaatctggaacttctggcctgtccttcacttgtactccatgttcagtgtgacactggggcaactccagactccagcagtgagtgtcagaaaggcatcaaaaacagcagacaggacctgttgcaattcactgggcacaagcacaatattcccagagacccctaaaatagccacacagcatagaaaatgacttaatcaaaccatcatcctttcttcagttttcacccttgtactgcttctattttgatttcaagatttaaatatatatatttgaaacaaatatggctcccattttatttcctgaatagaccctgattcctagggagagaaggattcaggcaaaagcctttttaatacttttcctgcctt

SEQ ID NO: 476741 - DNA, 528 bp, Homo sapiens
gtaaaatggaccaatcagcaggatgtgggtgggaccagataagggaataaaagcaggctgcccaagccagcagtggcaatctgctccagtccccttccacgctggaagctttgttctttcactctttgcaataaatcttgctgctgctcactctttggattcattcctgaagccagcaagaccacgaacccaccagaaggaagaaactctgaacacgtccgaacatcagaaggaacaaactctggatacaccatctttaagaactgtaacactcaccacgagggtccatgacttcattcttgaagtcatgacaaagcaaaaagggaaaaatgatcagttacaaactggacatgatcagagggtaaatttcagggaaaataaatttctcctggtactcaaatctaagaaatatttctctagtggatcattctatacatgatacactggggtcttcaataatgtccctgaaagatatgctgattcttattgcatatagcatatatagtaaaaacataatgctctctgata

SEQ ID NO: 476742 - DNA, 585 bp, Homo sapiens
aaaatgtctttaattctgtttatttaatgaccaaacctaccattaatgtctcggtcagtttctggaaaaagtccatccctcaagctcactattaccacaaatcagtccaaactggaacttaacttgttcacacataggactttccagagttccaagatacctggaccaagcccatgcagacatgctgattatgggaaagcacagcaagtgcataaccagaatttccaggcatgggagaacatcctagggccaaatcccgagaggatggggacagcagcgttccaatggcacatgaaaggatgctcacaaggccagcaggtcacacgggcacctagtaagggaggggaattgggcctgtgcaacagctcctccgttcatgaacagcatctcaatctgcatacgttactgagagggctcttcagtgtcatttatgtttatggggatggctcattatacagatcaaacttttattttctgtaactgagaatctaagaatctcaaaagatccttccgctgtcgatggccatgaccctcagagttacctgtgggatatggactcattatccagatttaataaataataac

SEQ ID NO: 476743 - DNA, 734 bp, Homo sapiens
aagctcctgggagcaggggctctttcctcaacctttcagctgctgcctgggatctgaagaacttgccccaggaaagccgagtgggtggggttcccccctggtggggtgggggtgatttgtgcaacacacgaaggagcctgcccttgcctcctgatccattttggttcccagtcagttttgttctgcagtcaccagcatggactgcgggagcactgtgaggagtgaggcacccggagatgaggcttccacctggcagatactggacacagagcggacaaaagaggatgtgccagagaggcctgggggacctgctgtggggtttggggtcctggatgaacctgctgactgggataccctgctgtgggccctgcaggcagctcagggtgagcacttccaggagacagagcctcactcccccaaagcccccttatcaccatcacagggagagcaccagagccgtgagagcagagagcagtccatcatccccccacctccacccccacctctcctgctctgggccctgtttatggtgctgatgagcagggcgggggagcttcctggctgggctgacatgatgataaagggcaaagccctgcacgccttgccagcccctggctgggggctgtggctggagccgcctcgtacccgagaccctgatgtttagagaaacttcaggcggacttgtgggctcccacgttcctggtacaacttgggaattatgttgaatcgtgttg

SEQ ID NO: 476744 - DNA, 678 bp, Homo sapiens
ggaaaattcactgaggtaccaggtatgctacagcactagcaagccgtcgtgccactgccctgctctggctgggttgtcttttcctggaaatgggcagtggtaagaggagggtggagacagagcctccggccatctcccctgctcctcgcccctgctgggactcccactgcgcagtgtttccctcttacctctggacaatcccacagactccttcctccaggcaaggcatccccaaggaagtgcaaataaaaatgctgttggtggtggaggcaacatattcagtgaaaatccaccaaggttactggctgaggctggagcaggatgggggtgaggggaatactgctcgaggaaggcaggagggaccagggaagaggtccttggacagcaccagccggagggtcctcgcatggggccttggaggcggcagggaaaggaagcttctctctgattttagaatgggcattatggatgctgagagtcccgtcctccacctgcagctctgagaataccacctaccatccagcaagctttctccaaaccctcatatctggactgagctcctcattctttggtgtcaagctgttcaggtgagcagctctagcctatttctccccctgttctcctgtccacagggacagagcatgctacagccgcaggtctccaaggctccatttggaa

SEQ ID NO: 476745 - DNA, 709 bp, Homo sapiens
aggttattgccaagcatgacaaatgcttttgtttgggatcatgagtggaaaaacaaaggcaagaagggctgccatgttttttagacgttgctctgaagacgccagcggtagcgccagtggcaatgctttgttatcagaggacgaaaatcctgatgcgaatggggtaactcgatcatggaagattattctaagtacaatgcttacactgacttttcttcttgtagaaagagactgcctctttattcatgggctgttgggtctgtctgccacttccatcatctactgtcctttgtcccagttgggcttcggcagtatgtctttgaagtctttcaatagatattgccacttcctagaaagctataggcgtggaataaacacaggactcctaaatcatcagtggcttaaagaaacagatgttcctcagaaatccagacaattatatgccataattgcagaatatggttcaaggctttataaatatcaggtgatattttgttaagtaattttgtatatcactcatttaaagtttaatatgctacaaggctagttcaactttcaatatgttatctttgttttatatgagaatatctaataaaattaatgtaggaaatggaattctattaagtggtttctgtggtttgaatgtgaccaccaaacctcatgctgaaatttaattgccattgtaacagtgttcagaggtaagaccttt

SEQ ID NO: 476746 - DNA, 1589 bp, Homo sapiens
aaaataataaattagacagctagtgatggtggtagtgaggatgatgatggtgaccattgtgatcattgtggtgatgatggtggtaataatggtggcagtggaggtgacagtgatggtggtggtggtagtggtgatggtgattgcaatggtggtcatggcaatggtatcacctaaaaaggtggtggtagaggtaatggtgatggtagtaatggtagtggtggttgtagtgatggtgataattgaagtggtagtggtgatggtgattgcaatagtggtcatggcaatggtatcacctaaaaaggtggtggtagaggtaatggtgatggtagtaatggtagtggtggtgatagtgatggtgataattgaagtggtagtggtgatggtggtgatgaaggtagtggtggtggtggcagtgatggtggtggtggtggtgacagtgatagtggtggtggtgatgatgatggacatgggggtggtgatgaagaaagatggtgaggtggtggtggtggtggcagtgatggtggctgtggtggcagtgatggtggtggcggtgatggtgatggacatggaggttgtgatgaagaaagatggtgctggtggtggtgatgaagatgagggttttgatggagatgggggtggtggtggtggttatggtggtagagaagaaaaatgaggtctactactttgtagatataaactacagcctggaataagatcagtgggttttacccctgaaagttctaaatttgcaactaacttcaggtgtatggatcaaagttgagaggtgctctgctgtctattgatggctactgcctttagactgtaactgaaaagtttggtggggatcttacttggagatttctcctgttataattagacttaagaacatgtggtctgaatagcacttaacatagtacagtactggcacttaggagacaagtactttcaacaaatgtttgttgaatgactgaagttttcaatggaaaaggatggtcacagaatcaacttacagaaaagacatggaatgtatatgttttacttgaaaataaaataatctagtttactaatcttaaaatgataaataagtaaataattaatcatagtttactgaccataaaataagacataattcatgcagtgtactgactataaaaatataatgagatgatttcagattctgtgacaagttcagacactcttatattgcctccatttttaaaattaacattttcatgataaataataagaacaaaattctaaaatagaaataagtgattcttaatttagctttacctgaagaataatatctggaggcatttcatgatttaggaaacctatcccatgccagtacaattttgctttattatttttataactttctgaggtcccagcttcaatgatggaggctcctaaaattataaattatcataaatgacatggaaagcacacctcagtgtgtattttgtcaaggaatgctccatagaagtagaaatatgtaaaaggacaagtaattttctaaagtactacaaatgttactgtttggtgtttaaaattttaaattatgtatatgcacaagtgagaggaggcaa

SEQ ID NO: 476747 - DNA, 1373 bp, Homo sapiens
gacgttttccagtttgcttggctgcatccacgtctcaccttaagcagcacacccctccgtcctcgggagggaagcagtgagtttggttctgtgttgtgctccctgttgtaccagtgcagtgctcggcaaaccccaggtggaggagtatggcccaagaatgtagatgaactgggaacccctcccttgtctggatgcagctgctctgaggaaacaatgctggccgcactgcccggaaaaaggcgaggctgcccagcccagcgctggccccgaggcactgctggcttcaaaaacatcacaaactttaaatgtaggccctgttctcaggatgtccagccccacaaggaaggaacaggcagcagcaaggtcagagcatccagaggatgtaggaagaagctggtctgctgactgtcatacttgtgaccagcttgcacaggacatggccgaggaggcagcccagaacatttctgatgaccaggaaaggtgtctccaggctgcctgctgcctttcctttggtggtgagctgtctgtgagcactgacaagagctggggtcttcatctgtgcagctgtagccctcctggaggtggattgtgggaggtctggggtgaggctgagatctgggggccacacttcgagaacaaccaagactgtggggagtgggggctgcccctcaagcggggagtgggggctatccccggggtggggagtgggtgctgtcccccaggtggggagtgggagctgccccgagatggctccagcacagacaaggcttccagcagccaaagcactgaaaccctgcttaacttgcgcagtgtggggagctcgttgaagacccctattaattaagactgggctacctggatgtttgtgaattcccttgcatctgtttatcagagtagctaacagggcttgggtctgaaggcctgggcaatgccctggagatggaggagaagcgtgagaggagtgactctcacatctgtgggtggggtccgagagaagagtgaaaacttctgagtgagacatgcttttcacccagaataagcattggttccaaagggacatgcacagacagcccagagttgtgcgtttctagttcaaatttaaagaagccagttctctttgaagctcccagaacctctgctgtccttggcaaagactctcctgcagttcatttttcagtattcctcatgcagagcagcgttattaaaccaccccctccgtagcacatccatctgagtttatattgaaatgaatttgatctcaacccacagtgtttgtgtttgggagcttttctctgctctgccatcacttttgtcagcgaaagttcaaggaggcatttttaggttcccaaggaaggatatttagtaagatgagc

SEQ ID NO: 476748 - DNA, 1039 bp, Homo sapiens
gcaagggcctggagcagtggtggccccaggttccatcacaggcggctgtgtgctactgggaccgcagacagcacattctctgctcttctccagcagctccctgcagcctgaagatggaggcttcctgctgtgtcctgagactgctgtgctgtgcggaggatgtggccacggggctgcttcctgggactgtcacgatggagacccccaccaaggtggccagacccactcagaccagctcccagcgagtgcccctctcccacggccttccgcctggcattcctcgcacccccagcttcacggcatcgcagtctggttctgagatcctctatccccctactcagcatcctcctgtggccatcctagctcgaaattctgataacttcatgaaccctgttcttaattgctccctggaagtggaagctcgggcacctccaaatctgggattccgtgttcatatggcttctggagaggctctctgtctgatgatggatttcggggacagttctggggttgaaatgaggctacacaacatgtctgaggcaatggcggtgactgcctaccaccagtactcaaaagcgttggacccattctactcagacaactactaaacccctagagatgatgattgggggtggagggacaatttcaaagtgtcaaatatattttggggtaaaatactttgatttctttcagggcctgctatctgtcatgttggtatcttattgctacaaaaagtctgttttgtcattcttaaggcctctgtttaaatgttaatgctggtcagttgtgcctcaattccaatgggaggagggtatcgtggggcatgtctgaccctcccttcccattatggcctgaactcatttttcaggttaactttggaatgcccttggccaaaaggaggggtccattcagtaggttggagagcttagaattttatttttcatttacaaatgtttaatatataaattaatttatgtagagtctttatatttacgagtctcccactgcatgaactgccctgttcctgtccattttttcc

SEQ ID NO: 476749 - DNA, 1424 bp, Homo sapiens
ggcactttgggaggccaaggcaggcggctcggaggtggagaaggagtctatatgctcaaggctgttatttataacgagtttcatggaaccgaagtggagcttgggccttattatgtggagattggccatgaggccgtgtctgcgttcatgaactccagcagtgtccatgaagatgaagtgcttgtctttgctgactcccaagtgaatcagaaaaccgtctctgtctacacaaatggaactgtgtttgccacagacacagacattacatttacagctgttaccaaggaaacaatacccctggaatttgagtggtattttggagaggatccaccagtgaggacaacttcaagaagcattaaaaaaagactcagcatcccccaatggtatcgtgtgatggttaaggcttccaacaggatgagcagtgtggtctctgagccccatgtcatcagggtgcagaagaaaattgtggccaatcggctcacgtccccctcctcagctctggtaaatgccagtgtggcctttgagtgctggatcaacttcggcacagatgttgcctacctgtgggactttggggatggcaccgtcagcctggggagcagctccagcagccatgtctacagtagggaaggagaatttacagtggaggtccttgccttcaataatgtcagtgcctccactctaagacagcaacttttcatcgtgtgcgagccctgccagccacccctggtgaagaacatggggcctgggaaagtccaggttcagattgaaggcagtgtggtgtacagcaactactgtgtgggcctggaggtgcgagcccaggcccctgtcagtgtgatctccgagggcacacacctattcttctccaggaccacctcatcccccattgtcctcagagggacccagtccttcgaccctgacgaccctggggcgactctcagccactccgatgacttctccaacaggtatcactgggaatgcgccaccgctggctccccagcacatccctgcttcgactcctccactgcacaccaactggatgccgcggctcccactgtttcctttgaggcacaatggctcagtgacagctatgatcagttccttgtgatgctgagggtctccagtggtggccggaactcttctgagacccgggtgttcctgtccccctaccctgactcggcgttcaggtacctgaccctgtattcagcacagctcagctcaccggtgtttgttcccacctggtgctagcatccgtgaaaggaatctgctgtgcacagcaagcagtttggagtttggccatgcaggattctcactgcaaaggaggaggagaagactgttcagaaagcggctggggaagcagtccccgctctcgggctgatgtctgggcagcatctgacagccaagcacactagctaaagctggcacag

SEQ ID NO: 476750 - DNA, 981 bp, Homo sapiens
ccttctgaccttaattagggggcttcacatgtcactctgcatgtcagtcacctttgacatgtcccatccaccctctgtgggccatcagtgccttgagggctggttcatcagccacgtgatggtgaaggagctgcacacgggacagggctggttcttccctgcccagtgctggctgtctgccggcaggcatgatggtcgcgtggagcgggagctcacctgtctgcaagggggactcggcttccggaagcttttctattgcaagttcacagagtacctggaggatttccatgtctggctgtcggtgtacagcaggccctcctccagccgctacctgcacacgccgcgcctcaccgtgtccttctccctgctgtgcgtctacgcgtgtctcactgccctggttgctgctggagggcaagagcaggtgagagccatcgcttttccttatagcagcttccagatccgactacactgtggcccctttttgcctaagaaatcaacaaagctcacagttctccgagaaaagtttaaaccaggggaagcaagcctggctgcctggggaccagagaaggaacaggagggctctgcccggtgtggcactgggtggccctgcacagctctgactctgctggctcggtggacagctgctgtgtgggagctcgtgcccaggcccagcagcagaacttttccagagaggctggcagccggttgtctttgagaacactcttgaatttttttttaagttggcaattcatttagattttaaataaatcctctggacaaaagaacgtagaaccattctgatggccacattttccctcaagatgccagtttgcactggcaactctggtctgattgttcctcatgagatgtagtaaattacttccaaatcagtgtcagcagttaaaatggagaccctctctttcctgaggaaaaaacaacacagcaggacgtggactgaggcaaaactgacttgtttactac

SEQ ID NO: 476751 - DNA, 682 bp, Homo sapiens
tttggtgttgtcactattttttattttagtctttctaagtttcatgttttgcataaaacattgttcatgatccattttgaattatttttgtatatggtatgaggtataggaccacatggtgttgattgctgtggctgcatagtatagtataaccaccttctgtgcaaggcatccagttcctcccctctccactctgacccaccatccaataaaccagctgtctatgagagttataaataatgtcacctgcagattttgaaaaaagatgctcaacttctgcagggtgcagggtgttgtaggtccttcaaagaagatgtatggaaatgcctggatacccaggcaaaagttttctgcaggggcggggcccttatggagaactgctagggcagtgtggaagggacctagtggagctgtgagaagagggccaccatcctccagactccagaatggtggatcctctgacaacttgcactgtgcacctggaaaagccacagacactcaatgccagcccatgaaagcagccaggaaggaggctgtaccctgcaaagctacaggggcagagctgcccaagaccatgggaacccacctctggcatcagcatcacctacatgtgagccctggaatcaaaggagatcattttggagctttaaaatttgattgacctgttggattttggactggt

SEQ ID NO: 476752 - DNA, 1493 bp, Homo sapiens
gcaagatgggcacagaagaccaaatgccattggctgtcttaggctaacatgggaattgactgtatggggaccacaaaactcaaagtcccttccacaaagcagtactccctacaggcagatccaagtgattccaccttcttccgcctgctttgttccggctgcgctggcagccgattggatggtgcccaccacattgaaggtggatcctcctctcccagtccacccactcaaatgtcagtctcctctggcagcacactcacagacacacccagagtccaccagccccagcaagtcacctggacagttccaactcaatggggtggggaagtgtgctccacccatgctgtgaggagcatcagagccacaggggaaagggtgtgggtgtgtaatctacgacagcgaaggtggaatgggacccgccgtcccgctggccacaggtgcatccccaggagtgtttctgccaggtcacagggtatgtgcaggtctacctgaccaagcagtgtcaaagcatacttcagaatggccactccagccatgcttccacctgtgctgcccacaagcctctcagccctcggcagctccaaatcactaacttttgccaatcaaaagtgtgtaaagtgatatcacaatgtttcagctcgtgtttctctgataattagttgtgtgcatgtttctttatttgccagatgtccttctgggagcttgtttggaggttgtagcaggggattgcagctattcatatacccttgaccgaagactggccctcctctgttggggatggtcgtcctcttcaacggagtgtgcagctttgggagggatgtacgtggagtgtttgccgatgatgtctttttttgaacagaaaccattattttttatgtaatcatatgcacgtatgtgcgtttatgtgtgtgcgtgtgccttacagtatttttgcttggaagttttgtttaagaaatccttccctcccttcaagatcatgaagatattctcctgaacttccctctgtgaactccgcattgctacctttcatgtgtagactttcccttcatctaagccccccttcacatattgggtgagatagttttaccactttcagtaaaaatactaatttttatttttttctatgtctcctttctctcttggtctcacatacaaacctcccccttttctctcttctaatttgtgtaattgtgaaaaatggagtattttgagcaagtaaatacatgagtaagagctttttacttttattttactaaatttgattgaagtataacacacacacacacagggaaaaatatgcaaatgacaagttcagctcaagtaatgtcacatggcgaataaaccaccacatgcccagctccagctcaagacacaagaagctctggcagctcagaagacgcattgcaacctttaggtaattgtcccttcccaagccagcctttgatggttaatactgagtgtcaacttgattgcattgaaggatgcaaagtatt

SEQ ID NO: 476753 - DNA, 2224 bp, Homo sapiens
aaggttaaatgaggtcataaggggcatgatggaagcccgcttttgtttcacgaacctcatgctgaccacagctagaggaagctgctatcgtaaaataccatggactgagtggtttagaagaggcagaagttcatttctcacagtcctggaggctgtgaagcccaagatcgtggtgccagcagatttagcatctgaacatgcccagcacgtccctgctgcagcctttgccggcttgaccaagttccttgttcttacaggccgtgtgactcccccaggtcagctgcatccttccctcttccaaatccctgtggtgcacatcatgcagagacttctaaagaactcaccattggtaggtgtagattggacatttttgccattctcttttgcggtggtggcagctgtgacagatgcaggatctgcatgtcactcaggaggggcccagggctggtgggaagaatggagcgggcagggctggtgacagtgttgtaggtgggggcagaagcacaggccctccaagcacaggtggtgtgagaaacactagcatccaggaggtgggggcagcccacccatcaccatcctgctgcagtaaggatatgggccagactccatgaccagcaagatcatggagaagtcattggaagggtttggtacaggtcctctctgtggtggggaggactcacccaaggaccagtgagataatggagaagtcactggaagggtttggtacaggtcctctctgtggtggggaggactcacccaaggaccagtaagataatggagaagtcattggaagggtttggtataagtcctctctgtggtggggaggactcaccacccaaggaccagtgagataatggagaagtcattggaagggtttggtacaggttctctctgtggtggggaggactcgccacccaaggaccagtgagataatggagaagtcattggaagggtttggtacaggttctctctgtggtggggaggactcacccaatgaccagtgagataatggagaaatcactggaagggtttggtacaggtcctctctgtggtggggaggactcacccaaggaccagtgagataatggagaaatcactggaagggtttggtacaggtcctctctgtggtggggaggactcacccaaggaccagtgagataatggagaagtcgttggaagggtttggtacaggtcctctctgtggtggggaggactcaccacccaaggaccagtgagataatggagaagtcattggaagggtttggtacaggtcctctcagtggtggggaggactcacccaaggaccagtgagatctttgtaaacgtttggtacaggtcccttctgtgatggtgaggactcacccaatgaccagtgagataatggagaagtcattggaagggtttggtacagcttcctttataaaattgtagcttagagatgagcaaaatttagtttgatgagagcttatcaaacataagaccataccagtaatttctaaaaataataatgagttagaaattattgaatgatctgatgaacatttttccttgaatattatattacactgtacacactgtgagtttcgtaatatatacttcagtttgtttatagaatagaaaaaactattttagatttttgcttatatactgatttatagaaatatatcacattattcatagaacatgtgctgggtggtcctcacagcaacctctagttctaactaatgtgtggcttaattggtgtgtgatgtgaaactactctgcttcacttgagggctttggagtgtggtgactaagatgatgtttcagactggaagacgcccatcctactgagggaatgacaaaggcagagcaaggacatttgaaaacgtgtgcttcgaactgtgagaacacaaaatgccctagcttccacgagtccagagcccttggatctccctaaagatgccacatcgggcttcttgcaccatttcatcattgtcatgtgtgggccgtctattccatgaactactggacgaaattcacccatgatatttcaagtaggttcttttctattttccctaagtgtcggctgttctgagaaataaagggacagagtacaaaagagagaaattttaaagctgggtgtccgggggagacatcacatgtcggcaggttccgtgttgccccttgagccataaaatcagcaagtttttattagtgattttccaaaggggagggagtgtac

SEQ ID NO: 476754 - DNA, 1723 bp, Homo sapiens
agcttccccttctgccatgagtatgctcttactcccaatgcctgggtgcttcctggacaccctcattttaatgtccctttcaggggtggatgcaggcatccaaaacacgtggcttgctagaggatgcctccagctctcctgctctggtggagatcctcagaaccagcatgtagctagctgcagccagcacctgccaggtggtcagaaggggctgagggtgcacgggcagccggacatctctcggggtctgcagaccgggagtccgtgcttcctgccagaactggggaggtccttcagcattcagcctgagacttggctctttcccccagtgtgctggggccctgctgaccctggggagctgctcctctcacaatcagccaattcccagatagtgaaccatcgcccaccccacacaggctttccatgtgcaaaccctgcaatccatgtgcaaaggaggagcccacacctgccacctcctctgtgggctcacactcccggccgctgtccacccacacttgttaccccagggcagggaccagacccagggcaactgctgtccccagagggctagaattattcaagctgggcagtcctgggcctgctgaccctgcctcagcctcccttatcgtggaaaccacaatagaagctccttctcactttccctgcccctcagcatcccgaccaaccctggcacatccccaggtggcccccatggcgtggccggacccctcctctagggatctgtgagtaacacaccagctttccaatggcagccgttcctagttctgacctgaataataataaagtctacatcaaacacttcctaaccacagtgaaacccaggccagtctcttgtccctacttccaagcctttttacacgagctagaggccggccagctcttcccagagtcctcagttacgggagtcataaactttcctcgcccttctgtgtgtgatgtcacctgaagcatgttttgggtggggtcgtctgcctctgcagaagactgtcccactgggctcaccatactgtgcccctacagcaaaacttccgtaagagccacacttcatttctgttacaatttttaagacaccagttaaaccgaccagccacatcatcttcgacaattactctgggtccaatcaataaaatgggaacaaattggcctctttctcagatgctttgtaaggaagtaaatggatattttgtgtaaaatatttagcataatgacaggcatcattcactcattcaattaataattcatccaatcacttgttttttattaagtaaaattgtaattcctagcacagctcttactgcgtgtctgtggggtcaatgaaaacacttagggctacaccaagtggattatatttgatgtaaaccaggtgaaatgtgcagaattttgaggggtcttttgctacaataaagtgagggtgaggaacaatttagaatttctgctgaatttctgtaacttgaggaggttttcttgttattaagacattgagccagagagcagctccaccaggctgatcagagagccctttccctactcctctgaccccaagggaagaaactgagccatggggctgtgacctgcccacagtggggttgtggatggtagtgcagaatgagaacccagcattctgactcttcctgtctgtgttgtgttattccatgaggaccattggtagaattactgcagttaatcagaagccctgcatcct

SEQ ID NO: 476755 - DNA, 484 bp, Homo sapiens
gaccctcctgtgtatgggtgcagcatggcaccagccactggcgcatggggtgcagcggggattggggcacatgggctgtgcgggggtgcagcatacagaggaagaaaatcttcaagccaagctgttcagcctcagtccaaaatcacattctacttacagatccggggacaaaaatgccaattctaccattcatgatagttctgaatttgagcccaccttctcgagggctcagttgacagatgttttatctgggtccaaagacattgaagctgaccgtcagctctgccagggaaatgagagagagaaactgtggctcctgccccgacagtctggggtcccaagtctgcaaagtttacccacctgtacaagatgtacaaaactaaaagggaacctgaatgtatactggactctgggtggcaatgatgtgtcaccgtagattaatcagttgtagcaaatgtaccctctggtgtggatgttgataatc

SEQ ID NO: 476756 - DNA, 1444 bp, Homo sapiens
gaccctaatggaatggccccaggggaccttggaaggcctggaaacattttttattgtcaaaattgagggcaagtggagggcagtgactggaagggaaggtgggtgtgcttcactgacgtctagtgggtgtaagccggggaaaccaaagaccattgcacagtgcacagtacagcccccagagcaaagaaccatctggccctataggtcagcagtgcagaggctgagaaaccctggcctaagtgtattggagacaaaacctccatcccaccccggaccctccccctttaggcatctcaatggtgtcctgcaatgcacaggtagggaaacgctgcctttgcactcagctctgaaggggatgagaacatgccagtgtagtgtgaaatatgtaaagtgtctgcgtgggcaaatcttccctcaagaccaccggggaatcaccttctccccagcaggctcctctctgggatcctcctccatgcttccgaaacatcatcaagcccctgtggtagcaccatttcctcagtccgtgagctttctcaaagacgtagctcctgccctctccatctcaccggcatgcagtgaagacttcacctccaaatatgtgaatgaggctctgagccctgaaggatttggagaaggcatagcaacgaattctgatgaaacctaacaactggttaagcaggtattaagggttgcagaacacaagatctcataactcaatgccccatatcctcaaaacaaaacaaaaccaactggtaggcgagggactgtgcttgaagaaggggaggagttctgtgtgtggaagagactggaagaagagaatgttcacagtaggtagctagtcgggtgggagcggggcaggagaggaggaagttcacctgagacacaggtgagtccacaaatcagcacctgtatgtgaaagatgcacttctcaggggagtctcagcagatacgactgggggaaaagacagcagagaacaaatatttagctctagttgcttgcaaacattattttcgcccaatacttttttaaacacaaatattcttgacttaagaaaatgaaaaaggggttaataggactttgctgtacaagactaaacctgtcctatgggctgacctgaattaatataaatagtagatcatagtgtcttgatactttatttctatcccaggttattttgaagccatttaagcgcagaaatatgaaaccacgctaagattctgaagaagcaactgtttccccaacatttttctccagaaattccaaatgtctctggggggcattcccataaggtgggtttacacttaataattcagttgaaaatgcagcctttattttaaatctttgtgatctatcttcctttttaagcttttaaatctgttctcagtcaactggttttgaaggcagagaaacaagtttacactggaattcatgtacagttaatga

SEQ ID NO: 476757 - DNA, 481 bp, Homo sapiens
ttttaggttcacagcaaaatggagacgaaggctgagctaactatgagaggagtttagtttatagtttgaagcaagaatgataacaggctatattagtccattttcatactgctatgaagaaatacccaagactgggcaatttataaagaaaaagaggtttaatggactcacagttccacatgtctggggaggcctcacaatcagggtggaaggtggaggaggagcaaaggcacgtcttgatgttgtcaggcaagagagcgtgtgcaggagaactgccctttataaaaccatagtatctcatgagacttattcactggcttgcttcgcaaccatgaggactgaggacttagcctgcactcagaagcctcccagaagcagggtggtgaggctgacgccttgggagcaaacatcaaccaatggggtgtaggagtcagcggctgcagaatatccacatcagctcactcatctgcgaagtaaaaat

SEQ ID NO: 476758 - DNA, 628 bp, Homo sapiens
tatggaatacagcaagctctggtatgaatggtaagagcgtttctgcaccaagcctcattccaactagacaggctatttatttatggctaaacatgacattggattctgggactgaggcaaattttacttctttttttttttttttttttttaaagacagagtttcgctcttgttgcccaggctgtagtgcaatggcgcgatattggctcactgcaacccctgcctcccaggttcaagtgattctcctgcctcaccaagtagctgtgattacaggtacccgccaccatggccagctaattttttctatttttagtagagccagggcgtcgtcgtggtgggcgcctgcagtcccagctactagggaggctgaggcaggagaatggcttgaacccaggaggcagaggttgtagtaagccaatggcaccactctactccagcctgagcaacagactgggtgagactctgtcttaaaaagaaaagaaagtaatattgaaaaatacagtaatacagctaagacgatcctgtcacagatgagacattgagattttggttttttcaaacagggttatgttaccttagtagtagcaatgtaaagactcaacctgaacattaaacttttcatggaagt

SEQ ID NO: 476759 - DNA, 1940 bp, Homo sapiens
gagttcacgtcagctgttcctaaataggagggaagctgtacaaaaacgtctctgctgtcaaagacaacacgctcagcattgacatgcggtcactgctggtcacaccaaccagcccttgtgcattgtggaaggggcctccacaagggtgagcaccaggagggggatctcagggcaccagcttggaggctggacaccacagggatcttgggccaaactacaggatagggctgaagttcaggactgactgttacaaggccaccaggtcatagccccccgtgcagtcgcaagccaatgcaccaagacagcagggtttgcagcagagaaagagtttagtggcggcagggctccaggacaggagctccagccactgcaggctccacaccgcagccctgctcctccctccatggggggagctcatggggctccacgtgctcccacctcatggggacccaaggagatgaccgctgctggctggggcagcctgcttttattccctaatctgaccccaccctcatcctgctgattggtccattttacattgagctgattggtctgtttttacagggtgctgattggtgcatttacagaccttgagctagacacagagtgctgattggtgcatttacaatccttgaactagacagagtgctgattgctgcatttacaatcctccagctagacataaaagttctccaagtccccactgaactcagaagcccagctggcttcgcctagtggatcccgtgctggggccgcgggtggagctgcccgccagtcccacgcagggcgcccacacctctcagcccttgggcagtcgatgggaccgggcccgcagagcagggggtggtgccggtaggggaggctccacccacaggggtggaggcggggaggctcgggcatgacgggctgcaggtccccagccctgccccgaggggaggcagctaaggcccagcaagaatttgagcgcagtgcgggcgggccggtagtgctgggggatccggcgcaccctctgctgctgctgctggcccgggtgctaagcccctcactgcccagccagcggcaccagctggttgctctgagtggagggcccacccagaactcgcgctggcccatgagtgctgcttgcagcccaggttcccgcccgcgctctccctccacacctccccgcaagcagagggagccggctccggcccggccagcccagagaggggctccttcagtgcagccgggggctgacgggctcctcaagtgcgccagagtggacgccgaggccgaggaggccgaggaggaggaccaaagacacagcaaggccctgtcccaagtccactcacggggccacctaccccatagccgcaagctgcctcagagacacaggccctcccgccccagctgctccttcctcctcccacccaggaggccctgctggaatactggcagtgaaatccgattgaacgaactacagtggataatcttgctcactgaccttgccggcctctgggtgagagtgggtctcaccaccactgacgacctacgtttcaccagctttgccccctgccatctcaggctaggacgctggccaccaagggctccttgccaagtgtgcctggactcaggctcccacacagctggaaattgactcctttgtgtgactggctcaggtcaaacagctgctcccgtggtgtctgctgctcacccagacacatgggaccatcctccacctcggagccctccacagcccccaggttccagccgtggtgactggcaggaggctgctgcagaccctgggctgcccaggtggccccagatctcagagcttctctggaccgactgcatggcgctccctctgggccacagagagtgcccccagcctcccaggccaagccagccctccctttgtctcccagaaaacgagttcttcagctcctgctggagagcctctc

SEQ ID NO: 476760 - DNA, 1929 bp, Homo sapiens
tctgtctttgctgaacaaagtggcaggctggtcagcagggcaggtgactgaggccgtgaaggtggccattgacgtcgggtaccgccacatcgactgtgcccatgtgtaccagaatgagaatgaggtgggggtggccattcaggagaagctcagggagcaggtggtgaagcgtgaggagctcttcatcgtcagcaagctgtggtgcacgtaccatgagaagggcctggtgaaaggagcctgccagaagacactcagcgacctgaagctggactacctggacctctaccttattcactggccgactggctttaagcctgggaaggaatttttcccattggatgagtcgggcaatgtggttcccagtgacaccaacattctggacacgtgggcggtaagacagcccctggttggaccttgttttcgtgactggttccctcttcttcttagaagcaatctgcctgccatttctcacattgcattttgttattctgtccctgttgtttgctctctctttttttttttttgagttggggtctccctctgttgcccaggctggagtgcagtggcacaatctcggctcactgcaagctccacctcctgggttcacgccattctcctgcctcagcctcctgagtagctgggactacaggtgcccgccaccacgcccggctaatttttttgtatttttagtagagacggggtttcaccgtgttagccaggatggtcttgatctcctgacctcgtgatccgcccgcctcagcctcccaaagtgctgggattacaggcgtgagccaccgcgcccggcctgccatggaagagctggtggatgaagggctggtgaaagctattggcatctccaacttcaaccatctccaggtggagatgatcttaaacaaacctggcttgaagtataagcctgcagttaaccaggagaagttaatccagtactgccagtccaaaggcatcgtggtgaccgcctacagccccctcggctctcctgacaggccctgggccaagcccgaggacccttctctcctggaggatcccaggatcaaggcgatcgcagccaagcacaataaaactacagcccaggtcctgatccggttccccatgcagaggaacttggtggtgatccccaagtctgtgacaccagaacgcattgctgagaactttaagcaagccaagactgagactgacacctcaccagtggagccgtgtgcaggggcaggccttgggcctccagggccccgtgctgtgcacgcatacacctacacctttgctcaggcccttcagccacaccgagagccaggatatgaccaccttactcagctacaacaggaactggagggtctgtgccttgttgaggtgagtgagccccagtgtgaggagcagttcccaggagatattcagatgctgcacagcaagagagtgatccctgcaggcctcagcgccaatgtgctctcgtcacagctgttcttgctttgcacattaccttgctttctcagccacgtgacttgcatcagctgaactgcatggagccaagatgccaagagatccgctcttgatatcttcttccagccctggggcattgttggcctggcctgaagtaactacatattttggctttccattcaatttttaaatcctagcagttcatctgaaactaggtgatcccaggtgaccctggatcaaactctggaagaatttgcctgtgactttttgtcttaatgaccctaatgaaaggggtttggtcgggagcccctggggctgaggtttgagacagtcccggctctgacctgctgtacctcccacaaggattaccccttccatgaagagttttgaagctgtggttgcctgctcgtccccaagtgacctatacctgtgtttcttgcctcatttttttccttgcaaatgtagtatggcctgtgt

SEQ ID NO: 476761 - DNA, 876 bp, Homo sapiens
gatcatgagagcagggaacgctgaccttgctgcagggcctcactcgctgcatcaatgggactgaacctggacctctcctatgcatgttgattcatgtactcccccagatctacatgtacagtgggccagaaggacaacttctcattgctccccctgaattgcatttcaggtttcaccgagctgccctactccttgtaccccttctagctggccttagcatagctacgtcagcagctattggcacgactgccctgattcaaggagaaactggactaatatcactatctcaacaggtagatgctgatttaagcaatctccaatcagccataaatatactacatgcccaggtagagtctctagctgaagtagttcttcaaaaccgccgaggcttagatctgctatttatctcccaaggaggtttatgcacagctctagaagaaagttgttgtttctatgccaatcagtctggagtcataaaaaatactcttcaaagagttcgagaaaatctagatagatgccagaaggaacaagaaagtaacaccacctttctcattcctggagtaccaaagtaccaaagcatgtttaactggaatccctggctaactactctaattactgggttggcgggacccccttctcctcctcttgttagggttagtcttcaggccttgtatattaaattggtttcttaattttgtaaagcaacgcatagcttctgtcaatcttatgtatcttagaacccaatataacacccttgttataaccgaggaatcaatgatctgattcccccaaacacgagtgggaaatgtgataccctaacttcttttaacctgattgactctctcttagctgagagagctggacagactccatttt

SEQ ID NO: 476762 - DNA, 562 bp, Homo sapiens
ttgtgctttcttttccctaaacatgggcatcctcccaggtccaggcttgatctctcccctagaaaccaataatacctacttcacaggacagaaccagaatttaaaaatgcaaacaaaatatgaaggtaccttgacaaaattatttatattcaacttgtacacaaacccagaaccaaatctgagaatgcaagttggtgcctggggaacgagaaacgtagagaatggaagtgggaggtggaaggagaacagtactgtgcactgcacaactccaggggtcgtcattcacattctagtctacgtaggctgtgctctccagagagaaggaagagtaaagactcagatgcattgccctggccttacaaatttagagttggtgattggtggcacctggcagagcaaagtttcctctgttccaaaggaagaaaaggaagaaaaagaaaaaatatttgcttaaaccattaaactctaaactagtcaactaattctgaccaaatttaagatgcctgatactgaattgggatggagaaaataagggaggtatttatttgattaactttttaaa

SEQ ID NO: 476763 - DNA, 1737 bp, Homo sapiens
atggctaagagcttctctgctggccattactctcaagcaccatctgtggagaccatctgtatgtaatgtgtctttttctctttggctgtcttcagcaattcgactatgcttacaaagagccctgttttgtgtattcccgagttgggggtaaccgaacacctttgaagcagcctgtggattaccgtgacaatactttgatgtttgaagcaaggtttgagagtggtaatctacagaaggtagtcaaagtggcagaatacgaataccaattgactgtacgccctgacctcttcacaaataaacacacccagtggtactatttccaagtcactaatatgcgagcaggaatagtctacagattcactattgtcaacttcaccaaacctgctagtctttacagtcggggaaactcaagtgatgcacagttgcttcgggacacttttgtcttcaaggtggtacccatgctcaatccagatggtgtgattgtgggaaattatcgctgttccttagctggacgggatttaaaccgtaattatacatctctcctgaaggaatcttttccttctgtatggtatacccggaacatggttcatagactgatggagaaacgagaggttattttatactgtgatcttcatggccatagtaggaaagagaacatcttcatgtatggctgtgatggtagtgacagatctaagacattatacttacagcaacgaatcttcccacttatgctaagcaaaaattgtccagataaagtaagcaccttttaaggtattaacttttcctttatcaaatgttgcccatgtgagatagcagaatggcccacgtggataatactattccaaactgctttttttttagttagtttgaccagtttatacaattgacaataagaaagcaactatatagaactacttagtgagcaataatttgaaaatatggggaaaaaaggcaaaaatgcccccaaacctaccaccataataccactgctcttttaccttttgaaagcttcctctattagtcatttttatcaatcaattttaggggtttttttattgtttaaatagtcattgagtgcctaaattatacagattaatttcttaagaaatgtatattcttaagaaatgtgtaacagtttcttcaaagtatttattagaattttgccaggaaaaaacttaatccaataaccaatatttttaaaatatatagaaattagaatgagaaaagaataaagtatattattattttcacaaactatggaaatattggagcctcatttaccaagatgtgaaaattatattttaatcattctttagggaaaagatgttaacatagcaaagaaaattcctgcagactttcctttaagttctcaaccaacaaattcaattataaaggacttactggagaagaactaattgtcttttggggataattggggcccaaagacataaaaaggaaaggatgatctgataaaaatagctatttaaagaaagaacaggtttgttcgccaaagaggattcatttcctcagcaagaaagacgggaaaacccaaacccatagctgaagctattgctatgtaaatttatactgtcaatactcttaggtatagtttattactcctataaaataattctgtgttactaagatattttgatgtttgtctattgacatgcttcttagggttttagatctctaacctgttgtgccttagatgaaatggaccaatttcttaaataa

SEQ ID NO: 476764 - DNA, 674 bp, Homo sapiens
gcgataggtaaaacactatcccaactcagatgatttgactgagtatctacggttgaaaatcactactctgttatcatcatgctgattccaaactggaaaacagtttgccaaaatgtaactactgccctaagctgctcctgctctgtagcagcaggtcttgcagccagctttggcatcttcctgattccagctcttcctgtatactctgcttgggtttccccatgctggttcaccaaggctcagagtggaaggtcgggctcccataagtcggacagagtaaagtcctgtgaaagtcagaatggattctcagaaagagatgtgtctggagggagaagtcctggaccaatagactacttcaccctgaaggtgcagccaatgggggtggaagtgggttcctatgagtggcagctctccaggaagcacatagaaagagcaaggggcagttcttccaaaggaaaggaaagaatggcaggaggaagacgcaaaaagagactgagaatttctaaaagaactgaccttcctcctggagagaaagaattttccctccggggaagttctgaagcacctgtcagggtccgccctctggggcaagaggctttctaccagagccagcagccctggctggcacttggcaggtgtcaccagccatcaggtgggggcacctctaactgagc

SEQ ID NO: 476765 - DNA, 505 bp, Homo sapiens
gggagaactatattggatatccagtaacccagggctagcagctcacacaggtaatggtaatgctccacctgtgtttcccaacccaaaaaggtctggagtcttcccagaaaggcccagctcagtgtaagatggaggctacagcccagggtcactccctggccgtggcttgcccacacccttccacacttcgccatggaaatagccagccagcagctggacatgcaggactccagcccatagggaaaaagtggctggatgtgggggaggactacacctcctccaacagcagctggcccagagaccagcattcacatgcagaccagggatctacaacccatggaggagcaggcccattttcccccatttctttttcctcttcacttttccccttttcccaaccacttgctcaactccctgacccctgccctacatgtccttccctttcttctaccgtcactgcactgagaaggcgattgcactttccttacttcatctaaaacctaac

SEQ ID NO: 476766 - DNA, 537 bp, Homo sapiens
ggtgtccagccagcacagctcactgaggaatcatcagtcacaaaagtcagtcaatgtactggtcgccccgtttgcatcccagaactctggtggaagtggcgctcgaagcagaaacacagctcttatatcacaggaaaaggaaagcctatggaggaaagagtcatgatctgactgacttcttgaaaagacaatgccacccaatgtccatcaatgggaaagttataaatttaatttcagtgcttccattttctggaatattacgtggctatatgaaaaaaagaaagggaaagaatgacatattgacctggaggaatgcccatgatatgtttatcagctttgtggagaatggattggagaaaggcaaaaatgaaaatggaacaactaatgaagagaatatttcagtcatccagatggtagttctgaatgtggtggtagcagtgatagactgcactcctgtgatgttttacctacttactgagaatgggaaatagggagtaggcaattatataacaatgagaacttcctggttgggaataa

SEQ ID NO: 476767 - DNA, 763 bp, Homo sapiens
agaagtcaagtgagagtttatttaaggcactgtgacaaattgatgtcattcatatcccacaccaatggtctctctatacctatgccttttgcccttttgggagttttgatgaaaggcaatggtctgaggagagatacaggaattctgggtcaagggttccaggtgggtaatgaaggggtacaattcaggggcacctatgtggagaggcaacatgacctgccagaggtcacacagcagactgcaggcgacatggcaaggacctcaggcttggagagagtcacagccgctggtgcctcaacacatgatggaccggagcagagcgagggttttgtcacagacttgcatctgcaaacctcgccagcctgttcagctgctgccacagggctcaggggctgtgggtggcatttctcttcacctccacctcttgcatttcctcaggctgaggggagtcaccggaaaggctcttactcgtggggaactggagctacatcttgaaatgattgctcagtgcatctcacactagggttctacagaccatcctgaaggcattgggtcaacaagtaactccatatagaagcctggcctactgctagttctcgggctatcatgagcaagaaggcaaccaaatctgtgtgaataatgggaaacccaattgaatggtgttttttgagatgtttctgtttgtgtttcaacaccaaatgttgaaagcagaaagttggttttgttttgctagagctgctgaagccaggagatgtggagttgc

SEQ ID NO: 476768 - DNA, 1535 bp, Homo sapiens
ttctgaggttttggagagtgtgataatgccgggagtatctgacccagctggcctgctctacagaaagcatggcaacatctgcttttggggaggtctcaagaaactttcaatcatggtggaaggcaaagggggagtgaggcgtcttacatggccagcgctggaagaagagattagagaaggtggagaagtgagggagagcatagttgagtgttggtgtggtgggagagacagaggatctaggagggcatggggaggaatctggacctttgacttggggcaatgggaagccattgagagtttccagcagaagagtgaggaacatgtgtcgtgtaggcgcagggccatgacacagagactgttgggaggagcagagtgtcagggatgggccaaggaagaagaggaaggaaactggaaaagagagcccaagaggtggggtctgctaggagaacacagggtcacaggagccaatgggattgagtggcaaatgctggagagaattaatacaataactttaaagtatccactagatttagcaacaaagagatatttgatttccacttttgggaattcattttttttttcaatgaacaaatacttcctgaacatctgctcatccatgccagacattactgttggcctgaagctgacatcctactaggggagacaaacagcaaacaagtaaaccaatcgctggacaaggttattctaggcagtgataagagcatttatgaaaatagaacagggtgatgtgactgtaggtgattgttagtgggtggggatgacagaggaggcctctctgaggaggtgacatttgatccaagtcttgaatatcaggaaaacacatttgcaataaagatccaggtgacaagaacgttccagaatataatttggtaccattgaaatttaaacatgcttattctttgactaagcaagactactttgaactattcagcctacattaaataactgttcaaagacataggtacaagatgtgcaaaatactgcgttgttggtaatgataaaaactccaaaataacacaaatattatgccacagaagttacctaaataaattgtaggccctaacatgtgataaaagaatatgcaactctttaaagaaatgatatcaatctgtatgtcctgatttgaaaaatcatacatggtgttgttaagaaaatcaagttgcagaacagtctgtataataggaccttattttgtaaaaaccactaaataaaatcatatattggtagatatggttatatgtgcttagaaaaagctctgaaaggcttatacaaaattattcagtgttatcttctccaggaggtaggattgtgggggattttcagttcctattttgtatctttttgtattgtttagctttcgtttcaaacatagtgacatttctaaatatgcttggtaatgtacattatgctggtaatataaattatacaaaacatattggcattttggcaaaggtagaattaacataattatgagtgtaaaatatattatgagtgtaaaattctaggcagatgtc

SEQ ID NO: 476769 - DNA, 511 bp, Homo sapiens
tgctgttatgcagtctccgctgaaggaaaactaacaaacagaaagtaatagcatcaacatgaacaaaaaggatgatcatgcaaaaacttcatctgaagatcaccaacagcaaagactaaaggtatataaatccttgaaggtgaggaaaaaccagaacaaaaaggctgaaaattccaaaaaccagagtgcctcttctccaaaggatcacaactcctcacaagcaagggaacaaaactggatggagaatgagtttgatgaattgacagaagtaggcttcagaagatgggtaataacaaactcctctgagctaaaggagcatgttctaacccaatgcaaggaaactaagaaccatgataaaaggttagaggaattgctaactagaatgaccagtttagagaagtacataaatgacctgatggagctgaaaaacagagcacgagaacttcatgaagcatatgcaagtatcatagccaaactgatcaagcagaagaagggatattagagataaagc

SEQ ID NO: 476770 - DNA, 1136 bp, Homo sapiens
taagggaagctgtctggtttgagctgatgtttgcgctgagtcctaaaggataaacagcagttaaccagatatgtggggaaagatggcaatgggaggaaagggcatttcaggactggatgacatcattggagcctcttttctccttattttttcttccctggctgatgggttggggtgcacttctatttggaaagagttcctggtcatggaagacctagaagatctgggtaataagagaggagtgggcctggtttatgagagttgcatctgtgctcagggggtcttatctcctagaaatccccaggccaggttgcagactgctaagcaacatgtagtgcaggccctgcaccaggtggacaatgctggcaccagtgttagcagatccaggcaggccaatccttgggcctatgggcagttttcttggatgccagtagtaccagcagatgaccaggctggtgggtgggtccacaggcccctgggcagcaggccagctgtgggatacagcagtagtggtgggataaccttctggcttccaagcagtccacactggtgttgccagcacatgaaaatgctcagcagctttgctgctgggggcatcagtgttactgccaatggcttgtgtttcagccctggcaagatcaaatatagacttcttcaacaaaataacagcagaaaatcatccagcatatccttaaacaactcccttgatgatggattgatcattcctaaagttaggatgtactcacatcccaacaaattgaaaatgctgaccaatcccagcacagccaactcgaatttgctccttcatcaaagtgaccagcacctcatttcttcctctttagaatttatagatgacaaatttaggggtggaagcttcctgaaaaaatctcccaaacaactcaagacagctgccaagaagccaggatagaaaaactctgggtttcaattctcagttgagtctctaatagatgatcataaaattgaaaaacaactgaaattatgtgtagcagcaagcttagttatattaagcatgtatgagaaacgtgccaacttacaaggactcaatgtgaggtgtttgtgtggcaattcaacaatatcgatttattctgaaggaattgaggtcagctatggaaaaa

SEQ ID NO: 476771 - DNA, 3339 bp, Homo sapiens
gatacctccaactcccctactgtcatcaacctttgggttccctgggcctcgtctatgccatggagcatggtgctgtccctggcttcaaagtggaacttcactggggacccacttctttctgcccaggagcctgtctgcctcctgccaccatcaatcatatcatctgtggcaacaaggttgttcctgctgaggggcacctgcaggactgcactaagctgccctcagccctacctcaggctccttcctgtgcttgttggcagccacagtccacatgggctgaaatggcagagggctgctgtgacagcattgccccaagcttgtgcacacccagctgggttgtgacagcacctgggcttggcctcaactttgctccagaattggagccattgccaggagtgaggagaggccaggcccaggagcaggagcagacatttctgagcctgcatgaggagcggggcttcctgggttcccaagagcacagggatgcctgggtccacagctgcagctgtgcccaggagagtggggatcctacactttcaactcagaagggggctgggctcctgcctattgccagctcctgccagatccatggagtattcatccccagctgcaattcccctgctgcagctggcatctttacagcagctgctccagatgggccaccactgccatcaatgaggggtgccttaaggggttcatgatggtttttaagatctgataatggttagtaaagaagaaatctgaaaaagcactaatggttctcatttaaaagacacaaaaaagaacatgggaagctgttattaaaatctttgttcaattgttaaatgaagtagaaggttaaatagaaaatctgctgggtttaaactattgggaagatatgcatttgtggtgtcattgaataattttatcttcacttttgaattctttattttaaaatgtctttttgaataagatatttgggctgataacactgagactagaaggagaggaaataactcttctatttgtaatgtggaagagagagctgatgttagttatctgggttcattggtgatatgaatccatatggattcatggagttctaaataagaagcagaaggaaaatccagtgggggaattattctgaagtttgtatttcattccagcctctaggaagtgaggctataaagtagttagggcaggctttatgaggaaaaggtgggcatgaggtctgctttactaatttgtattatattaaaggaatatctgtgtgctctggcaatgagttctatattatctctcagtttggtatattaatgtcaccctacttcatgctctgtgcctcagagtgcttctctggaggtttctgatactattgcaaagaggtgtctctgcttctgaatagttatttgtcttattctttatgtcataagccccatacacagtatcgctgattacaaaggactggagcaagccctgcgaatgcctgaatagaattttctaatgggtgagaggttgaatcaacatttcccctctcaactcagaaaacaagtgtgtaatggatagacaaattagcaccttccagaaatgtggtaataaagaatgtaatagaaggaaaataagctcaactctcaagaaaggtaataaaaataaagagaaagctaaattttccttatttactatgatagagctgaccttctgtaatgtcaacattaaaaaggtttaaaatgtcactattttacttggatttctgatgtcagctcaaattttaattctaacatacatttgcaatgcaagtttgaaacgagcaatgtatataccatttcattttaattaagccatcttagaatgatggcactaaataagcacctgctttaagacacagggttgtgcctatttccttccgttcctattcctgctcaagactgtcattctatgctgccttttgagtttctagctatttaaagtaaaagtttttatcaggcttgatgtcactgttgaacattcatagccatattttggcaaggaaaccagagcctggcagtctttttctataattttatataatgcaagagggcttaatgcccctattatagaactgattctattatactctcctttccagaactaatggagcacttgacttattcatgttaaagaaaatgattgaatatgaaaagcttccagaccctgtttcttgccaggattaaaactgctctgctctttatactgaccagaaaagtcaccccttaattaagtttattgtgatttttcacctgccaggaagtcctgtacaatgcacataaaagcccatttgttggaaactattttagatctctctttaaaacctttgtttgttttaaaatatacaatagtgatagctaacatttactgagtccttacaacattacaaatactcttccagttctttatattacttgattaaaatctcagaaaaccctaagaactaggtactgttattatcactattttatagacgaagaaagtaaggtttgaagaatttgagtagataatggagtagagatttaaatatataccttctgagttattaatgactctgctaagctctttttttcacttggctaaaaacctaaaaaagtgaattaagcttgtagatttggaaggaatacatttattaaaaatttactgagtggctaatgtttgcagcataattgtagtagcaaagtaggctagatactaatgcaggtaaaatatagttgcttagttaagtaaacttttcatccagcaaattagacaagaaagagctaagctaattaaaatgtaaggtagtgggtattgtgctatactacaagtacaaattgaatagcaggctcagaagtataaatttataatttttcttatagcatcagataaagcgttatggaaaaggtgacaatcgagcatgcccttgaagatttgtggaaggcttggacaagtacagtcatggagatgcagtttcagggtagaggaaaatgtatgcgtcacagaaaagaaaggccaggcttgtttctaaattgcttattttagtaagggagggagacagtttgaagttttcatagcgtgaaggtagcatagaatcatataatattagatttggatgagtctacagagattgtttcctctacagaattttcagtgatgtagaaatcaaatcccaaataaatattttgcatctattttatttgtatgagtgcttattgcagaaggaaagaaggttgcaagagaaacattaacttgaaaaaggaaaatgacattcatcttatggatgaaataattatttatagatgaaatttcatcttatataataattgaatgttcaatttgggaatttgcattccc

SEQ ID NO: 476772 - DNA, 758 bp, Homo sapiens
aagcaacaggggaaagagttgaagtaaaaatttgtgctgggaagcaaatctcacaattaagcagaagaaacggagggcaggaaagagcgagcgtctgaaagatgcaggaaacatgtcaatatttccctctactcaatttctccttgaacgcctgaagtacactgtggcgatgaagcagatttttattcctacttattgggaccaagtcctgcttgcggtatggtcagccttagaactgactgtgagccacagggaacaagggcttacactgtcttctggggacattggcatcagcccagaggcattctcaggctttgacttcaaagcaacagcaaaaccaaaatggataaagataggaaataacaaaataagaaaagcccagcaagttggcccccaggtccaagtactgcagattccagtgtatctttccatctcttcttccaacaacacaatgactgtgaaacataaggagggaagaggaaagagtcttcctttacgtgacaaacccccttttcagatgttcagtgggacagtctgagtagcagcatcttctttcaagagcataatatagcggagcatgtgattgcatttccaacctataaatatccagctcctgaacactcatctttgagttctaaatggaataagccattattgccatattgtaaactgtaacagactggaatgttgttcagcaaatactactctccaccccatgccccctgcagggaagcatcttaacctgtcccctgacacct

SEQ ID NO: 476773 - DNA, 523 bp, Homo sapiens
gatttctgatatttaggttagtatgggtgtgacagtagccctgtggactccccaccgtgccggactctcagaggcacctgcaggactgtgggcctcgaggacagaggggaggtggcagtgtgaggatggtgtggtctgccaaactccagaacgtggtttcctctggctgcgggcagcacacagtgtcaggggtcagaggcatcaggaattggatgcagacgagggagttaacaagggaagagacagagaaggccatagcatggagtgggcagaagtgaaagatcggagcaggcagagcggggcctaccagaagcagtatctgcttctatcagcttcttcagggcagatatccaaaggagaggggaaaggaggaacgcagctttgtgaagaaaggaagagggcttgccacagggatcctttctatcaagatgagaagatgtgggcaagtccctgcgtgtcagccccaccgaggaggatgcagggggagcatgtgcataggcaccagcgtgcacatcgatgacag

SEQ ID NO: 476774 - DNA, 709 bp, Homo sapiens
ttaatggaatctacacgtgggattaatgacccaaaatgatacacgcacacatgtagcattggcagaagctgagggaaggaaactggaaaataggacgtttgccacgctggaggccaatgcaaatcaacaaatcaaacccttgtgtgcctctttctggctcagatctttttcacaatttatcgcgtttggccaaaggttcagagagaaaatagatgcaatattatctatcaaagctagattaatttcatggaggaacctaaatcatcgcgtgctcatggatccagtggttctcaacctgtcctttgcatcacagtcacttggaggactcactggaaaacagcttgctgggaaccgcccccctgtttctgattcagaaaatctaggtctgattctaggatccaaaaatgtgtttctgattcccaaatgccaagttcaggccgctcgaactcatttttcttgtgctgaatgaggcttgaattaaattctctaaacacaaattaaagggtatctcggcattaccaggaagatttgtgtcttgtgaaataatgggatggtttgagtcaaacgagtttgcaagaactactcaaaccaaattggttttgcccatattttaaaatcttttcacatttcacttatatttccacacaaatgcataaatcttaaagcaactagagtcagctggaaaaaagaagtgttctaagcatttacc

SEQ ID NO: 476775 - DNA, 1450 bp, Homo sapiens
ccggtcggtgccattggttggcggcccaattggcttgaccagggcgggaagcaggccatgggctccagtttctctgcggtgtcagcaggatgcagagtaagcccacttccaccaggcatcgatgatacacaatgaggcaatgcaaggtagagtggtccgcgttctgctctcccttccctcccgtactggccctgggcccaaaggagactgaacagatacacagccctgggtacatggtggatccattgacactgaactcgcagtgctctgcatgtcgcatgtgcaatggggccagggagctgcagggctgccctggagcggatgaggggtggctggagcttcgcagaggaaatggggtagattatgtggggctgttgaatatcttcacaaacacaatgagaatctcagaagctatagaatgtctgacacatacaaaaagaaagaaagaaaagacagaaagaaaagaaagaaagagaaagaagaaagaaaaagaaagaaagaaagaaagaaagaaagaaaagaaagaaagaaaggaaagaaagaaagaaagagaaagaaagaaagacagagaaagaaagaaagaaatctgaattcaggactagatctaaaataataaaaatcaaaaatgaatatctgaccctatgaacttaatttttgcctatcaaagtatttttctgttagcttgttttctttaaaataaattgaataagttaaaagtcagcatgacctagtgaagactgtcaaccatagctgcatgttaaaataacctagagagctttagaaagaaaaaacagcaaggcctttaacctgctcccagaattaccgatttcatggtctggatgagcttagccattagaattttgacaaggaaatgagtctccattttctcctgtcagagagaaataatattttttatcctggatggtcattataatgatctaagcagctagaatactcttgcccatggcttgcttgctcatttctgccaaaaattttataaaatatttgcttctcaaaggtgccccacctgtcaccatagcaaaggttgtgagctcccccacgaccctcccgccttgtccctgctggattcctcaccagggcaccttaaaataccccatagaattagtatgttcactttgctcctggttcgtcttcccctcctggcatgtaagctccacaaaatagggaatttttgaccttttgttccacgctgcaatatctaggtcagaagctggcaaactacaggccgtgggctaaatatgctccagtgcctgtttttgcaaataaagttgtattggaatgcaatcacccattgtgtatgtattgtctataactgtttttgcaaataaagttgtattggaatgcaatcacccattgtgtatatattgcctataactgtttttgtactgccctcagttgcaacagagactgccttgtggcctgcaaaatc

SEQ ID NO: 476776 - DNA, 1164 bp, Homo sapiens
tgggcctgcctctgtatccctgcattacctcacagcatcttctttataacactgcgaatgaacttgtataaacacgagtcagaaccacagctgtcactctccttgtggacagaccatttgaatctctctctaacttgctgtaaagaagaactcacagataattttccttttagtgtaggttctatgcagtcatatacactgaaggatgagaatatgccactgacctggtgggatgtgaatcttaacaaaggaagtcattcttatctcagtgagtgcattgatgatcaagagatgtgggttcaaaacaagtccatccagaaggcagtttggtggaaactctttcaaagcatccccatattatataacattagatggctcttacttcatctaggtccaaagagaagcaacattgctttgcatttctctttacatcatggttctcaaactttttggttttgtgagccctttatactcttaaaatgtactgaggacaacaaagatctttttcttatgtggattatagcaaattgatatttaacacattagaattaaaattaagagtatttaaaaatatttctttattaagtcatttaaaatgataataatatcattctatgttaatacaaataaattgcattcacaagttatgatttatactttgaattatattgaaataatttcagtgtttattttctttctctgattgttcctggtttggtcattgggaactctttcaagttgggtactatcaccttttgacaagctcttatcccttttattttcttttcactttcttactttctgactttgcaaaaaatttcaggaccaacttctaatttttaagtagacattttaaagttgatatctgattggatattgagggtcacgtcctcaattccatgtcttggggggatattacattccagatcatagcaaataaaatggtataaagagtgtaaaatgccccccactttggtcttcttggtgttttcaattggaggtttaatttcaaaatggaggtttttaattctccaggtggagagcgggaaaggggaattagcggtagatcaccctaagttaactctagtgatagaatttcgtgactgaaatggcagtgatggaggggtaagaatgcctcagggaggaaaataggaagagtatttc

SEQ ID NO: 476777 - DNA, 608 bp, Homo sapiens
tgcctgctggcctttggaatggaactacaccatcagcaatcctgggtcagctcacttcgacagatcttgagacttgtcagctgccataatcatctactgataataataatcctctatatttgcatggtatttcagatttcgaaagtgctttcacattctttagctcatccgatttttaaaaatctttatgtaaataaaagattcatttgtcaaatcttaaacttagatatattgggtgaatttcccacagttaagctactagttggtcaagtccccggccaagccttacctaatgtcatatatattttggatgttgcatgtaccaataacaaaggagtccctgtgtttgttgttctctttgatgggtccactcttacccaagatattttcatgtataactcatgctcatcattcaagttctacatcaaagtcaccttctcagagtccttcccttaccgtccctataatgtcaaccctttactgtccttcctgtagccactagtccattcgtaactctctctcctctatattgactaaaggacagccttttgcagcgtgtatcctcatctgaaataatattaggcatttgtcgattgttgtcttctttc

SEQ ID NO: 476778 - DNA, 1973 bp, Homo sapiens
ctgagaggttttggtggcggtacagacacttttaactcacagtaaaagcaaaagcaacagctcaagcagcctccttggagaaaacctgaaaattcaacttgttcaagagaaggtcttgtacgtgcctaagttctagagcctcctgacgtgagcatggctgagagtgaggaccgctccctgaggatcgttctggtagggaaaactggaagtgggaaaagtgcaacagcgaacaccatccttggagaggaaatctttgattctagaattgctgcccaagctgttaccaagaactgtcaaaaagcatcccgggaatggcaggggagagaccttcttgttgtagacactccagggctctttgacaccaaggagagcctggacaccacctgcaaggaaatcagccgctgcatcatctcctcctgcccagggccccatgctattgtcctagttctgctgctgggccgctacacagaggaggagcagaaaaccgttgcattgatcaaggctgtctttgggaagtcagccatgaagcacatggtcatcttgttcactcgcaaagaagagttggagggccagagcttccatgacttcatagcagatgcggatgtgggcctaaaaagcatcgtcaaggagtgcgggaaccgctgctgtgcctttagcaacagcaagaaaaccagtaaggcagagaaggaaagtcaagtgcaggagttggtggagctgatagagaaaatggtgcagtgcaacgaaggggcttacttttctgatgacatatacaaggacacagaggaaaggctgaaacaacgggaagaggttttgaggaaaatctacactgaccaattaaatgaagaaattaaactagtagaagaggataagcataaatcagaggaagaaaaggagaaagaaattaaattactaaaattaaaatatgatgaaaaaataaaaaatataagggaagaagctgagagaaatatatttaaagatgtttttaataggatttggaagatgctttcagaaatatggcataggtttttgtcgaaatgtaagttttattcttcctaatttactgtgatttgttaatggatgaattgtattttgcaaagatagttagagaaatacctccttccccttagctttattaaggtatcattgataaataaaaataaaatatgtttaatgtatataatgtgatttttaaatatatatatatatatacacacattgtgaaataatgaaataaaggtaattaacacatctagcacctctcggttactattttctttggtgtggtgagaacatttaaggtctactctcttagcaaattgcaaaaatgcaatacagtattattaagtatagtcatcatgctgtatgttagatctccagaggaggttattcatcctgcataactaaagttttgtaccctttgaccaacatttccccatttcccccaacacccagtccctggcaatcaacattctattctttgcttctgtgcattctactttatcaaattccacatctctgtcagatgcattaggttcttttttatactggttattttgtccttcagctcctgtattgctttattgtgattcttattttccttggattgggttttgccatccttctgaatctcaaagatttttgtttctatccatattttgtcttctatttctgtcattccagccatttcagcctggttaagaacccttgttggagaactggtgtgccatttggaggacatatgacaatctggccacttgagttactggagttcttgcgttggttctttctcatctctgcatgtcggtgttcctttaactgcagtgtagattgaatacaatcaataaacttctttttatggatgttttcacagggccaagtctttgtgcagggtctctatttgaagctgacttcttgtctctggtttcagaggagggtatgttagtgaggtatttttggtgttgaagctttggggt

SEQ ID NO: 476779 - DNA, 1463 bp, Homo sapiens
tgacaagatgggggaggagccagtggccgaataggaacagctccagtctacagctcctagcatgagcgacgcagaagacgggtgatttctgcatttctaactgaggtactgggttcatctcactggggagtgcaggacagtgggtgcagcacactgtgcgtgagccaaagcagggcaaggcattgcctcacctgggaagtgcaaggggtcagggaattccctttcctagtcaaagaaaggggtgacagacagcacctggaaaatcgggtcactcccaccctaatactgagcttttccaatgggcttaacaaacagcacacgaggagattatatcccacgcctggctcggagggtcccacgcccacggagtctcgctcatttctagcacagcagtctgagatcaaactgcaaggcagcagcgaggctgggggaggggcgcccgccattgctgaggcttgagaaggtaaacaaagcagccagaaagctcaaactcggtggagcccaccacagctctaggaggcctgcctgcctctgtaggctccacctctgggagcagggcacagacaaacaaaaggcagcagtaacctctgcagacttaaatgtccctgtctgacagctttgaagagagtagtagttctcccagcacgcagcttgagatctgagaatgggcagactgcctcctcaagtgggtccctgacccccgagtagcctaactgggaggcataccccaggaggggcagactgacatcttacacggccgggtactcctctgcaacaaaacatccagaggaacgatcaggaagcagcaattgcggttcaccaatatccactgttctgcagccaccgctgctgatacccaggcaaagagggtctggagtggacctccagcaaactccaacagacctgcagctgagggtcctgactgttagaaggaaaactaacaaacagaaaggatatccacaccaaaaacccatctgtacgtcaccatcatcaaagaccaaaggaatgcagctcctcaccagcgacggaacaaagctggatggagaatgacttcgacgaatgaatggctaactagaataaccaatgcagagaaatccttaaaagacctgatggagctgaaagccaaggcacaagaactacatgatgaatgcacaagcctcagtggcctattcgataaactggaagaaagggtatcagtggtggaagatgaaatgaatgcaattaaaagttcatatccagccaaaataagcttcataagtgaaggagaaataaaatactttacagacaagcaaatgctgagattttgtcaccaccaggcctgccctaaaagaactcctgaaggaagcctgaaacatggaaaggaacaaccagtaccaaccactgcaaaaacatgccaaattgtaaagaccatcaaggctaggaagaaactgcatcaactaacgagcaaaataaccagctaacat

SEQ ID NO: 476780 - DNA, 645 bp, Homo sapiens
gacatcactaatgatcaggtaaatgcaaatcaaaaccactatgagataccacctcacatctgtcaaggaagttgtgcacgtgcctgagctcttcaaactagatgtagacaggaacgagctcaaggcgcagaggaaaccttgggggccatcagccctttacaggaggagaaacaagaagccaacaaaggcgacctggaagaatggtcggtgcagagaagaggaagggaatggaagtcagcttgcaagtcaggcggccactgactgctctcgtgaagctggaggaggtggcagtggaagacgtcgaagcctggagagaacacagattccaggtccaggggggcggaaatctggtgagaactgggatggagcccagggcaagcttctcatggaggaaaggaagaaagggttgacctgccagggacacttgagccaccctgcagaagtggcaggctgggggatggccgctgcccatttgctaattacaacacttcctccacctgtgaatgtgtggacttcgaaaaccatcactaaatagaccagtactccaaggcctaggagagcctgatcccacgagatacttaatgcattttgttaatgtaacaaatgaatacaatgggcacagaatgttcttcagcctcatgtctt

SEQ ID NO: 476781 - DNA, 777 bp, Homo sapiens
tggttgttcatttgtccttcgatggtcaaggctgagggaggttacaccgggggctttgcagttccagattcggctgcgctccgacaggcctgcagggagtccctggacacgcaccagacgggctgtgctgttatgatccccgggcccagcagaggcccagctgtttttcctgctcttcctctttcctacacaactgtttacatcacgctgctcttgaagctatcagcagtttgcccggacacattcataatttggcttctggtggttgccagcaattcttggcatcttgatgacatctgcaaaggccttatttctaaagaaagccacgtccacagggaccaggtggacatggattttgggggacatgatttaactcagtacaggggtcttaggttagtgtattttaacaacaacgacaacaacgacaatgacaatgaacaacagcagcaatcctattccaactcactatttctggacagtgttttatgtcttcagaacattagtagctgcttcacaatgaatatggagcagtctcttagctagttggcatggtcctatgaacgattattatgctctttgtctttctgtatcatttttaaaagatttgagcagcttctccaggaactttaattctactggacacacactgaagttgtgatatttgaggcccaagcttcttaataagtgtcttcttgaccatgacagtattacatacaaattacttctaaccaaggaagtgattttacttcaaaagagtgagatgctggagggacattc

SEQ ID NO: 476782 - DNA, 1781 bp, Homo sapiens
ctgagccgtcctctcctctctcacagctggagatctggccccagacctcagatggcagcaccatgctgcaggtcctgaagacagcattttccacactcgagaactccgttctgaccaataccccacatgacactaaggctaggacgtcagcagccctggggtatgatatgagcctccttaccactcaggtcatagaagccataagactctgtatcattagaggtgtctatggggctttttcaaactatttttgcaaaccttgtattccttgttcacatgtagtcactgaagtctttgctccattatttcagtggacagccaatgatctgacaaatatttccttaaacacctttagccaaaaagcaaaaacaaaaacgagaaagatactactctacaagactatgtatcttggccctgacttaagattcttctttaatatgaagccaggccacttatggctctgttttatccttcaccacctgcctgcctggagcccacagatctgccagaatgcaagtctagggttagctcaggtctttcctgagcatgcatctggttctgagcacatgtggctggttctgagctttgcccttcatcttctctggtaaaggtggtggcccttctgagtctttattctcccaagaaatttttcccttcagccttctcttccctgtgattttggtctcatctgtcatcccttgacccaggcagaaatgagcaatgcatgtctttaaatcttttgacagaggccccactgcctggaaagctgttcctgcccaagttagggagagcaaaacgagggttagtcgctgcatcaattctggcagagcactgccatactggacaaaacacaaaaccagagtatttaaagaacatggttttattagccccctggcaccaaaaagccacaccaggaacgtcggcctccatccccacagctgttgcctccactctgaggaatggggggaagcatggtagtaggcaggtgagccaaaacactgcaaatctctcttgcccaaattcagctccctgtctctttgttaggagtccgctcgttgctgtaagctctggattagattctggagttctgagacagtaaattccatcagtttttgtcagcttatcattgtttcagtgaggggccaattcttcaagtgccctactctgccattttctgtgatgtcacccaatatatgatttttgaattagaaaaaaattcttaaagatataaatgttggaggaaaggaaacaacacctttaaaaatgattatatgataatatataaagaattaatgtagaactctaggcacttttaaattataattatgttttaaaatgcttcatagaaaaaatgatcataagaaaataaaccacatattaagagtggttgctttcagaagaaatgattgtaggctatatttactttttaattttctcttatgtactttacgtatgtaaagaattatccatcataagtgttcattgcttttagaatcagcaaatgtatactgcctcgtttcatattatggcaaattgttcttaaaggccccaatcagtgaggattaaatcagataattttagatatagtttaatacttgtcttttagtttgagtttgaaaattctatatttaaaaaagatttatttatacaactcataaaatgaactatttttcttcttgcttctggttttttttaaaaaataggaatgacatttattttatagaatattacctagcatctcagaagagacaaaaggataaaagtacattcttgaattcaac

SEQ ID NO: 476783 - DNA, 643 bp, Homo sapiens
aaggttttcatccagtttgaggatttgcaataagaaaagacaccccctatttcctacagacatgagaacccatcttaaacagacaccacgttctcgatgtaaatccttgacatacattgccctaagacaggtccaggcaccccagccagaggcacatctgtgccccactgtgccccaagtccccaagataactcacggggaacccacccttagactctacacgagtgatggattcacagaggacagagtgactatcctagaactcacatgcaacagtcaagtgtctctcacactgatgggcgctctcagagtgaacacccacactgccggtacctgctggatgctgcagaatgagcatgtgcacaaggggccaggggaaaactgctctgatattgatgaaatccctcagcttttgtttgtccaagaaggcaaggagatgctacccttctccaacaaaaaggagagtgcaacttttgcgttttaaaaagaatttgtggtttaaagaatctcaggcttatctagtgtattagtttgttctcatgctgctgataaagacatacccaagactgggtaatttataaagagaaaggtttaatggacttacagttctacttggctggggaggcctcacaataatggtggt

SEQ ID NO: 476784 - DNA, 690 bp, Homo sapiens
cgtggggacctgggagtaaaattatgggagtgcaattcaagatgagatttgggtggggacacagagccaactcatatcacctggtgacctttcacagccaactcttccccaggagttgcccttggacagagaaggttaaccactggctggaggtggcttctaagatcgccaaagaaaggaaagagtggagaaggcagtcctccttcttcatcatgttggtcacaaaactaaatacatgtttctgctcacatttcattgcctataatgggacccatattacaatgcacagttcctggctgggcagctgctggctagagcactgcggtgctaccacacaaattgccattcctgccacgttgcagtgtaggaactatggacgcatcggtgtctcagacaagctccctggccttctctcagggggtctgagtggacctgttagggctgacgtccacaaaaaagcagagaagcatctgccagctccaggcttggcacctaaaatgggcacatctatgaaatatcaaaggaagaataatttcaaaccacatgagatattctcacaagttgggtaaattgcacatccttagggcacttggtcccttagatcggttatttatgttttacataatttatttcaagtacaggtttttagcatatactttcaagcattttggaaatattctttaacagtca

SEQ ID NO: 476785 - DNA, 500 bp, Homo sapiens
gcagcaaaccaccatgagcacttgtaaatgcacagcagccccactacagggggtgaaggggtcactgccaatgactcacacttcagctctgatggcaatagcctgtggcagcacccagctatgaacaagggatatccatggggctccaagggcgtggagatgcaggatctgttgggccctggagcagggcaggccaggtgtccaagctggcaagaggaggattacaagtccatggctcatgtggatgtgcacagacatgactgcatagacaaaaatgtcaagcaggaagcagatggggctggaggagccaggaacagggccgagaagccaggccatggagaagacagagaaaagcactttgaattacaatttcacaaaccaagttgtatatatgacttcacactgacagtgctcacaaaggagatgagacgagaattatcatccccatgccacagatgagaaaacaggtgctcaggggtgaagtacatttcccaggagct

SEQ ID NO: 476786 - DNA, 535 bp, Homo sapiens
atctctctctcccctctctctctctctctctctctcaacacagacaggcccttgagttgacttcacaacccaccgatgggtcagcttgcatttttaggctgtaacacagccacttttctgtgcaatgggtgcacggtgtggggttccacaccattcccacgtcccgtggactctgcagagcctggagacagcaagggtgagggcttcaagagagcaaagatggcaacctgccccttccacagggagctctgtcccagggagttgcagagctgctactggcttgatagtcccagttcaaaggcggcttgtgagagagggtacctggatacccaggccaattatagggactcaattttaaacttaaattctaatggaaatgaaatgtatagaatagtttaccagaattatttttatttgctaaatgaaacctgttcaaacaaaaatctccctgtggaaacatttatggtgcctatgagtgtttcctcatgttcccccaaaatatgctttactggtagccaagaatgaaaagtaaaat

SEQ ID NO: 476787 - DNA, 892 bp, Homo sapiens
tgggcaggctggcatgggggcacccgctgcccctgcctgggtgttgctgtgtattcccgccggccaggggccactgccaggaccacccctcccttttcatatcccgattcttaagttctgctattgtggtattttaacaacagtttcaggaaacttcctttctattattgtttatccttatgttagaagttggaagcaatataagaaaagactaatacatgaaattagtactgagaagtgggacattgatataaagatacctgaacatgtagaagcaactttggaagtggttaatgggaagaggttggaacagcttggaggactcagaagaagacaggaagatagggaaagtttcaaacttcctagagactttttaaattgttgtgatagtgatatgaacaatgcagttcaggctgaggtggtttcagatggagatgaggaacttagtgggaactcgagtaaaggtcaaccttgctatgctttagcaaagagactggatgcattgtgcccctgctctagggatctatgaaactttgaacttgagagtgatgattcagggtatatggcagaagaaatttctaaacagcaaagcattcaagatgtggcttggctgcttctaacagtgtacagtcatacacatgacagtataaccatatgtgtgagcaaagagatgatctgaaactggaacttatatttaaaagggaagcagagcataaaagcttagaaaattggcagcctggccttgtagtagaaaagaaaaactcattttctggggaagaattcaagctggctgcagaaagttgcataagtaaagtggatctttttaaacaaaataagctttctttttgttaatcctggaaaactgtcagtttactaaaacgcattttgggaa

SEQ ID NO: 476788 - DNA, 2191 bp, Homo sapiens
cgtctcaaactaataattaagacatctgaaacttggtgttcctatagattaagatattaggagttctttaggacagtatggtaatgaacacctttctgcccgtggacgccgccgaagaagcatcgttaaagtctctcttctccctgccgtcatgtctaagtcagagtctcctaaagagcccaaacagctgaggaagctcttcattggagggttgagctttgaaacaaccaatgagagtctgaggagccattttgagcaatggggaacgctcatggactgtgtggtaatgagagatccaaacaccaagtgctccaggggctttgggtttgtcacatatgccactgtggaggaggtggatgcagctatgaatgcaaggccacacaaggtggatggaagagttgtggaatcaaagagagctgtttcaagagaagattctcaaagaccaggtgcccacttaactgtgaaaaagatatttgttggtggcattaaagaagacaccaaagaacatcacctaagagattattttgaacagtatggaaaaattgaagtgattgaaatcatgactgaccgaggcagtggcaagaaaaggggctttgcctttgtaacctttgacgaccatgactctgtggataagattgtcattcagaaataccatactgtgaatggccacatctgtgaagttaggaaagccctgtcaaagcaagagatggcgagtacttcatccagccaaagaggtcaaagtggttctggaaactttagtggtggtcgtggaggtggtttcagtgggaatgacaactttggtcatggaggaaacttcagtggtcgtggtggctttggtggcagccgtggtgctggtggatatggtggcagtggggatggctataatggatttggtaatgatggaagcaattttggaggtggtggaagctacaatgattttggcaattacaacaatcagtcttcaaattttagacccatgaagggaggaaattttggaggcagaagctctggcccctatggcggtggaggcaatactttgcaaaaccaaggtggctatggcagttccagcagcagcagaccctcagctgcaggtctgttggagtttactggaggtccattccagaccctgtttgcctgggtatcagcagtggtggctgcagaacatcggatattggtgaaccacaaatgctgctgcctgatcattcctctggaagctttgtctcagaggagtacccggctgtgtgaggtgtcagtctgcccctactggggggtgcctcccagttaggctacttcaggctgaatgatatcaagttgttcttggaaattcaattatgataatgaaaacaagtgactactaataacttattgtttagctgagtctgtaaaattcagcaggaacaaaacatactagaatatgaagaaccaaaatatgaaccaaaagcaaaattcaagagtaagaccattttgtagccagcatattgtaaagagcattattttagccaacagaatgatgagactttatgaattttaattcttccactactgttgtggcttttgcaaattactaaatttctctgtgactacttttccatttcttaagtaatttggttggtttccaaaagtcaataatgtggatgtagtgttttgagctctttggaaaaaaggactctacataaattaattagacaattcatttctaaataaaatctcaaaatttacaataagttgaatgtaaatgaatgcagacatgcgggattctatttagcagcataaattgctgaaatgaaattcagaaaagaacacacaaggcagacaaagacaaaagtattagagacaagaaaaatacgaaaacatgagtaaacaggcattttaagatcccctccgcagagtcaatttcttagcatatttgaaaccattaactatacttttctttttcattattttaaggcaaatttgataaaatagtcagtggtgaggaagtatatagtgtgtttgtggatttaatatattcatactctttctctaaatgttctagacaactaaaaagctaagaaaaaaacacattttagatattctttatctttaaaaatacatataaatatgtgtactctatgttgttttttattgtgtgaaattttattttactaataatatttttaatatattttaactaattatcataaatcaagag

SEQ ID NO: 476789 - DNA, 489 bp, Homo sapiens
tacccttgttttgattggcgttccctccaggaaaccaagcacatgcacaatgagtaaacataactatgacatactttccatgttcactttggagcagagtgctggcataaaaatggatgaaatttgtctctttacgtcaaaaggtattcagtttctgataggaaaagtggtagaaaagaaggtcaatgaatggaatttgcttacaacagcaggcaggatatgtactaagttaaatagcttatttcaggctgaacgtctagaccattcactacctggagaaaaagtttatgtatacatgcaaatacaacgttataagagcatatctcaagaaatgtattttaaggttttcaatggtcaactcctctggcacgaattataccctctaatgatgtgcacttcctatgacagaagcctatgttccgagtatcatctctctgtaataatgtacatattaaggaaagtatattttatataaagcacaagatgtat

SEQ ID NO: 476790 - DNA, 602 bp, Homo sapiens
cagtgaatattttcctatgtcttctgagaaacaaaacaagacaaatgggcaccatttaatgattaggggatggaatataataataccaagtgctctcttgtcaattcagtgttcagagaaagtgacggtacaacgggtaccactattcctctgaagagagggcagtcaagctccaagccaaagattacaagctcgcattgtgcatctggaaaagccaaagccactcaacaccagcttgtgaaagtagccaggaagggggatgtaccctgcaaagctacagaagtggagatgcccaagactatgggaacccaactcttgtgtcagtgtgacttggatgagtgtgttctcaagagagctgatggttttataagcggcttccccctttgctctcattgtctttcctgccagcctgtgaagaggtgccttccaccattatttttcctgaactttaaaataattatgtccatggtgactgtgaggtctcctgctgcaggattccagggatccatggtgagagcaggccaatccttgcctgctcaactcaccccttccccaggagttaccggaggccaagaatgtattccagtgtgacacagccccat

SEQ ID NO: 476791 - DNA, 738 bp, Homo sapiens
ggctcaggcccggctggagctgccttcgctaccgaagccgtcccacatccaggtcacactgatgcaagatgtgggttggctcccatggccttgggcagctctgcccctgtgactttgaatggtatagctctgctcctggctactttcatgggctggcattgagtgcctgcagcttttccaggaacatggtgcaagctgttggtggatctaccatcctggggtctagaggacagcagccctcttcccagagctccactaaggctgggaagcagggcaccaagtccctaggctgcacagagcaggagggccctgggcccagaccaggaaactgtttttccctcctaggcctctgggcctatgaatggaggggctgttgtgaagttctctgccatgccctggacacatttttcccattgtcttggcgattagcatttggctccttgttacttatgcaaatttctatagccagcttgaatttctccctagaaaatcattttttatttactactgcattatcaggctgcaatttttttaacttttatgctttgtagcccatattttagacggataagaagagtggcaagaaccgcattcctttatagcagatttgggtttagcaatgtgctaggataaaagaaataaagcaagggaggagggaataagggaaggaaatctacattcatctttcatattccctgttccagtcctggaaacaacaatttatccaaagggctgtgg

SEQ ID NO: 476792 - DNA, 706 bp, Homo sapiens
ctttataggtttcagataggaggccgtgcatgctaattggtctatgggtggccatgggaaggcctggaaaaagcaccagaagttttcacttcaagccacagactccacctggaacttacagcctggtccccatgccataggccatttctcgcctgaaggtgctgggagcagaggaacccaggtaatggaagcagggaacctgcgggatacgggtggcttcccaggaccccaagggtgcagaggtgcccagctgtgcggggaaacacggggctccggcccagaggacctggaagtgggagaggcccccactggctccgcggagcacgcagcccctctgtaccgcccccatattagccgacatcttctcaggacatggatgaaattggaaatcatcattctcagtaaactatcgcaagaacaaaaaaccaaacaccgcatattctcactcataggtgggaactgaacaatgagatcacatggacacaggaaggggaatatcacactctggggactgttgtggggtggggggaggggggagggatagcattgggagatatacctaatgctagatgacgagttagtgggtgcagcgcaccagcacggcacatgtatacatatgtaactaacctgcacaatgtgcacatgtaccctaaaacttaaagtataattaaaaaaaaaaaaaagaaccatcaaaaaaaaaaaaaaa

SEQ ID NO: 476793 - DNA, 740 bp, Homo sapiens
ttaagaaacttactactgggtactatgctcagtacctgggtgatgggatcaatcactctccttatgttaaccttcctacgtttttgtgagaacctttaccccgaaaacgggagactagccttagtgactgtcagacctggatggaggagagaggtcttgcccatgaggcagggccagtctgatctgagtggccctcctctctcctggcctctcccaggaccccagcctggctacagcttcttgcagcgcagcctcgggggcccaaccggcgtgtttctgaaggaccctcattatagctcctttactggcagaccatgcctgaccattggagagctcctgcagattggcctctgccgtcatgcaccagcccaccagcactcttcccctactgcagcctcccctacattgctttgctggtatgcacttgcccacagccacctcccctgcccactgctttgccagcattcccatgggcagacttcacctcccctcctcttccagcacaggtactctactgtgtgtgtcactgctgccagccaagcacaccctgctgctcctcgcctgctgatggctgggtccatgatggcagacctggagcctgtatctgtggaagccagaatgaagcctggcctcacaggagctgacctagtattgggatgggacatgagcctgagtcagcaggagctaggcatgtgctgggatggaccggatcctgagtccataggactgtcctgaagcta

SEQ ID NO: 476794 - DNA, 813 bp, Homo sapiens
aagtaaagttaaataacactatgaagagaaattctgaacatcacaaagaacataagagctttctggattggaggtctaggaggaaaaaatggttttgtaggcagggcccatggtccccgtactgtgtgcagtccagggacttggtgcctggggtcctggccgctccagccatgactaaaatgggtgaaggtacagctcaggatgttgctttagatgatgcaagccctaagtcttggcagcttccacatggtgttaagcccatgggtgcacagaaatcaagaattgaggtttgggaacctctgcctagatttcagaagatgtatggaaatgtctggatacccaggcaaaagtttgcttcatgggaggagccctcatggagaatctctgctagggcaatgcagaaggaaaatgtgaagtgggagcccctacacagagtccctactgtggcactgcctagtgaagctgtgagaagagggccaccatcctccagactccagaatggtagatccactggcaacctgcactatgcacctggaaaagctgcagacaatcagcaccagcccatgaaaggagccagaagagagggctataccctgcaaagccccaggggagatgctacccaaggccatgggagcccacttcttgcatcggtgtgacctggatagctttctgagcttatttaatatctctattttgaattttttatctgggatttataatttttttttcattggaatctattgttggagaattattgtcttcctttgaaggtgtcatatattttcttggtttttcatgtttcttatgtattta

SEQ ID NO: 476795 - DNA, 694 bp, Homo sapiens
aaaaccactcagaggagtactcaccagaaaccaaacaggaaaatccaatggagccaggtctttatggaggtcgctgtcaccacactccggtgctcagagcttcttccactctcctgggaaagcaccatgtgagtgggtggattgttgtcaaaccctcggggactttctctgatgggaatactgtgtggcccaaaaggagccagcctattagaggactactccaagagcagatgacatgtcttccagggacctcattgtttacaatgaatgcagccatctcgagagacttgatgaatggctttaaccaaaatgcggataatgatatggacaatgaaatccaggctgaggtggtctcagatggagatgaggaacttgttgggaactggagcaaaggtggcttttgttatgttttatcaaagagactgccagtattttgcccccgccctagagatatgtggaactttgaacttgagagggatgatttagggtatctggcagaagaaatttctgagcagtatatcattcaagatgtgacttgggtggtgttaaaggcattcaattttataagggaagcacagtataaaagttcagaaaatttgcagcctggtgggttactgacacagtgcaggcccctcccactgcggcagctgagcctactggcagggcagccatagtgtcaccaccttatgtgaca

SEQ ID NO: 476796 - DNA, 1047 bp, Homo sapiens
cggcgttcaaacacatgcatgtccaagaaaaggccacagcagccaaaaggtggagaccacgctcatatgcgtcaacctgaagaacgaataaaccagtgtgctccatccatgcaatggaatattattcagcccatgaacaggaatgaagtgctgaaactatccacagtgcagggtgcccccaaacctctcccttcttgtagggagcaggaggaggagggatacccgaataaccccacaggctcagtcctgcttcagccccagaccgtcctcctggagcacgggcccgaagatggccaggctgtcgtggacggtggtgcagttccaccggcggccgcggaactggtgctggcactcctggatgccaatcttgatgccctcggccacgctgggcatgatctccacgtagttcctgcagaagcggagctgcttggggaccaggcccgggatgctggcacacaggatgggctgcgagcccagggaggaatactgtggcccaacagccagcgacctgcagagggcaagatccggtggccaccactcaagcctgcacccctgcagtctgtccttgcacagtcggctcccttgttcacttctttattcattcactacacgcagtcccggcaactggatgaccatccggggtccctggggtatggtctgcactgccactgcccagggccaagtggtggtgaccaaggtcagctgtctgtgacctggactgtggagcttgctgcttacaaaacagggactggcctgggggatgcggccatttccaaggctcatcccttctccgaggctagatgctggattcattttgggggctgtcactctgcccacccccagaacactatgaccagcatggagccgggaccacctcagctcgcaggctcggggctgggaggggcggccttgtccctggtctctagataaagcagagaggtggactcccaagtctgaagcctccattctcagggtgctgagtcagccagttctgtgcccctctcaccctcctcccgggtgggccctggcccaccaccttcctgagta

SEQ ID NO: 476797 - DNA, 3144 bp, Homo sapiens
tttgctgtgtgaggtagtgggttccctgtctacagcgggtctcaggcactgtgggaattacctcctccgcgttaatatcaccatgagagcccccgtggacattactgatgtgggtatgtcctggcagggctttgcagaggcagtgccccttctgggcaaggttgtgggtgacatgagcggcgcctcctccctagcccttggctgtcctgcagcccaagtgggattttacattgtgggtatgacctctctcatgggaatagtggtgaccacaacccctgctgaaacctgcatgacccagctgatccctgagaccacaggagatgcagtgtcaccatctttggagcataagccagagccaaggctcagaggccaagagcaagattcacagggctgctgttcacacatgggcctgggcctgggcagcttgacagtcacgctcctcctgtccacccccatcacccaggatcatgggtcttggactccctcatcactggagatgctctccttcactctggttcacccccaacttcacctttagggcctccccttggccttgaagatcctgagctccagggacatggtgggatttttagaacatgatacaagtaagggttgctgaggttgtcctccaacccaacgggtccagaagcttccttgctggttccttccttgctgttccttgctggttgtcctccagcccagtgggtccagaagcttcggcaaagcatttgttcctgttctgtccaggttcttctcatatcaggctcagcaaccacctccatactctcctaaatcttccacctgccccctctacctgcagcttcctcttagtccagaagctatcagctatttaaagtggtattatttctttccatttccatgttttgttgcaagtgctgacttttagtacattgatgttgtttcctgcaactgtcctaagttcacttattagttccagcagacttattcttttttgtagatttgttggcgttttccatataaacaattgtgttacctgtgaataaagacaggttacctcttcctttaaattctagatgcctttcatttctttttcttgtcttattgcactagctagaaactccaggacagtgtcaaataaaagtggtgagagtggatgtgcttgtgttgttcttgatgtttagggaggaaacacacagtgttttattaaagtgtgatgtgagctgaagtttttcatagatgccacttatcaggtttaggcagttcacagctagttctaatctgctgagagtttttatataaatattggaatttattaaatgatttttctgcatctattgagacaattatatgtttttatttagccaattaatatagtgaattgcattaatttatattcaaatattaaactaaccttgcattcctgggataaatcccacttgctcatggtgtatcatcctctttatatattgttggattggatatgctaaaacttggttaagaacttttgcatctatgttcctgagaagtactgatctagaattttttttccttataatgtctttgtctgatttgggcattaggggtgccttttcattctgcagtcaacacttgctgttttctatttttgttttcttcatagtgaccatactaaccgagggcatgccaacccttgcatggttgaaaatccatgtataacttctgactcccccaaatttaactacagaagccttgccaataacacaaacagtcagttaacacatattttgtatatgtattatatactgtattcttacaatatagtaaggaggaggaggaagagagggcttggtcttggtgtctcaggggtggcagaggcagaagaaaatctgagttcaagttatttggttgtgcttgttgttgaagagttgtaagagtttttagatatattgttgatattaatctttatcaaaatatatgtgttacaagtattctctcccattcttcatgttttttaacacattttgtgttttagaaatatccattttagttaggctattcaatttgttagtatacaattgttcatggcatttagtcattttttttatttctgtaaaatcagtagtaatgtccccactttcatttctgatgttattaacttgagtcttgtgtctctctttcttggctgttctattgaaagatttgtcattttttgctggccttttcaaagaaataacttttggttttattgatttttttctattgtgtttttattttctttttcatttatctttgatctgatttttattatttccattctcttggatggaagctttgggtttagtttgctcttttttcccctaatttttaaggtgtacaattattgatttgaaatattttttctattttaatgtaggtgtttacagctatgcatttctctattaccactgtttccatggtatcccagaagttttggtatgtttcttttttattttcatgtgtctcaaggttattttctaatttcctttgtggtttcttctttgacccttggttgtttaagggtgttttgtttaatttacacatatttctaaaatgttcagttttccttctggtattgatttctagtttcattccattctgatcagaaaaatacttcagattatttcaatctcttaacatttattaagaattgttttgtggcttaacatgtgatttatcctggagaatgttctatgtgccgttgaaaataatgtgcattctatagttgtttggtggtatgctctatatgtttttttaggtttaattggtttatagtattttctaaatcctctattttctgaatgttcttctgtctggtttttctatccattattgaggtgggatattgaagtttacaactactgttgtagaaccgttcgtcccttcaattccgtcaatgtttactttataaattttttgtgtctgttaggtgtttatatgtttatagccataatgtcttgctgtatgaagactttcctctctatatattgttcttccttgtctcttgtaaagtatatttttctgacaataatatagccatcccagctctttttcattactatttacatagaaagtctttttctattattttatattaaacctctttgcatccttctatgtaaagtgagccgcttgtagacagcatat

SEQ ID NO: 476798 - DNA, 638 bp, Homo sapiens
gagaagggcccaccgttgggggtgtgtgagcccagagccctccaagctcctcacaacccacaccacttccctgaggaatccagactgggcctggaaggggagtcgggatgagcctggcctcggggggtggctgcctttgcccagcagggtgtcccagcagcgcccagacaccacggcagctcaggcagcccctgtacatgctgtcttgtgtgggcatagtcagggtctgcggctgtgggggattcagcacttcacagggcaggggtctgcacgaagacggatgtttgcaagagcgcctggacgtgatgagcattcacaggcagcttacttttgggttttctctctatgtggacctccacaagcccctactgtgcctggggccactgcgacctgctggttctcctggaatcaatgtcggtgcagggctgtgtccagctatccctgaaaggtctgattatctcctctccccactgcatggtcaccctggtaaaaggccagaagtgcctttggggaaggctgggagaaagtgatggcttgtcctgcctacctggacaagccatcccttacctggagagcttcttaggcctgggaggccgtggggagttgtggggtacaatgcactttccagccagagaacc

SEQ ID NO: 476799 - DNA, 1955 bp, Homo sapiens
ccgcgacttccccacagcgtccaaatgcccctgtaccgatccagggatggagaatcaccgggcagtgggcgactcgggtctgaacttcccctggccatggggggctgccgtgcagtcttgtccctggctgcctgctgcactgtccctgcaaagaagccctcagcagcgcccgcagatcctcctggcgctgctccgcttcctgttcgccagctatgggagcaaagtcttcctgaaggaggaggcagctttgacttcatcagcggcttccactcctagggatgccaggagccccagaagacgtcacgttgacaccagcagcctctatgcgcttcgggtagccctgccccacctgccctggccctgtgcccttggcgctggactgacctcggcagccgcgatcttggtcaggaccagcgggcacagccctgggggctcgggacccactgcagcctgtgaaggccccatggctctgcacacagagaggcggagcagcagactttgggacttggcccttcacaaccaggacttcagagaggaatggggcggagggaccactgggatcctcacatctcagggcagcacatcgttggcagcaatggttggttctacgcaaacttttatgaaattaggtgtggtgtcagcacagcggcaggtcaccgttcaggaaggacccttgtaccgcacagagggctcccacatcactatctggtgcaatgtgagtggctaccagggacctcctgagcagaatttccagtggtccatttacctgccttcatcgccagagcgagaggtgcagatcatcagcaccatagactcttccttcccctatgccatctacacccagcgtgtccacggagggaagatcttcatagaaagagtccaggggaacccaaccctattgcacatcacagatcttcaggcccgggatgccggagaatatgaatgccacacacccagcaccgataagcaatactttgggagttacagtgcaaagatgaacctagtggcacagccaggtgctgtggcctggctctggcagaaagttggcgagaagcccgtggaggtcatctccctgagccgagatttcatgcttcactccggcagcgaatatgcctggaggcagagcctgggggaggtgcggctggacaagctggggaggaccaccttccgcctcaccatcttccacctgcagccttctgaccagggcgagttctactgcgaggccgccgagtggatccagaatccggatgggtcgtggtatgctatgacccgaaagcgttccgagggagccgtggtcaacgtccagccaactgacaaagaattcactgttcggttggaaacagagaagcggctgcacacggtgggcgagccggtggagttcagatgcatcctggaggctcagaatgttcccgaccgttactttgctgtctcctgggccttcaacagctcgctcatcgccaccatgggtcctaacgctgtgcctgtcctcaacagcgaatttgctcaccgggaagccaggggacagcttaacgtggccaaagagagcgacagtgtctttgtgctgaagatctaccacctccgccaggaagatagcgggaaatacaactgccgggtgactgagcgagagaaaaccgtgacgggggaattcactgataaggagagcaagcgtcccaagaacatccccatcatagtcctccccctcatatcaagatattcttattaatctcattctcccatagttctgtttttagtaaagagaataaaaacctacgatgctctgattttaaacaagtggtaaagttttaagactaatctttaaccttttctcagctgctaaaactattctttctctgagccttgtaataatttcctttactttttatttatatgttttaatatttaaaatatttctcttcaagtgtgaagtaaaaagtagccataggggtcctcttgtt

SEQ ID NO: 476800 - DNA, 1454 bp, Homo sapiens
actctatattgaatacaatttgttgcacttcgaaatatctggatcagactatagttgttgtcgtcactgagaatgtaggagtgggaaagagaaaaatcatgcaaagtcttgctgatagcgttcacagtgacagcccgaaagatgatgtgtgtttgattgaatcagggatgactcagttacagagcctcacagttacagttccaagaagaaaactgtcaaaaccaaaactgaaattgaagattataaatcagaatagcgtggccgtccttcagacccctccagacatccaatcagaacattcaagggatggtgatatggatgatagtcgagaaggagaacttatggattgtgatggaaaatcagaatctagtcctgagcgggaagctgtgaatgatgaaactaagggagtggaaggaacagatggtgtcaaaaagagaaaaaggaaaccatacagaccaggtatagtgcctgaggtagacatttcaatatcatcaacactttgttaattaaagaaaaatacaatactgaagacttcaattaaaattaaatattcaggattaagaactgtctaaacaaaaatatgtgcacataaattaaagaactaaactatttgaatacgactttttagctctagagttctttattttgaatatgtgaatacttcacaatgaatcattattgaatgccttatcccaaatgttaaccattttattaaatgctttactagattggcttttgttcatacttggactttgaaggccatttatatagttcctctggatgtgtacttctgtaacgcttttaattttcagtattcactttctaatatctttttttgaaaaaacttatttcagtgtttatgcagtagtgccagctttccttagccagtttattaatgtctgtttaccaatgaggttttaaattggattcgtacaatctttatgcttcttattgcttatattttattggtaagagtgatctaaatcccttttgatatgtaaggaagaactttcttacttcattcgtattccatgagaccttaaaagataacctgtcttttaaataggtcatatctataataaggacctaagatctttatttagatgtgtctatgatgaagcctttcagggccgatctatttaacatttccctcaccacccctccactctgtagcccctttgccccttgtatttttctccatagtacttattataatatctaacacactataatatcaaatgttaactccatgaggataggcattttgatctatttggttccctgcggcatctccagcacctagaacaatgcctggtgtacatagtgggtgcttattaggatacatactgtaattatatgcttgtctatttttttgtgttttaatttatttaatgtctctgcttcctgtgaaaatacaagctccatgaggggaggaatccaatttgttttgtgcc

SEQ ID NO: 476801 - DNA, 893 bp, Homo sapiens
ccctgtgtttagctcaaagtttatgagtgtaccaatccatactctttatctagctgctctgttcagggattgtaaacgcaccaatcagcgccctgtcaaaacagaccacttggctctaccaatcagcaggacgtgggtggggccagataagaggataaaagcaggctgtctgagccagcagtggcaagccgctggggtccccttccatactgtgaaagctgtaacactcaccgccaaagtctgcagtttcactcctgaagccagcgagaccacgagcccaccaggaggaacgaacaactccagacgtgccgccttaagagctgttaacactcaccctgaagaaggaacaaactccagacgtgccaccttaagagctgtaacactcaccgcgagggtccgcggcttcattcttaaagtcagtgagactaagaacccaccacttccggacacactagctcccagagcttccaagatggcagagggccccttgcaagatggtggcaacccttgtgtggggttcttggcctcacggattccaaggaatggtatcttgggccatgcgcccaatctggagcagcaatgggtgccttgctggatcaggagcacagcagacaccctgccggatccggaggtatggaagtcagcgggggatctgcgacagccgcaaacagcagtggtggacaaatgtgctgttaaatcaagtgtccaggtgcaaaggtggtttctaaatgaagagttaggacatgaagtccttgcccatgcctatgtcctgaatggtatcgtctaggttctcttctagggtttttatggttttaggtctaacataataaaagtttatctgaatatgaagttcctttcaatttcattgtaagcttatatttgggtcagactct

SEQ ID NO: 476802 - DNA, 670 bp, Homo sapiens
ggagatctgcaacagatgattgtgatatgaatctatctgtggtttctatcatcaaaagcactgctaaattcttccatgatttactgtctccattcataaaggaaggagatactaattttcagtttgttcatgaaaataaagatgtcatttttcccctctcattcacaatcatggactccttgaattctaaccatggacccctttggggagggcaaaactcttcctattgtgtaaattccctgggaacctcaggttgccctagggaccacggaattgaattgcagacaccatggatccagacactcagtgaagtggcagctccttgtggcagtgtaggaaaagaatttgagaaagggcagacaaaggagggtgtgatacaagaaaggggctgtgctcagtcgaaggctctttgtaaggtgcacgacaagggcaaccacttagcttgcctgcaacacccctagtactgcccaaaagatttaaggatgaattaatcataattcatcaataagtgaatatttattgagcctttcctatgtgctgagcactgttttacaaacttttgaggtagccattattatgatgctcattttacgtattagaatattaggactttgaacagtttaactttctccaagtcccatggctgatcactactgataggattagagct

SEQ ID NO: 476803 - DNA, 939 bp, Homo sapiens
ctgcaacagcagagttgattagttgtcccttgctcgctctgggcgcctcctctgcctgggctcccactttggcggcacttgaggagcccttcagcccaccgctgcactgtgggagcccctttctgggctagccaaggccggagcccactccctcagcttgcagggaggtgtggagggagaggcacgagcgggaaccggggctgcatgtggcacttgcgggccagctggagtttcgggtgggcgtgggcttggcgggtcccgcactcggagcagccggccggccctgccggcccggggcaatgagggacttagcacccgggccagcggctgcggagggtgtactgggtcccccagcagtgccagcccaccggcgctgcgctcgatttctcgccgggccttagctgccttcccgcggggcaggcctcgggactgcagcacgccatgcctgagccttcccctgcctccgtgggctcctgtgcagccccagcctccccgatgagcgccacctcctgctccccagcacacagtcccatcgaccacccaagggccgaagagtgcaagcgcatggcgcgggactggctggcagctccacctgcatccctggtgggagatccactgggtgaagccagctgggctcctgagtctgcttcacttctgagccagcgagactatgaacccaccagaaggaagaaactccgaacacatccgaacatcagaaggaacaaactccagacgcgccaccttaagagctgtaacactcactgcgagggtaaaatgcacgcaagtttctcaagtttcacttcgaagggaaaatttggccggtttcggtcttccctttctatttatcaattcctcaatcatgcggaatctggtagttgatctttctggctgcttcacgtgaaggaagggcatcttgggatgatatggaatgaaaatatc

SEQ ID NO: 476804 - DNA, 848 bp, Homo sapiens
aggagataaacctaatgtaaatgaggagttaacgggtgcagcgcaccaacatggcacatgtatacatatggccgccagccccagtgagagcagaggagcttcccagaggcagtggctctaaaggctcctttgatggagctatgcttggcaggaaggggctggcgtcccatgggaccagctgcattggagcctgtagcttagaagccctggcaggcagctgtgggcacataggtaggatggtagttatggggctgacttatgagaagcagtcctgcttttattgcaaacttctagaagacaagaatgagctggatacggactgccaggagagactgagcaacattcaggggctctgcatgcctctggcagacacttgtttggtctttgttaaaatattggcctgtggaaaacaggtttgcagtactattttggccattttatacccatcaagaaaacttttggtttatttggaagcaaatggtttacgagagaaggtcaggctctgagtcaggcagccttgggttcccagtgcctccatttccaagctgtgttgttttgagcaagttactcaatcactttgttgctcagttttcttgtacattaaatacctggtgtcagagggctcttgcgaagatggaaagtgggagggtagctgtatacctggagcatcgtaggtgctctagaaatgttcctttaaatcacattctagaagtacagccacagtattatttctgttcggtttgaatttaacttgtattttttaaaagcaaatgccttcgtattaattagagagatttaagctgcaagtaaaggaaagtcatactgaaagtgttttaaataaaaagcaa

SEQ ID NO: 476805 - DNA, 446 bp, Homo sapiens
aaccagtagtttgcaacctcagcatggaaaagccacaagggtggattcttgggaatctaccaaggccttgggattctaccccttgcaccagtgtgcactggacatgggacatggagtctactccttgcatggaatctatcccaaggccttgttattcttccctgtacaccagtgtgccctggacatgggacatggagatgctgagttatctgctgtgtggggtagtcaaaccaggcatgtggggctctgtgagctctgtcaccctctgggttgatggcaagaacacagatctagctgcagtggccgtagacactgggtgtgggtccaggattcggtgttggaagctgctgatcaccagtttcaggtattttctatctattgggagactgcctttccctggagctggctgtgaccaattattaccttagagagacagttaactgctc

SEQ ID NO: 476806 - DNA, 651 bp, Homo sapiens
atcccacttatattccacttataatttgaagttggtgatatgggagtggggccagggaagtgctggatagagaagggcagcgtccctgtaaagggctccaccctcaggcccgtgcctgtggacctaactgaacatggagaggagcagactgtcagacctgcaatggtgaaacgctgtgacagagaaagagagaaaggaaggacgtctggataccaaggggatttcagctgcgggaagtcagagaagagtctggccgctgaacacctctatgcccacaaactagaaaacccacaagaaatggataaattcctggaaatatacaacctcccaagattgaaccgggaagaaatggaagtcctgaacagacaaataatgagttctgaaattgaatcaggaataaaaaacctaccaaccagaaaaagccctggaccaaatggattcacagccaaattctaccagacatacaaacaaagagctgataccaatcctattgaaattatccccaaaaacttgagaaggagggactcctccttaacttattctatgaggccagcctcattctgataccaaatgagacacataggaaaaaagagaacttcaggtcaatattcctgatgaacatagatgcaaaatgctcaataaaatattacc

SEQ ID NO: 476807 - DNA, 628 bp, Homo sapiens
attcagccatcatgcccgggaatccatatttgaccttttattttatttttagattccacatctgcaatttgggctccaagatacaacagggcacagtggtaactcgagcaacaggagaaattacaccacacagtggtgactctggacactggagtggtaggatacagcactggctcaaactttgtgatgccaagtgtgatgatagaaaggacccaggaatggcagggtacagcagtgacttgaactccagagggctctgtttccctgagtgtaaggcaccacatcactcaggtgccagggggtacctggtccagctcttctggaccaggctctggatatctgagaggtctgatgctatatgggctcaagcgccagtgtcacagctactcccctgggctgaagctctgattcagagaggcaaggaggttggaaaacaaggagcagggcacaatgtgggctcctcccctggagtaatgcagctgtatgaactccaggcagctccctaaactggactcagtgcctcacttttgtatttctgtgaaggatgccatcggtattttgttagagattgtgttaaattagtgtattgctttgaggtatatggtcattttaaaaatattaattcttc

SEQ ID NO: 476808 - DNA, 639 bp, Homo sapiens
ctcgctacctgggtgcaatataaccatatgcaccgaaatagagtcagaaatgaaaaggcaggtccttcaggaggtattccagaaaaaggcattgttatcacaggagatgacagctccatatgtgttattaatcctgaagacttttcagcgagacaagatgtggaggtggaagacagtgatattgatgatcctggccctgtagctgtgtggtatgtggacgctgactgggacaccaagcatgtcctcacccattcagctgacaaccatctttgggcctgtgaaacagggaaacagctggccctactcaagaccaattcaactgtgtggatctgcagttttgactttgggggcaatatcatcacgttctccatggagaagcagaaaagctatcagtgctttgtgagcttctttgacctgcaggatctgagccagattgacagcaatgagtgctacctgaagatcccttgcagtgactctaaaatcactagtgccatttggggctcctgtggggagtgcatcattgcaggccatgagagtggaaagctcaaccagtatagtgccaagcctggagaggtgttggtgaatattaaggagcactcctagcagattaatgacatccagttatccagggacatgatc

SEQ ID NO: 476809 - DNA, 728 bp, Homo sapiens
acatgcaacagagactgtatgatcgcatgtggcccgtggagcctggcaccttcactatctgggcctttggagaaagagcttgccaactccttcagcagcgaaaaggaaggaactactgaccccagccgcaccctggatgcatccccagagagttatgatgagcaagaaaagccaatcccaaagggctccctgttgtatgattcagttgacatgacattctggaaatgtcaggtttatggaaatggagaaggagtccccggtggctggggttacagagcgagtggtgagggaggaggcgatgaagatgctgggtacttaccgcatcttccctccctgactaggtatcaccatgccctgagtacagaatgtgacaccacaggatgctcccggactgtcctcatcagctggagcccccgggggacagcatgtcttcctgtgaccatggacccctacagcaagagtgctggccccagtcgagcacttacctcactgattatgactctccatggctccatgtccccatagattgtaggtgctaggacaacccctgatgcattctaggtaactgtttactaaatagcacattttataaatgtgtgcatcaacgtcacttcagtgttcactactaaatgaccacctagttccttagctactcaaggcaaaaaaaaaattattattgtttttcacacagtaaattttttattggaggaggagaacatctaaaatct

SEQ ID NO: 476810 - DNA, 530 bp, Homo sapiens
agatcaactcaacccctcataccagcagctgcaggcataccccctgagtttgcatttagcttccctatcttagtgcacccgaagggaaaggaatgtgcttattaaggcccactgttttactgggcctattgtatgagagtgaagtttggcagttacccaagagactttcccctactttcctctgcaggcaggaagacaaccagctggatggtatccacatcgtgtgccatcaccaccagctgagtcttcttgttctccaccaaggtggtgacggtgttaactcctgcttgaaggacaagtggtctcctagtggggatgtcccctttgctggcagctttcttctcagcccggaccaacagcctctgcttcttctcttgctttgtctctggtctgtagttgtgggccagctgaagcagctgagtagctgtttggaggtgcagggcttgggtgaactggttaatcgcacgcaggaggcactttcaagtcgcttacggagaatggctctctgccactgcaacctgatataacct

SEQ ID NO: 476811 - DNA, 1089 bp, Homo sapiens
ttaaacaactttcccaatgagctttctctcgcctccaggcctctgcccatgattttccggtgcatctaatgttcatccactggcctctctccttctcacacctattcattgtttgggcctcagctgaggaaaaatgtgtgatttttactggcctggcaggggtttgtggtacctcttgccaaagtgtcaagaaaactcagaattctcatcttgaatttggagattcccaaattattgtcacacttgagaacctgcgacagcgttgttcttactaccggataaatgagtgccgagagactccaagtccagtcccacaggatcctattgcatcaccccctgtctttggacatgcctgtgaacagcacctacagggcagacttcttactgctgctaattttactatcagcaaacaaaagggaaaggggaaacagtatcaaatgcggaaggagagtatctgtgagcacgaggtgaacacggataattggaagagggcgactttctgtgttctaaaactaaaaaggactaaatttgcacagaagtaaaacgggaaaaggtgtaatacagaaaaagctataagcagagatcctgtgctgacttctcaggacggcaatgatttatatattaagtcaggcaccagggacatgttaaaaactctacagggaaatttcccatatgatggatagaactttaatattaatggaggattcatcatggtaataatgaagataataatctccctctctggctctactacacttcagttctatgcccatgcatgacgaatgttaacactgtggtatatggcttcaggtatttggttggcatagatttggggaaatgtaaggactcaggccaagatgcagcttggctagaaggctacatttataacatccttttctacagttctgtgttctctttttgaagatggtttataaacttataacctggtaaggatattaagaagaatccatgtgtccaagaaaattaattatgtttctgtcgtacagactaggatggcaaattaggtagggataagtcaactctttctgtaggttgtcagaatgtaaaaaataggtagcatatctgatt

SEQ ID NO: 476812 - DNA, 726 bp, Homo sapiens
cggcggtcgggcggcggcggctgcggtcgggctccactgaactcttcactatgccactcacagccacctgccatgcacattatttcttccaatatgccagatacaaagatgtagtcctgggcacaaaggagagtgcggaacagtggggagcgactctgaagaggggagcagatgaaacccagcccatcctctttagagctgacgatgaaaaaggatggctgtttaaaaggcttgtcattctggaggtcatcagcacatgtcccctaaaggagcatgttctaacccatcgcaaggaagctaaaaaccttgaaaaaaggttagacgaatggctaactagaataaacagtgtagagaagacattaaatgacctgatggagctgaaagccacggcacaagaactttgtgatacaggcacaagcttcaatagcctattcgatcaaatggaagaaaggatatcagtgattgaagaacaaattaatgaaataaagtgggaagacaagattagagaaaaaagagtaaaaagaaatgaacaaagcctccaagaaatatgggactatgcgaaaagaccaaatctacatttgcttggtgtacctgaaagtgatggggagaatggaaccaagttagaaaacactcttcaggatattatccaggagaacttccccaaaccagcaaggtaggccaacattcaaattaggaaatacagagaacaccacaaagatactcctc

SEQ ID NO: 476813 - DNA, 543 bp, Homo sapiens
cggcgcttggagtccagacatctggaacacgagtgttgttttgtctcctgagagaggagaatgggtaaaacacaaagtaagcctaccccattaggaactatgttaaagaatttcaagaaaggattcagtggggtctatggaatcgctatgacacctggaaagtttaaggctctgtgtgagatagattggcgggcattagaggggaagaggaaggagacaggagaacagcagcataagcggctggcagaggcaaggaaagaccagcagagagaaaagggagagagagagaggagagaaagagagagagaggaaagagagagagagaagaaaagaggcaaagagagaaagcaagagagacaggaagagacaaagaggaagtcaaagagaaagaggcagagagagagaggaagagacagagacagaaggaagtcaaagagagaaagagagagatatacaagtagttaagaaaaaaacagtgtacactattcctttaaaagccaaggtaaatttagaacctataattgataattaaaggtcttctcc

SEQ ID NO: 476814 - DNA, 563 bp, Homo sapiens
gcaggtaaaatccagggtgatgtgtacaggaatgcctgtagcacttggcataccaaaccgtatcacagtggttctcagactatgggcccagaatgcaaattctcaggccctaccgcagacctactatatcaataactctggcaatctgccacaaatgtataaaatagatcacttattgtttgctacactgagtgatgtctacagactaggctatgctgctccttcacagatcacagagttgtctgtgaccttctttctagcagttcacaacatggttgtttgcttctttaagccagcaggagagtcttgcttgcccaatctgctaagaatgtcttctataatgcaacataatcacaggaatgacttccattacctttgttgcattctattgattagaagaaagccacaggtcccacctgctctcaagtggagggaattaatcaaagacactgacatcaggaggcaggaaatatgaggactaccctagggtctgtccacacaacatattattgtcttgatggcaggtgtggtgttttgtactgtatcaaccttgttacgctggg

SEQ ID NO: 476815 - DNA, 662 bp, Homo sapiens
accacttttcaaatttggtgtctccaggcctcagtcacccctggaggataaatgggacagaccagtacacactcagaccgaccttttgctggcccagtgcctctgcttgctctcacagcatctccagtccacctgacaacaactgggtgttcccagaaggtgttcctcatgtgtactattgcgctggtgaccattgtcccaccagccacagtgaatgtgccattgctttggattgctttgctgaacacaagtgtccactctgacagtggccaagtgccaaggtcacacagcgaccttcaggaatgtgggggaccccctgacaatggggcatctgtgcctaatgcccctgacagtttagagaagcagctctttttgtttctactcacagctttcttctctgcagatgcagacatgggtctgaagatcaatgaatgtgtctggaagggtctggaccctacagagaacagaaggctcaagccaagatctttcatatctatatcaaagcatctttgaattccttcccttctcttcatttccccttttctctttttctttctttctatatctttatcaaaattttaattcaaagggtacatctttttgagttttctttctttttaaccaaagaagaatgtcagaatgatcgtaagaaaaataaagtc

SEQ ID NO: 476816 - DNA, 510 bp, Homo sapiens
cttcaaaggaaccgaataactgatttaaggtgaagcaagtaaaaacaatttaggcagatccatggtgttccccaccctccctgggaatgtggcccccaaacagcaaaggttcttgagagcctgtgaggacacagaggagctcaggaaaagctgcacctgcaagggccttgtgcctgagcatgaaggaagctgccaatcacatggaccaatgaatgatcaaagattcgagggaaacccagcgtctctcccaggtcagaatgtagagtggccacaggtcctggcagacacctctgggaatcctcaaagggcttatgtatatcagttgcacaatggctcagaccttctccttccactgcaccctcagcctaaggtctgtttttccacggctgtgggaggaggcttctacttcctaccccatcaccttgtgtcacaggccactccatttcccacctctccccataatatcattgacacaggcaatgttcatagcagattttattgaagatttgc

SEQ ID NO: 476817 - DNA, 506 bp, Homo sapiens
tctttgaaatatggcacaattagaagcctgaaccttactctaatgggggtttggggagatctgcctggaggagaggatcatgtgttccccttggaagcctctggtgacagagccttgatcgttttagcacctggacaaagtgatcacagggggcttctgtcatgcacaatagagccagtgctgcagcctgagacaggcttggccacaggaggccactgcccaggccaggagagcaactgcattcctagaggaatgaaggcaagtggacagttacaagacagtaaccagctcttctcccatgctgctgaaaacaaggctaagaaagtaaactgccatgtgaggaattgcagaaagcgttctaaaatatcaccaaaacctattcatcaagacagttcagttctacgtcttctgagttaaacctaaagtgaactaatattatatttaagtacgtttgaagctctcccataggccctatatagattatttgtattatgtatgatgtcttt

SEQ ID NO: 476818 - DNA, 789 bp, Homo sapiens
cttatagaaggaataggaacagcatttgagagggaaatgaggtgggttgttcagaggaagtatggtagaaacaagtgctgcagtcatactgcctggactgaaaaccagtccttcgcccatatccttgggcaagctgttggcattgatcaatgtacttccggatggacacggccctggcttgtttggcatttacatccatgccttggctgaaagtttagagggcacagtgatttcatttgtggatgacaagagcctggaaaggatagcaaattcattggctgatagaattaagaccaaaaagactgacaggctggagcaatgggataaatctaacaagatggattttatcagcaatagaaagaagatcctgcacttagtggaatttggcaagaaaatcgaagttaaatctgtctgtttaagaagaagatctgtgtacagtttttattgcagcactttggaaaggcaaaaaactaaataccacaagaaggcacttcagttaaataaattttggaattcactgtggttcattccctaccttggagtactagacagtcgctagaatgaaggtgtaatatctataacagtttatttgaaggatttccatcatatattgttaggtggaaaatgaattttagaatctgcttgtaaagatctcagtggggtttataatcagtattttatttactttagtttgagagagaattgaaatctttacaatattttatgacagtgactgtttcctcatggcctcacccacactaaacattatttttttcacctttgccaatg

SEQ ID NO: 476819 - DNA, 580 bp, Homo sapiens
tccctgagagcagggatactctataattcccccgccccctcacccacgaccgccagctttgggatgccgcctttagcatatacatctgtggtttttgaaggaccaactagtgatgaccctaagcaggtagagcttgtcgtaggagttggctgcctttgctctgatgtggaatggagcttttggatgggctctactatctggcaaaaccactgggtgggctctgctatgagggtgctacagctggcagaacatagaagtaccaccaagatctgcatgctggtcactacaatctctgcctcctttctttgtttctatgtgacccaaggtggtctaaccatgccattatccccagttttccctgtgaggcacagttatgggctctgggtgtactgcaaagaacctaacaggcaagaccatttccctcatggaatttatattacaatggaggaggcacatgataaacaaacatgtgaaatataacttcaggtggataatttgtgcaatgaaaatacatgaaacaggattaaggggcaagatagcaagacaccctctgggtgtctctgaggatgcaatatttgag

SEQ ID NO: 476820 - DNA, 591 bp, Homo sapiens
ttaagaagtctattatttaaaaatgcacaaatatattcttcacttacaagtgtattcttctcataaaaattcaaacaccgttaaaatttttaagtccccgtttgccatcagctacaggctagtctcttgcctagtgaagattccatgtctgatctgcattttgtggaaggaacctgtagatgttcagatgtgtccggagtttcttccttccagtgggttggtggtcttgctgacttcaggagtgaagccacagaccttcacagtgagtgtcacagctcttaaaggtgccctccaaactcttccaatttctgccaattactcagttccaaagccacttccacattttcaggaagaagttccccctggatccaagctgatcctgaaggaaaagagagtgtggcagagggaggttgcctcactcccctctctatggtgctatcctgggtttcagtgctccacagagtttttgccattccgctggtgctctttacttcttcagtcactcttagtcgaaatataggtccctttttgtgggagggacaagcactaggtgcatgtctctgagacatactaataatgttcatcaagagg

SEQ ID NO: 476821 - DNA, 758 bp, Homo sapiens
aattcactctgccaaaggaaaaaatgaagctgaaagctgagtcatgcaagaagctgcatttccttttgttcctgagcagatagctacagacagatgctcatatgccttttggtttacactaataaagaactggaaacatccaacatccctccacaggggagtgactaagggaccacagagagccttctcagccagaacatcacatagttgctgtaaggaattggatagagctctggctcccgacacagagaatcctccaggcatactgttaaaggaaaaagaaagctgtagaatcagaaacaaagctatagaatcagaaaagaaagctgtggaatcagaaagctatagaatcatactacattgtatgatgtatttatgtaagacagccacaaacaaaactcatctggaaaaattgagcatagcagccagcataagggctcagagggaacctgaagaaaggaactgcatgtatcgattgggtgtactgagaatcagaacacacatagtacaatatcttaaatattacctgaaaagagaaactgacctgagctaactttaataagaaaagctaattgtagatagattcagcctagaccaagaaagggttggtcacttgcactttattttgtccatgggtattgtcatgtttccttgattgctctgtatccttgtgattgtacattaatgtctgtgcatttgaagaagtggatacttattccagtcttcacagattaactttgtctggaaaagccctccag

SEQ ID NO: 476822 - DNA, 1214 bp, Homo sapiens
gcaacattttctaaatcgtatctgagagcctggctgctgtgacgcattgattcattgtggttggcaccatatgcttccatctgctgtgagcagtataattgttctcagtcatcagcatcgagcacccatggctaattcatggggaaaaactccagtgctttgcaccaaagtccaactcgtctgtcagttcactcctgtggaagggggccaggctctcagcatgcctctccctcctgtcctgggcattggtctcaatcagaccaggtactcagctctagcttttcatggctaccaccatcaagttcgtggtaatctgttacagcagccacaggaagctaatacagggctcttcaaacggtactgtacacaggaatcccctagggaacaggatgcaactgggattcttattcagtgggtctggggtggtgccctagatgctgctgcatttccaatgctcctgggtgatgctggtgttggaggtccatggaccacgctttgaggaacaagtttaagaaggatgggttttaagagtcttgcttgtaaataatgtttctttttttcacgcaacttaagaaaggttggaagtctactctgaaattgtgctgttatgcctcagtcttaaataccatcctgtgcttcagtttttaaatcataataattataataaaaataatgggatagtgttaataaagcatatagtatgtgctagaatattttacatacatcatctcatttaatcctcacagcatgaagaagctgtgtagtttggtggcgagtcattctcagattgcttggggtcgagtcttagttctgttaagcaacttgactgctagcaaacttaggcaaattactgaacttccttccctcgttcactcatctgtaaagtggggataataatagattaataataataatactcagtgtatcctgtggggttagggaaaaatgaaataattaatatatgcaatgtgtttagagcagtgcctcgtctgtattaagccctatggtatggctagccattattgaaataaagtaacaccaccattagccccattgaacacattagaaaactaaagttcaaattaagtctcctgtccaaggtcacataccgaggaagtgacttctcccactgctacattgagatacgtgactgttgtctgatggcctgcaatacttctaggtgtggggaggtttgaaaaataagcaataccgac

SEQ ID NO: 476823 - DNA, 776 bp, Homo sapiens
acaactctcctcaaggtctgttaccatccgaggaatcctgggacagcctgcttagtaaggaaatgcggcagtccctgcaacaccccaattctaggagtacaaaaaccgaacagtcagtggagactagatcccacagaccacatgtcccaacttatgtggacggcttgccccaagggtttagggatagccctcatctgtttggtcaggcactagcccaagatctaggccacttctcaagtccaggcactctggtccttcagtatgtggatgatttacttttggctaccagttcggaagcctcatgccagcaggctactctagctctcttgaactttctagctaatcaagggtacaagcgtctagatcgaaggcccagctttgcctacagcagcgagatagccaggcctctctatactctaatcaagaagacccagagggcaaatactcatctagtggaatgggaaccagaggcagaaacagccttcaaaactttaaagcaggccctagtacaagctccagctttaagccttcccacaggacaaaacttctctttatatgtcacagagagagcagggatagctcttggagtcctttctcagactcgcgggacaactccacaaccagtgacataacctaactattgaagcttgtgcatgtgtcatgaagttttcgtgccatggttttcagctccatcaggtcatttaatgtcttctctacactgtttattctagttagccatttgtataatcttttttcaaggtttttagcttccttgc

SEQ ID NO: 476824 - DNA, 1465 bp, Homo sapiens
aaggtgcaggtcaggccggacggggccaccagctgccctcacagggcagtgctgccgggagtttgtgccgggcaggtcccctccaagctgaaggagtccagggcccatggcagttctggataaggataaaaaggactggaggaggcacctcaagaggcacccagtgtactggaattacccccagggaggcactcacaaggggccactccctcactgccccctcgctgggcactgagaaatactctcaatgatgaaaccgtgccttggcaagcccgcagcgggctgcctgccaaatgctctcccagcagaaggggccgttttgcaagaaagaggaaaaatgattgcaaatatgagcagacgtcagctttctctttggaggctaaagatgatgcacatgcagatacagagacctgcagatacagagatagatgcaaatacagatgtagatgcagatacagatacagatgcagacatagatacagagatagatacagatacagattcagatgcagatacagagatagatacagatacagaaatagatgcaaatacagatgcagatacagatacagatacagatgcaaacatagatacagagttagatacagatacagattcagatgcagatacagacatagatgcagatacagagatagatacagatacagagatagatgcaaatacagatgcaggcacagatacagatgcaaacatagatacagagatggatacagatgcagatacagatacagagatagatgcagatacagagatagatacagatacagagatagatgcaaatacagatgcaggcacagatacagatgcaaacatagatacagagatagatgcaaatacagatgcaggcacagatacagatgcaaacatagatacagagatagatacagatacagatgcagatacagatacagagatagatgcaaatacagatgcagatacagagacagatacagatgcagacatagatacagatacaaagatggatacagatatagatgcagatgcagatacagagatagatgcaaatacagatgcagatacagatacagatgcagacagagatacagagatagatacagatacagatgcagatacagatacagagatagatacatatgcagatgcagatacaattacagagacagagatatatatagatgcagatgcagatacagatagatacagtagagatgcagctacagatcgatgcaggtacagttacagacatagatacagacacagagattacaaatacagatgaagatacagatgcagagatagacctcttcagagaagtatggaaggactgtagctttacagtcacatggactgagttcacatccccactcctcctcatcctagctgtgtggctttgggtaaagttacttagtctctctgagcctcattttcctcaactatgaaataaagataacaataacccctt

SEQ ID NO: 476825 - DNA, 711 bp, Homo sapiens
ccgtgagctcccgggggtagacccggacttcctgctcagcaggaccagctctttcacaggaggatgatggcgcccgacgggtcctgcagcatctcttatcgggtctggcagcccggtcccctggggatgaaggctcctgactctcacctaggggcacagctccccggcacccctgattttcctgcttttcagaacagtcgccctcacatgcagcagaatgacattcctctgtgtgtggccgcattcttcgcccatgggtccctggatggacacctgggttgtttccccgccttggctgctgaggatgctgctgctctgagcactgggaaggctttaaagccacggaaacggaaaaacggagtgtgttcagggaagcgcggacagatcgcccgctggtctcgcgtgtccaccacggtcctggggtcctggctctcccaccgtcactccgagtccagggctctctgctgtctgtcagaaggatttatggttgtaggggtgaagggacagggtgtgacacggatgtagctaaaggggaggagatatgttgcaagtcccacagctgttcccaggggctgggagggcatatgcttcctttaacagtacttgcttccaaagtgtattactatacctctgatgtgtcttccacaggccccagttgagtaagtgtgcctgtatcacttgttactttaagggtctcaccccagcctctac

SEQ ID NO: 476826 - DNA, 700 bp, Homo sapiens
tgtccccaaacctcaccaatgaagacatcactggaacaccatgcttctctgaagtcagcagttctttacttactgtatcttgatgatggtaatctggatgaagctacgcaaatatgctaagcgaagtcattaattttggtgatctggagggctgtggccatctcggaaccattacctccggggactattacccagttcctgagaaagtccaagtctgtgctgttgtcagaactgagtgtgtttgttccacgcgggcacctgtccccatcgatacgaaggctggagcctcagagatggaacgtaactcacacggtcacttagctggctcagtcgtctccaggttttcttatgtcatctctggcaagctggcttctgggttacatggcattggagtgctgcctgcttggcctggtttcatcgaagaccagttcttggctttgtggactaagccctattcctccctgaaagtagtgaccaatttgtcactaaacagcattctgtttggtttgcatgaactggcagttaaactgtcctggtttttacagttttgtctcttaaggccgactgccaatgttttgctacccctttggttcagtgacagcccccagggctgtagcggctgagaaacaggagggtggaggctggagtgcagtggcatgatctcagctcaccgtaacctccaccttctggattcaagcaa

SEQ ID NO: 476827 - DNA, 576 bp, Homo sapiens
ctcttggctccgtcaaccctgaatgagaagtcggcgcctcgcaccttggggcttggtcaacgcctggcttctctctgatcgtctgggctgcacggccacattgccaggtctgtctacacagccagaggagctgctgtgcccggtgcttctgaggccctgcgccatccacctggtcacacaccctccacggaaggccactcaagggcagacccgtagcagagcagaccctcagggactgggcccaacctcgggagccagcccctgccaggtggggctgaagtctgttcactcctgttccctaagcctggaccaccttctacacaggctgcagctgctgggaggccccaagctcatgcagcgcaactcttccaaggcccagcctgctcagacgattcggcccaaagcacaaagcatggcagacaccttccgcagcatgaagcatggaaggaccttccccagcccagcgcccacagcagcatgctctctcaacagggatcaaagtccacgcccgaccgccatgtgacacagacaaccagtgtagcctgaggacctcaacagcagccccgacattccagc

SEQ ID NO: 476828 - DNA, 705 bp, Homo sapiens
taatttatggtctattttgaaaatgaagtctttaaaaagaaggcagctctgtttccagaaactactgtccaaaacattcaagaagataacccccatcacaccccctgctgtgccctgtgatgggccggcttcccctctcacccggatgctggtgttggtgtctgtgctggggttcgggggtcgctgcctgtgggtcagcggctgtgaaagccaaagcagattgggacatggtggcaccctttctgtcatccccctggtccaggccggtgtgcagggcttgacagagccacccggcaggaccctgggggagagcacagtggctgtggaagcactgttaggtatgcgggaagagcgcacatgcaaggttccagctgtgttcatccctgagagcgggtttcacaggctcactgcctcacggtggctgtccctccccagggccggaagcaggccatccaggcaggtgcgggagggccacacagccattcttcatgctcttcacctctgtgtaatgcacatgtgaattctagtgacgtagtttcaactacgtacatttcaagaaaatgtactgttgtgtgtttcatttgtgtgatttcataccaaaaactgaactacattgtatgtaatttggaagccatgttaataaaaccttgcagtttccactctggttccgtaacgcaaacggggggccttccacaagcagggtgg

SEQ ID NO: 476829 - DNA, 1904 bp, Homo sapiens
tgtgggaacccttggtggaacttggtagaacttgggcattcgggtctttgggtcacagttgggttggttttcagcagcatgactgtggagaatgttgtggagagcctggagtggggagagaagcctggaaaagaggcctgcagtcatccagaagagggaggaggatgggggtgaagaggaggtgcccctttcctgccctgtccctccttatgccaaaaggggaagatcactccttcaccttctcagttgaattcattctccagggctttgctattccatgggctccctccaagcctggcagtcacctgtgcaaatagggggtgggtaattgtgaggctgaggagtccccggaccagccatctgcatgctggagacccagggaagcccacggcacagctcaggccatgtctgaaggcctcagacccagggaagctgatggtatgattctcagtccaaggcccaaggcctgagagccctgagggctgctggtgggggtcccagagcccgagagccagagagcctggagtgtgagagcccaggagagggagcgcgagcaatatgcctgcgctcggccttgtgtgctgtgggcccgcagcggctgggtggcaccggcccaggctgggggctgagcatccttcctcagtcgctgattccaacgccagcctctcccggaaatgccctccagacacacccacacctgaagacacaccacaccagctacccgggcctgccttccccagtcaagtcatcacctaaagttcaccttcacatcctgttttacagattggggaaactgagtctcagaggggctaagtcacggacccagttggtccctaacaggagtaggcaggcctgtgtggccaggaggttggagccaggtgctgctcctccctccgtcctcactgcagcccgggagcaggtagagccaggtgctgctccccactccgtcctcactgcagcccgggagcaggtagagccaggtgctgctccccactccgtcctcactgcagcccgggagcaggtcagaaccaggtgctgctccccgctccatcctcactgcagcccgggagcaggtcagaggtgtcagaccagcctcgtcggggactggggctcatgcttgtcttgctggcaggtgggcttgaggggagggatgtcgaggggacaggccagcgttttcctcagagctgggtgccctgcccggccccaccaggccccggagtcactatcggcagacagaagggaccatggctatttaaactctacgctcatcccggcccaaacgatgctgcgctgatgctcaggtaaagggttggctaagaagggggacaggccacccacagtgccacatggtgtggcgtggatgcacctgtcattctgaggaccccgcccctcctcagccctgcacagcctcgtcatgctgccccaagcagaggaagcagcggccagagtcccgaaggagccgtccaggggcttcagtggatgctgggatggggtctgtctggtgctgggatggggtctgtctgggaagtacagaggttcccctggccttcctgtggtgtttcagcctggacctgcccagggggctgaagcttggaatggccaccagggtaggtgctccacagcgctgggcaggactgagcctgtctctgggggaggaccacagacaatcagaggacagcgcaggcctaaaagtctgggccagcagatggggaagagtcagtgacaccaatgccacacccaaggtgacaccagtgcctccaggtagcgtcaaccgtgtgactcacttgacacaggccatggacttggagtgcccgcccagggtgaccccggtgaatggcggagttttgtagaatgcaagcccagcccagcagtccacgccttcttgctaagctgctctgtacacc

SEQ ID NO: 476830 - DNA, 637 bp, Homo sapiens
gttttatttttagccggggcagcaatgtgctcagttcctggtcaccttgctcctgagaattcaccccacacatacactcgcacactcctgcgggaattcaccccacgcatacactcgcacgctcctgcgggaattcaccccacgcatacactcgcacgctcctgcgggaattcaccccacgcatacactcgcacgctcctgcgggaattcaccccacgcatacactcgcacgctcctgcgggaattcaccccacgcatacactcacacgctcctgcgggaattcaccccacgcatacactcgcacgctcctgcgggaattcaccccacgcatacactcgcacgctcctgcgggaattcaccccacgcatacactcgcacgctcctgcgggaattcaccccacgcatacactcgcacgctcctgcgggaattcaccccacgcatacactcgcacgctcttgcgggaattcaccctacgcatacactcgcacagtgggctgcgctgcccagcgatgttgccagctgtgggctgatgtgagtgttctgagcagggttaagataggcgaggctaagctgcgatgttcccttggttgggtgtattagatgcattttgacttaaaatacttccaacttatgac

SEQ ID NO: 476831 - DNA, 712 bp, Homo sapiens
cctccggtcttactcagttacctttgacgtgcaggagaatggcctttaatcatatgatcagcaaacactgggcagtcacgtctacagtgagccgggggaccaggggccctgaagcaatgaccacactttcctgggcgcagcgcttcccgcacgcacggcagacacctgctgagaatgccacgggtgccatggtgaaggagagtgtggtccgagagcagtgtggagacgtgtttctaaagccggagcgccccgggccaagctccgtgcacatcacagggcccctcattaccaaccaggaaagttttgttatagaaagaaccttacaccttggtatcctccatggaaagggccccacccgtagaaggatgatgggagaagccccctcccagcccccgtgccgctcacggctctgtggtgccaccgactctaacaagtgctgtacctctgacaacgtcctggtgcagaacccaggcaaggccagcgaggcacatggtgtctgctgcctgttcaggcaaatcactaatttccaggacatccccttacacaggaacctggggaatggcccagtcccccaacaacccccatctcagaggacaaaagaaacccaaagctgagccatggcattctttttaagcagggtaaataaccattatcctgtctccatgctttaaatgccgtctttatgcatctgagtatagatttgagtcacagc

SEQ ID NO: 476832 - DNA, 1428 bp, Homo sapiens
ccagccagaggtcacagccaaacacggggctccagccagccgtgtaggtcacagggagttaggggtctgcccatgaagccctcagcttgatggagccctgcaaatatgataccggagtgtgtggaaggagaccatcaggacggacaccaagggccctcgagcgcgcacacacaataccagtttatggaggtttcaaaacctaggaaatgtttccatgctgagtatctaattccttccacgagttcaacaggtgaggaactgaagcctggcccattggagggagtggcaggatgtggactccaggtctggttcatcgatagtctcagctcttcttttcaccgagtgaagcccattaaccaggaccaagggcagaccaaccaacacagagacaacaaaccattgaaggcacaggaaggattgttccagctccaaggacttctctctccagagctcatcttcctgctttcacgggccttccccacgcctgtgttgttcatatccactgttcttgccagaaccccgtggttctgaattctcctgattcgtgcttcctccagggctcaccaatgggccaatattttctcttgagggccacctggagacatgctgtgagcatcgcaaaatctccttcccagagccacgtctctcccttctgatttcatcttagatttttcattgctcccataatctagggttcttgactttggtttcacagtaacaaacacccaggaggcttttgaaaaatgcttagacctaggacatcccatgcctgcagatactgacacatttgatccagttgaggccttggcctctgtgttttttttaaattccagataattctaacatgcatatgagaacgagagacagttaatgtcattgcaggttctcagtttattccacttacatctttaaatgacagctgggtgatgtcgtccagaatttatcacatccaaattaaaggaaggaagcctcaggcacggactgcagtagtccttgctgccatttactgagcatctaatacacgccacacagcatgctgcgtggtttacagagaatcttatttaaaccctatgaagccctgcaagttactattgctttattcccccaacaggtgaggaaagtgaggctctccgtgcttaagcgcttcctctaatcacactgcttgtgtttggcagggccaaggctcctgctgtttgaatggatcaaaagactgtggtttccagcatacgtctgtgcctcacaatcacactgcactttccgtctgtttaaatgaatgtgcctttaagtcagatactcccagaggcgcctttcaaggggcccatcagaatcctagggaggcttttccaaactgtacatgctcaagctgctccttgccccatccttgacgccccctccttgacggtgaacccccttccaaattactgtcat

SEQ ID NO: 476833 - DNA, 793 bp, Homo sapiens
tgtatgagcctgttttcatgctgctgataaagacatacccgagatggggcaattgacaaaagaaagaggtttaattgaacttacagttctatgtggctggggaggcctcacaatcatggtggaaggcaaggaggagcaagccacatcttatatggatggcagcaggcaaagagagagagcttgtgcaggggaactcttctttataaaaccatcacatctcatgggacttattcactatcaagagaacagcacaggaaagacctgcccccatgattcaattacctcccaccgggtccctcccacaacacaaagcctggctggaaaacctcccggatttactgaaatatgtgagcaggaaaacctaccggatttactgaaatatgtgagcagaaaaacctaccggatttactgaaatattgacaactcccttcttctcatagtggctcttagggattctggatcaacaggcaaagtatgtatgattatcattgtcttccccactacttctcacgcctccttctatgcagcaaaaacactcaaagataatgccacgaattacaagtgaagacgagtgctcttctcatgatttataacaatggaggatgtgacagaacatctccttttgagaaaaatgaacaagcactctaagttttacaagctgaaatgtgtccatgaatcagccaacaaccactgctttatagagccagagagaaagggagagagagaaagagaaagaagagctagaatggtttaggatttagaagtctgagtcctctgctgtcccatccaaaat

SEQ ID NO: 476834 - DNA, 1015 bp, Homo sapiens
tcaatgtccttgccgtggcaccatcatgtctttgctccatggagaagagatgaaaacgggagcctctttgctgcaaagccgatgaggccaagctcccaaagcgagaagcaaaacataggcaaggagcagcatctctcaccccggtacgatgcccgccctgttgcagggtctgggtttgctcacgatatgtctgctcggggtggatgacagctggagactggcttgggctgagagtataaagatggtcatcgtcatggccatagacatctgtgatttctgtgatgaccggcaggacaacattcaggagcagggctcttttccttgttttggtcacaagtcacgttggtggaagaggcgatggttgtctcatggctatgtactgaaaaaacttccaggattgtgcccccggccctggaattatgagctctcattaccagacagcttggtgttcaacagagagattatcttccagggagctaaattcttgaccatggtcacttcttacctagacccttcctaccctattgagcgctctggtctaaatgatcctgcagttcccagggtcctggatccaccccagacctgacatcaatgtctgaaggagactttttcctgcagaaaagcttttaaagagtggagacactgtaaacattgtggaataaatgaaagattgaattaatgaattgtagaccacgttggatacattaaaaatttgtgtttttttattttaatgttttaaaaattcatccctatcacatgtcagactacacatgcagtatgaggtagctgaaaaaaatacagtttctcagataaaagttttggtttagttaacgatagagtgagggttggagaacaatgccggagagacagtaggtgcttggtaaatatttatcatatttgccaagtgaaaaaagcctcagacacaggcagaaaagatgatgggggaggttcatgtagacctggtggatctgtgatatttgggggcatccatggggctcaggaagggagtttattt

SEQ ID NO: 476835 - DNA, 925 bp, Homo sapiens
gagaagctccttggtgaccgttctcagtaggtctgccctggcggaaagaagcccatcacggagctagacatgctgatagcaacgacgcaaccagaagcgacagaagccaaacggcagcactcaggcatttttgttactagcggcccgtttggaggggattccaagaaggccatgccctctgcagcagagaattacatgcctgttgacaaacagttcctggtgttctactgggttccagtggaaacagagcacctggccattagacacagactgacctcgcagagacaactgcagtgtttttcagtgaatgtgaacaatgactttgccaaaaatctttcacgatatccttgcacatctaggttttatgtggccattatctctgatgctgcgttgtgggcacatgtgccctcgattgctgaagcaggagacacagccagtggggactttgtgtgttacgatgtcaacctttatgttttcttcactagactgtgagctagtcaaggcagggactcactcatgaggcttatgtctttcccagtggagagtccaagccagtgtagatactcagtaaatatttccatagtgtcttagtctatttgggcagctataacaaaatactgttagttgtgtagcttataagcaacagaaatttatttttcacagttctggaggcttggatgttcaaggtcaacgcagatgtggtgtctggtgagggcctgctttctggctcatagacagcaccttctccctgtgtccttacatgatggcaggggtgaggaatctccatggagtctttataaaggcactaatcacattcatgagggccccaccctcacgatctaatcttctctcaaaggtcccatctcctaacaccatcacattggtgattaggtgtcaacttaggaatttgggggagacaaaaaca

SEQ ID NO: 476836 - DNA, 493 bp, Homo sapiens
aaaaagaggcagtgtctggagaaatgaggagaaacagaaagcacgaaggcacaaattgctcacagcaatgccttcacagtctccaccaggacaccctccagcccgcagctgactccttgctctgcaccaagacaccctccagcccgcggccagctccttgctctgcaccaagacatcctcaagcctgcagccagctccttgctctggaaaaaaagcaccacttaatgagactgactcctgccactggactcatctgctccactttatgccatgcagccaccttcaataacacagataagacctggtttgggggtttagatcccataaagcattcaattaatgtgatgtcaacatcaacagaactgtttacacatctggttgttgatggagtcattacgttcttctgccttagcaaaggcaagacctaactactggctcattctgtccccctgaatgtgtctgactttaagagaaaatcactcatcatgataac

SEQ ID NO: 476837 - DNA, 582 bp, Homo sapiens
cggagcaggctgcctgtgcatgtgcacacgtatgcgagcatgtgtctccccgagaacaccaggcccaccagctatggcttctccctccttccacctttctttcatggaagggctgtagagacccaaagcccaccctggtcctggcctcggctcccagacactccacaaacatctcccaagcctgttggcctcactgaacgtgggcccaaaccagtcataagaacacagcaggacccgtgcttgtctggagggctgggcaggcagggcagaggtttgacggtgggcgcccaagacgatgtgcctggcgatatttctcacgtagctccttccacatctccctgccgtggggctccttctttccctggacttctaagcacttcaggccttccctggccacctttaggaaggatgcagaaagtactactgaagtcaactaaatatcacttccataaatgacggggcacaggtttcctgaggatccactttccacactgtgcttatcctgtttcccggttctctgctcctttccaaattttggagtgacagcagcttgtgaaaaaaacaagacggccgggatcaccc

SEQ ID NO: 476838 - DNA, 537 bp, Homo sapiens
cattccactatttccgatccgttcctttgagaacaggaggacaacgggctcgggttgaagcagctgacccggtgctgggaatgagtgagaggaggcgcggcacctgccccggcccgcatggacgcaggcacattagatgccaagcagaggaaacgcaactttgcacttacaacaccgacggtttctcagtgcaggcccgagcacacgcacgccctggtcctcatgccctggtcctccctgcatctgcatgggtcagtcactgaactgctctggacccggcttctctgtctgctccaggggccatgccggcaaatgctcccagcagccagggagggctcgtactgcatgaaaaaaggtctgtttcttgggtccctagtccagagccaactcacaaaatgcttggggtccttgccctgtgctgatgctggggatatcacagatctggtctatgacattgcctggggaacgtaaccctgttaccccttagaaacccaactacggacacctctgcaaacttccgaacctcaaaactttgga

SEQ ID NO: 476839 - DNA, 993 bp, Homo sapiens
gggtggaggaggaggatgcttgcttttggtctctggtcctctagtagctagcacattgacgtgcctccgtttacccatctgtaagatggcgaagctacaagcaggtgacccttccacttttcatctgggacccctcccctgctccaatccagtcgtgatgtcaccagcgtggatgccccagggactccacaggttcagatgcccaccagttatctttctgctgccggagcccccaagcctgtgttctctcttttggtcaaaagcacaacatttctcaagtgttcagaacgagaagccaagctctgaagaccccccggtgtctctccctctgtccctaccacggtggtcttccacaaggctccctgcccagctatccctctaccgccaccgtctgtggggctgcgggacagccctgtggaaacaggggtgggggtcaggtctgcaccatgggagaaaggccgcccacggcagtgccatctgccttctcccacccactggttccccagtatgtaccccccacggcaacacggcacccagggaccatcaccatggactcattgcatcctgtctgtctgtcacccggacccctccttcctcctgaccggtgtgggctgggcaccttctatgcactcagcatggatcgaggcaccaaggatgcaaagctgtccctgaaaccaaacacctgcctggggtctgctccgcagggacgccttctgggagccctggatgtctctattccacatgcagaggctgcaggaccccacatgcaggtgtccctgaaatgggcttccttctgcagccgtgggaggagaacccagcagcggggacaggaaatggattcatcgctgagcagtcaaggatgctgatcttctgcccctggttctgatcctgacccaaattcccttgggacccccagagttgagttatgtgactgtttttggatgcataagaggggctaagaccaccagccaggccgtagagcactccgggtgt

SEQ ID NO: 476840 - DNA, 681 bp, Homo sapiens
acagcctctcctcttccagaaaattcacattttaatttgcagccatgagaataaggatagaatttctgggagcgtctcagtctctaagggagagggtccctctgcctgggtacctcaccctaggaactagaggaaaaatggccaccaacacagtgacacagcttgaagacataagcgctccagtgacaaaaattataaacacactcacaaataactcagtaagattaggaagcaatgatcccagtggaagacacaaatataaagtgaaaaatgggaggctggactttcaaaatgccatcagcccttctacaccacagcaaataaaaactctgagtgtctcaataatgaagaatcacagtatccaaaaacgaaaggcaattaaaataacaacggaagagaaaaagaaagttacaccagatgtgaagaaccgattctacaaaactgtcacacgaagagggcggaaagcgcgggaagaagtgtcaggaaggtgtgctgccgagggtgatgatagtgctcaaaaggtgattgtggtgatggctgcataactctgtgaatgttctagaaaccgctgaattgtacatcttaaaccaataagttgtgtggtgtgtgaattgtatctcaagaaagctgaatttttttttttttttttttttttactttttaaatgtttttgtttcaaac

SEQ ID NO: 476841 - DNA, 3050 bp, Homo sapiens
tggctgtgtcaggaaaggagaagtaggaagcagggagccctgttctgcctggctccacacaggtgaatgcagctgaggagcagctccacggctgcctctggccatccctgtggtccaagcagaccactcactggggaagcagcagcaatgtctgaaggaggcatgggtgcaaaggtgtcaacccctacgcatgacatctaccttatccatgagtgtccacttatatccatgagggtccaccccatctaccaggatgggggggcagcagccctgagaagagggggttcccaggcaacacagggctccctggattgccatgggccccctcaaagagtgaaggatgttgttgcctttaaggagctgtttcctcccctctgcaagccatggattcggcatggagccaagctggcggcactggagctgcttccaggtaccccctccacacccccaccatccatgggggagaggggtctccagtcccctcggggcatcctgggcccaccagcccccagagcattttgtgaggccgaccccaagcccacactgttgcttgatgcctacagctacaagccggtgctgtcatccctgttttactgacaaggagactgaggccagccagagagcagcagagctgggagccccacccagcctcacccctgagccagtgcactgacagggtgtcctcacccacaccaaggacagacaccggggtgccccgagaaacgaagtcacggataagtttttcttcttttttgattgttttaattttctaacttttctacagtgaaatcatcttatttctaagtaagaaaaatggcattttacatattttttaaattaaaagtggttttaatgacctggcgtaaaaccttttatcagacacataaatatgaagaaaaaaaaagagtccaaaatacaatgatgcatgtaatctaaactacgcaaaacaaatgctatatgtatatttaacacatacctgaacacacagctatcagaagataatatttcaaaatattaatgatgattttcttgggtgctgggatcatggttgtttgtttttccttttcatctttctgcagtttgtaaagattatgcaatgaacatttgttgctttaaaatcaggaagcaattatttctgttttgtgtgtggtagaatatgcagtacgtaacataaaactgtgtccaccgtttttaaatgtccgtcacagtggcactaagcacatcacactgtcgtgctctcatcaccaccatccctctccagaaattttctgtcaccccaaaccgaaactctgcacccactaagcaagaactcccctttcccctcctgctgtccgtggtaactacctttcttccacctgtctctctgcatttgactactctagggacctcttacacatggactcacacagcatttgcccttttgtgactggcttattgcatttatagtaatgtcctcaaggttcatccatgttgtagcctgtgtcagaatccccttcctttttaagggtgaataatattcctctgtgtgtgtgtgtgtgagtgagagacattttgtgtgtccattcttctgtgggtggacccgtgggttgtttccacctcttggctattgtgaacaatgctgctaggcacgtgggtgtgttacagaccctgctttcacttcttctcggtttatacccccagttggaattactgtattggatggtaattctgtgtttactgtttgaggaaccgcagctgttcccttttgtattctcaccagcaatgcatgaagtttccagtctctcctcaaaccttatcaacacttgttattctctggtgtttcgatcatagccatcttaatagatgtgagtggcagctcactgtggttttgatttgcgtttctccaatgactggtgatattgacatcttttcttgagtttattggccgtttgtattttttgttgttgttgagaaatgcctattcaagctctttgcccatttttaaaccggttctttgtttttgttgctgttgttgagtcccagagttctttacatatcttggatatttgtccctcatcaaatatatgatttgcaaatactttctgccatcccgtgggttcaaatttatctattttttcttgtgttgcctgcacttttggtgtgatatccaagaaattattgccaggcctagtgtcataaagctttttccctgttttcctctaacagttttatacttttagctcttacgttttggtcttcactccataacagttttgttggttaaacccccttccttcatttctgtctgtacctgacttttttctgtcaccaatacttagaagaatgaatgggctaattccccagtatctccgagcttgcgaatgaagaagcaaggtgtggctgcatttggtcttgccagggctgtggactgtcagacatagctggggtcctgtccctccgccctcacccacagccccagggccacatgctgtcaccacccctgggagtccacctgcatttccccacagctggacagggtcctattctctgcctcctctgccccacacttcagccttggtgcttctcttcagaggtcagttctaggcatttcacactgaagagggagtaaaacaatgctggtcagaaaggcagattcttcctaactcttcacttctggttaatatgataacatagagcccatcagaagcttggggacctggagcgctaatggaggtgagcgtgggcagtgtggcagacaaggaggggggtgtccttgaggccagagcagcccaggtgcaggcagaggagggaagcaagaagaacatgagcacaaaggccctcgctggctgcctggcagagagcaccggacatggcggcgcccacccaaagccacgcccctaccactggacgtgttgctgtagaagaggctgctgccccgggctttccagaccccctgccctgtggggcgtgtgccggcgggtgtgacatggtttggatctatgtccctgccccaatctcatgtggcgttgtgaccccagtgttggaggcggggcctggtgggagtgactgga

SEQ ID NO: 476842 - DNA, 1339 bp, Homo sapiens
tgtcataaccagcatgcacctggtggcccagcaggctctcacagccttccgtccctgggtggactctttcagacggctcctggtatgtggctcactcatgggacacagggaggcagctggggccgtgctgggtctctggttggtcctagctcaaggcacccatcgtagccatcaggtaacccctagacttgcaagccagtccagcccagctgacagccccctaagtaaccttcggcagatgcaccagagccctgaaaaggacttttgtgcttccatcagctctgaacctccaatcacagggaagcaggcactaatcaagtctttcagaagggaggtgctacacggagctagggaggagttgaacctagaggaacagctgaagagctgctggccctggaggagcagctggggaggagctggccctggaggagcagctggggaggagctggccctggagaagcagctggggaggagctggccctggaggagcaactggggagaagctggtccctggaggagcagctggggaggagctgtccctggaggagcagctggggaggagctgccctggaggagcagctggggaggagctgtccctggaggagcagctggggaggagctgtccctggaggagcagctggggaggagctgtccctggaggagcagctggggaggagctgtccctggaggagcagctggggaggagctgtccctggaggagcagctggggaggagctgccctggaggagcagctggggagaagctggtccctggaggagcagctggggagaagatgtccctggaggagcagctggggagaagatgtccctggaggagcagctggggaagggctggtcctggaggagcagctggggagaagccgcccctggaggagctgacctcggaggagggcatgggctgaggtagggaagaggagagttggggagatgatgggagcaatgttgggactgagctcaggtggaagctctggagctggggaaaagggtggactcctggaaggcctgctagctacagccattctctgagaagccccctcacaggtcgtgggggaaggagggaggaacatggcctcttgcctttaatggctctcccaggtcagtatgagcacacaggggggtgttgagtagcatggactggcagtacaataggaatcagaagggaaactgaggtctgaggctgtggagctgtggggcaagggtgggggagaagaaggggcattctgagcaatctgggggtgaggcttctgggtggggtctttggggtggggagggcacctgccctggctccactgtgtcctgaaaaccactgagagcaattt

SEQ ID NO: 476843 - DNA, 940 bp, Homo sapiens
agaccagcacagcgtgatcaatactttgagtgatcccaggtcaccctgcagaggagtgggctatgagaggagtaacagcatcagcccagctctggatgagcccagcccggtaccttcagagaggaacacgttcatccccaccaccaccaccaagtgctggtgaaaatggagagccctgggatgaaaagtccatgactcaagtccgccgcggcgtactgccttctgggtgctcagagctctccaagccttatctcctccaaccgtcacagcacacttggagcagcgccactttacagacggcatccgagagctttagaaaagttaactcaccccttgtcaaatggctcttcattgtggagcccggctttgcactgggacagtcggactgcagagctgctcctctaaaccctagaggaggaacgttaagcagagaggacttgggtgtgcagccaccattccaggggtgcagagagaatgtggaatactcatctctagtcacgagaagcttaactacctggtggaattaccagccaggcacgcacgaaacagttaagccataatgtaaggtggcaggtaacaaaatgtgaacatgaacgataaagtgggtccgaccagacacctccagcccaggatcaacttctgctatgatgccagtcctcagcgagagctctgtgatgggccgccttctggctcccatccttccccacctgcatccgtgccttctgccatggaactctgcatccctctttctaaaatggttgagccaatttcctttactcttgggtctgaaatcagtgataggatgtgttttggatcatacagcagttcacagaaacatggcctgtggatccccgagggtccccaagcattctctggggatccatgatgtaaaaattatttttgcaataacacctagatgtcgtgtacctttttcactgtt

SEQ ID NO: 476844 - DNA, 662 bp, Homo sapiens
tgctcacctctccctggacaccagcatcccatctgagcctggggtactggaaggtgccattttactggtcagagcttgtaggagcagaacgggcccaggtgtggtcttcatggagcttgagaactgggtgctgctagtgtttacttcatccagggcagcttctgcaggaatgaagatgggaaactggctgtccccaacaaatcaggctgactgccggtccagtctttgtttgcaactttgtaacttcactctagcctctgaatggttgctatccacagcctgtcagactgatggctggttaccacctcatttacatgagctggcgcacggcaagaacactatcgccagcgcgattccaaactcgtggttccgatcaaaacgctcttctgctaacatgggccgctttgatcttcctgaaaagaagggctctaagattttcgtaaaatgtcctgtcctctaacaaaatgaaacttccccactgcttgttagtatctttccttgatctaatcagtaaggaaacgaagagcttgtttttcatggcttgctttctaaattttcttgttttagcacattcagaattcctgtagaatagaatagcttcaaaaaccttttaattatttggaaaagaatctatgcttataattgaatattttaaaaatata

SEQ ID NO: 476845 - DNA, 1857 bp, Homo sapiens
atggggaatgggtggagagagttggctaagcctgatatgaaacctctctctctttaaaaaatcgatatgacttcataccttaccacacgcacgtattactttcctgtcatgaaaatgggaacattcagcggccagctgggagtgctgctcctggcaatggaagatgaagtcgtcaaacagaccacagtcacactgccgctgagcacagaacgtgatggctgtgactgcggccccagaacatatgaagggagcaatggagctggaaaatcacctgatgctctgtgctctggcagccaaagagcatcagaggatcaaggtgggaaagcaagaccgagggtttcgcccccgggtgcttctgtgctgaagcactgtcccctgtcctgccacaatgaagacatcgccttagaaggaaacgcggcgtggtccatctgcctcagaggcttagcaaatgcaaatgatggtgatgatcattgctgtgactactggcgtagtgctaattgccattgtcatcgtcaccatcatcaccaccatcatcatcatcaccatcatcattgccacctcctcatcatcattatcaccatcatcaccatcatcatcatcatcaccatcatcaccaccatcatcatcatcatcaccatcatcattgccacctcctcatcatcattatcaccatcatcaccaccatcatcatcattatcaccatcatcaccaccatcatcatcattatcaccatcatcaccaccatcatcatcattatcaccatcatcaccaccatcatcattatcaccatcatcattgccacctcctcatcatcactgtgtagtcctcctcctcatcatcatcactgtgtagtcctcctcatcatcactgtgtagtcctcctcctcctcatcatcactgtgtagtcctcctccctctcctcctcctcgtcatcactgtgtactcctcctcctcatcatcataatcactgtgtagtcctcctccttctcctcctcctcatcatcactgtgtagtcctcctcctcctcatcgtcactgtgtagtcctcctcctcctcatcatcactgtgtagtcctcctcctcctcatcactgtgtactcctcctcatcatcatcataatcactgtgtagtcctcctccttctcctcctcctcatcatcactgtgtagtcctcctcctcatcatcatcactgtgtagtcctcctccctctcctcctcctcgtcatcactgtgtactcctcctcataatcatcataatcactgtgtagtcctcctccttctcctcctcctcatcactgtgtagtcctcctcctcatcactgtgtagtcctcctccttctcctcctcctcatcactgtgtagtcctcctccttctcctcctcctcatcactgtgtagtcctcctccttctcctcctcatgatcatcaccgtgtagtcctcctcctcctcatcactgtgtagtcctcctcatcactgtgtagtcctcctcctcctcactgtgtagtcctcctcctcatcgtcactgtgtactcctcctcatcatcatcataattgccgtgtagtcctcgtccttctcctcctcctcatcactgtgtagtcctcctcctcctcatcactgtgtagccctcctcctcatcatcacttgtgtagtgctcctactcctcttcctccttctcctcatcatgatgacttgcatagtgctcctccttatcatcactactgttgtcatcatcagcagcatggtacccctcctcctcctcttcctcacggagtgctcatcatcatcatcattgttgtcatcagtatcatcatgctgccccttcttctcctcttcctcacttatggagtgcttctcatcatc

SEQ ID NO: 476846 - DNA, 623 bp, Homo sapiens
aagtttgaagctcctgtgagccatgaacatgcctaggggacagagtgagatcctgtctgaaaaacaaacaaaaagccaaacagaacttgggaccttccagattcgattccctcccatttggtgctctctgtctgctccctcctcttccaaatccactgaatccaaaacttataatgttgtaattattgatctgggtggtggttatacaagagtatgggatgaggctctggcaaattccctcccctgcagagaactatcttgtgatggagaagcatgtgaggataattcacaacgaagagaatctttcctggatctttgctatgagaacctgatgaagttctggagtgacatgcaattagaggaggaagaatgcatgtcagatattgggcagccagtggcacggacaggattgacatttgacagcctgaccaatcataaatgcaaagatgatagtttctagagctgctatccattgctgcctatttatgctcaatttagcagtgttgacaaataataattgtttatatttattgggtaaatatttttatgtcaacttttattttagattcagagggtatattgcaggtttttcatgagcactaatggtctatagatttagcctc

SEQ ID NO: 476847 - DNA, 856 bp, Homo sapiens
acctgggtgatggaatcatttcctactacacatctaggttatatggtacagcctactgctcctaggctgcaaacctgtgcagcgtattactgtactgaatactgcaggcaattgcaagacaatgagacgatatggaggggaaacacctggcttcagtacactgacaccaggacccatgacagaattcatatactccacgtggggcagaaaaagagccccccttctctctgtgaggagaaattggagatgaatgataaagaagagaaagaggaaagtgacatgggagcccaggaatcctcaaccttggataaggatggtgtaactaccgccctaagaagagggggagaccaggccacttgcacagatttaaatttcaagctggccagggcttccagtacgttattgaatagaagtgatgagagcgggtatccttgcttcataccaggtcttacaggaaaaactttcaatttttacctgttgatatagctatctcattctctttcagtttccatttgcatggaatatccttttccatcccttcactttcaatctatgtatgtccttataggtaaggtgagtcttttataggcagcatatattttgattttaaaaatttaacctatttacattcaagataattattgatagaaatgatttttctcaaaatacacaaatgtatttttatttatagttcttttactgtaaagaaaaaaagacttttagactcttgatgataattcacccgatttaacatgattctctatgaccttatttatatttgacaagttagaatgttaagaaaatatttgaacagttcagcaatttatctccatcaacatgagccttttataggtgc

SEQ ID NO: 476848 - DNA, 948 bp, Homo sapiens
tgtggtgtttggttttctgtccctggagcaaaatcaacatgtaactcagagcagcagtcaccgaaatgtccctggccagcatccttccacctgtccacaagcatggggagcatctttgtcaacctcttcgaaagcatttttggcaaaaaagaaatgcacatcctcatcgtggtcctcagtgctgcagggaaaacaacaatcctatataagctgaagctgagtgacatcatgaccaccatccctaccataggcttcaatgtggaaaccatggagtacaggaacatcagcttaaccatgtggaacatgggcagccaagaaaacatctggcctctgtggcaccactacttccagaatacacaaggactgatcttcgtagtggacagcaatgatagaaagtgtggaaaggaggcctgggaggagctctttaggatgctggctgaggatgagctctgggtgcagtcctcctggtgtttgccaacaagcagggcctccccaatgccaggaatgcagccaagatcacagacaagctggggctgcattacctgtgccacaggaactggtgcatttaggccacctatgccattagtggagacaggctctgtgaaggactggactggctgtccaatcaactctggaaccagaagtgaatgcaacaccctctcgctctcattgctcctcttccccttcactttatcctcatgtggcaaatgtgcagctctgtggtgtgagtgccagaacctgcttccctggttctttgtagtcaagcccctggtttgtgccacttaagagtggaccctttgggaaatgtgtgtgcatatttgggggtgtctcctctatgcctctttcttttctgaaatatcatctctcagtttccagctactctacaacctggaacttcatgctttgatcctgaaaaccaataagactgcttaattttttagccacctt

SEQ ID NO: 476849 - DNA, 1661 bp, Homo sapiens
ctcctcacttccaagacggtggggtggccgggcagaggcactgctcacttcccagaccatggggcggccgggccaaaggggagtggccagagaggacagcatgagtgggaagtgtgcaaaggaccttcagagtggggaatggggagaaacaggtcaacctcccaggacaggcaaggcaagacatccctggtttgaggggttgaggcttccgggacaggcaaggcaagacaccgctggagcagaagtcactggaaaagatcctataggcttctttaaggtgtgctttgttctcccttctccacctcctacagctgccccttttccaaacctacgaagtcaaactatgactcgccttatgccaagtgacaaaagcaaggtctcagtagtaaaaataggaaacctaaggcaaaccatagccattgaaacggggtataaagccgtaaatgcctggttaaaatggattaaatattccgtccatacgttaaacaaaggcaattgttatgcttgtgtgcacagcaggccagaggcccagattgtcccctttccactagggtggtcctccagtcgaccgggtgtgggctgcatggtagctcttttccaggattctgcagcctgaggaattttatagtttcagatctgatattaagatctttaatccattttgagttaatttttataggtggtatcagatgcaaatttttgacatatttatttaaaaatcactcacattgcctgacatatacttatttatgcgtagaaaaaattttgactatgaggcatctgagaaaataaagaaaacaccaaacaaataaaaccaggtatccacagaggttatctatccatgaatacctcacatattcccttctaaatttttagatgtgtcaaatcagcagtgttatttatttatatattaatttatattccctgtattccaaaaaggattttaagcaagctattttacagctctctgaattatagagagctgataacaatgcaaaataattcccacgtatagacctgtaaattctgtcagttggaggtttccttgccttcccaccttcactgaggaagacgccatttttgctttcatttacaccttcagttcagtattcctgactataactgtgtcttttttttttttttacgacgtccattgatctggttgtaataccttgccagtttcctaattaatgagttaaataaaattgttagcctgttttcattttatatatgtatgagagtcatgatcttacctgttttgttagaatgatattttagcaacatgctcaatattcgactgactccataatttctttttctgctggaaatagaatttcagtgactctgagaaatatccaccagttctaaacatttctgaaatctcaacagaggtagctaatatactacagtacttacatatttaaataaattctaactaagagactaacatttttctgaatagtcttgaagttagaggaaagttttgaacagtggaactcaagaagacttctcagttcttggaaatgaacttccattagtacacaaccagctaggtatcttcctgttagaaatgaaagtgtgatgggcagtctttagtaccagcttagccagttttccctagtcttaaaatttgattcaggcttagtttgggcttaatttca

SEQ ID NO: 476850 - DNA, 686 bp, Homo sapiens
aaccaccactctaccctttgctctatgaattcgagtgttttagaatccacatatatgtgtttattgttacaagcgtcttcctcagaactacttttgcagcatccaataagtttaggaaggtgtgggaacgccagttgggtggggtacagcagctctggtttcagagagtgtgctgtggtgtactcttcatgcagctctatcattgaggtcagcactggggacaactctaggagtcctagacagccaaggctacagatatctgaagttatggcagcagcagcaaaggctgttgggatccttggcggcaaagacttctgggatctccctgttagctctttttcctctagggaaagaagtcctaaccgaggggatccttcttggtgccaggtctggtatggcctgcaggcagttgcagcagcactgggttctggggaggtggacgttgcagtgagcaaagattgcaccactgccatctatcctgggtgacagagcaagactccgtctaaaaaaaaaaaaaaaaaaaaaaaaaatttgtctattaagccactatgatttgggggtttttacttcggcatagcctgggctaccttgattaatgtgtacaccatgaaatactatcatttgttagcagcaacagattagaaacatacatagcctcatggatagatcttaaaaccacagtgctt

SEQ ID NO: 476851 - DNA, 860 bp, Homo sapiens
aggggtggaaccactgggaaatgtgtatgaacagcactcatcaaccatcacgtttttatttggcattagctccatgccccgtgaagtgccaggtacagactgagattcatttaaaaaatagaaagcatggtcctgtaaataatttgcaactaaccagggagatacacttacactggagaactgaagaacagctacaagtacgcactgtaagtaggaaagttctacagcttccctggcttcctcccactctcagccctgcaagctcacccaagccgagcagcccactggctgtacctcaaacgtgccaagcgactcctacctcaggggcttctcctggttattcctgtgtcctggaaaaaccttctgccagaccttcccaatactccctgcctctcttccacccattctctgcttcaattccccttcgcagagaggcctccccagtcactgtctctaaaacactcagcaaacttgcatgcaatgtgagccgtgtggcaatccaatacaggggcatagccggtgcttatttggcctggatggttcaggataatcacctgagcagtgaagcccgctgcttccattggtgggtcatttttgctgtcaccagcgacgttgccacgacgaacatccttgacagacacattcttgacattgaagcccacattgtccccaggaagagcttcactcaaagcttcatggtgcatttcgacagattttacttccgttcttcaacctcacacaaatcatattgatccggtatcccatgtttatgttcacactctggaaacatgtactactactgccacctatatctacgatacttagtgtaattgctggtttatatgtctgtctccttgagg

SEQ ID NO: 476852 - DNA, 931 bp, Homo sapiens
cttaaggttgtggtagattattaagtttgtgctcagcatgaggacacgggagagaccagcatgctaaaaagacctgtgcttttgcatttgcagcaaacagcccatgctgatgaatttgactgcccttcagaacttcagcacgcacaggaactctttccacagtggcacttgccaattaaaatagctgctgttatggcatctctgacttttctttacactcttctgagggaagtaattcaccctttagcaacttcccatcaacaatatttttataaaattccaatcctggtcatcaacaaagtcttgccaatggtttccatcactctcttggcattggtttacctaccaggtgtgatagcagcaattgtccaagttcataatggaaccaagtataagaagtttccacattggttggataagtggatgttaacaagaaagcagtttgggcttctcagtttgttttttgctgtactgcatgcaatttatactctgtcttacgcaatgaggcgatcctacagatacaagttgctaaactgggcatatcaacaggtccaacaaaataaagaagatgcctggattgagcatgatgtttggagaatggagatttatgtgtctctgggaattgtgggactggcaatactggctctgttggctgtgacatctattccatctgtgagtgactctttgacatggagagaatttcactatattcaggaaaccagtcctgtgggcttggggcacaccctgatgacttcaggtgaacttgatcatctgcaaagaccctatctcccagtaaggtcacagtcacagggttagacctgtgatcatggtgacattttagaaaactctccagtgaatcagatgtaaatttctgagagcagagatcatgtcctcatctttatgtttttattgtttagaaacagggtcttgg

SEQ ID NO: 476853 - DNA, 806 bp, Homo sapiens
gaggatgagaaccactgaagtcagggtctttactgctttatcatctctagcatgtaggcctgaagttaaatgatcatgggacatctatacatatttgaatgtaaatatatagcctcggggatgggcactagtcagtcccaggcaggtttttggcagcggaacgggactttactttcctgctggatcctgtctgccatcaccaccatcacagctccagactgcaactcctggtgtgatctagcctacagaggcactcgggagtctgtggaacctctagcctggagtgatgcaggaactatcaccatgggtcccagccctaacttcacaatcatctatggagcaaaaatataccatcttaaaacagaatccagtcttccagaactaccaggctggtgtgagttgcagtttcttctccttgcaaaacatctgaagaaaatctcagtgttcctgctccattataatctcatggtactgccatcatatatgcagtccattgttgtctgaacatcattatgcaatgcgtgactgtatttattcctctcaggtatacaaataatttccaaatttttaacctaagcccctgtgaggatacatatttatcagctagaatatagtgtttgtgtgcaggtctttgtctttagcctcatcgtatcaaatcaaaacacttccaaaagtgttttgataggtgataaatggtaggcagtgtcttatgttaggtgtatattcaactttttaaaaagctgccaaatgattttccaaagtggctgtaccattttgcatttccaccagcagtatatgagaattcc

SEQ ID NO: 476854 - DNA, 731 bp, Homo sapiens
gtttgtcgtcttgacttcttgcatctggcagttggagaagcagtgcgtatgactttgttggccatgggagagctcaggatgctgttccttgggaagggaacccaacaacaacaagggaagaaaacgtgggggagtttctcgggacaggaaatacctgagcagaaccttaaaagatgggttgaaaattgtcaggtgtcctatccttcccaaggaaggcggtacagacacggaaagccggcttcctgtccccttcctgtccctggaggggccctctgccagaaccctgggatgcttatctgggctctgcagatctttggaatgaggtcatccaggaagttgaatccctttgatgcaattatctctgcatccttggccttttgttctcatggagattctagaggcttggaagttcaaaatcaaggcacaagcagatttggtgtctggcgaggatctacttctcatagacagccatcttctcactctaaccttacatggcagaagggttttgaatgaggtaatcacattctttaagcagcaggaaacagctttcttcacgttccttgagaaaaacgtggctgttgagagaagctctcaagtcctcaaggatccaggtatgcctacaagccatgcaagagcatgaaggaaaaatcaatcttatgtgaagaactgagagcagaagccatgatatgccgggaaagttttaataaccagctctctggaagaacaaagcc

SEQ ID NO: 476855 - DNA, 648 bp, Homo sapiens
aaacaaacaaacaaaaaagaaagaatgtcagagagcaggggtccccaacccggtactagtccatggcgtgttaggaaccggccgcacagcaggagaatggttaaaatgacaaatagtgacaacactgaatgcaggagaggacgcatttggagaaggacattgggatcccggagactggatcactcatatattttagttggaatgaaggaggaagggatgtgggaggaaggtggatgtggctatagagggcaacagggggaacttcatgtcctccttgcggtggtgcatggacaaacctacacaggtggtgcccacgacagacaagtaaaactggagaaatctgactcaagtgatgtggatgctgctgatcttgccacactttgcaagccactgagctgtactagagcaatgattcttgaatatgcctgcccattagaatctgctggaagcttaaaggactaaataaacccataactgcctcacttccataggtgttctgttatcacaaatgggatccagccttatgactcgtgtacaaacacttgattattgcaaataaagaaggataagtctgtaacaactttggaaattctgcaaagcctggaaagttgtgtttttcttctctcaggaatatgatattactatatt

SEQ ID NO: 476856 - DNA, 626 bp, Homo sapiens
gctttaattgttttaaattgtggccccctctacattcagagccatgtttccagatagacctctcatgctgggagtggacagtgccttatgtggcaaaagccctggtaccttgacaatcccagcccagtgcttgttgaaccaggacacccagaaattacgcgtgacacttccaagcgaaacctttaaaagccagtacacaatttacaacactcccttttctcctacttccgtaattgaggaagtcagtgttgagatggtcccctgtcatcctggatccctgatggctacaatgagtgacgtttccctgctgacccgtgccaggcagctctctgacagcagttcagaggtggatttggaatgtgggggcacagggcagaaaaccagttacaggagcaattgtgaagtaggcccagcagggataaggtgtgaccgagacagtagcggcaatggagagagggtcagagcctgagacatttaagagagaaactttttgaaggatcatcccattcttatatatgagtataatctaacctttctgaggatacaaaacaaagattttaaaaatgtttcttctactgtctgttatttccttttttggtgagcttatttttcctattggtttggtc

SEQ ID NO: 476857 - DNA, 801 bp, Homo sapiens
gtcaagtgccgccaaagtgggagcccaggcagaggaggcaccaagagtgagagagggctgcaatctgcgtgatacgcagtaaatcctcctgctctggcagctccactagtgtggtgggagaacaagatcaattctcccccggcctcacaaaagatccttcattgctgattgctacgaaaccagaggagaagcttaatgaaggagacgctggaacctgacagcagtattggaaatgaatatggagaaaatgaaaatattatgcaccaaattggcagaaccgaagacggagtgactattagtggacacaaacatagagtgtgcctgagtgttttctcaggccagctggtgactgcagaatatccgcgtgaggaagtagcattcttgcaaatggacagtaaggcgtccactgcaaataagaagttcctacaaaatgatgaaatacgatcccttcaaccatacctccacctatgccccactggagcaggtagcagacccaaatttggaaattggaagaagtttcatacagggactgtttacaaagatatcatcaaagtaaaggacaccacaagactagtgaccctagaactgttaccaccccttggcttcaaccagcaaggggaggaaggggtttactgccagagggagctgtgtggaaaaggtagcctgatgggagccatgaccaaggcactgtgccagggaggggccaggaactaaatacttcaattactctccactctccctccattctcttattggtgcttcccactgggcaaacccaactagacccagagagtaaggaag

SEQ ID NO: 476858 - DNA, 593 bp, Homo sapiens
tgatgcgggatgggtggatggagattttctgcagcattcctgataggaggctgtctagcaactgcttcagagtctctggcccagcatttgctgaggttctattatgcctgcatcatggtcctggcaatagccttaaagtttgcaatatacttatttttactaatctatatccactttcacatgacaccgtacctcttggatgctttgcaattttcttcctgcaaaatgaatataatgtaccagacagtagaaactggtaaacatataagtcagagtcttctgaaagaaatatcatcttgtggctctttcagccataagccagatattatccttcagccctgctggaaaccatcagatcacgtgaaacttattcactattatgagaaaaacatgagaaaatccaacccccttgattcaattacctttcatccggtccccccacccatgacatatggaaattattacaattcaagctccacctgggtacatttcagagatgcagactctgagaccccacttcagacctattgaattggactctgcattttaatgagaacgtctagtaatttgtatgcatattaaggttcaagaag

SEQ ID NO: 476859 - DNA, 892 bp, Homo sapiens
ggaagttgcgcccttttagttgttgttgaaaattgccctcttccctaaatcgatatgacctttcagctctagtgctcaccacccctgttggcaaaaacttctatgccttttagctcaaattctgactctaaatatttactgacctcaaaagcaaatccaacaaaaacaaaacttgacaactgggacctaattaaactaaaaagcttctgcacagcacaagaaactatcaacagcgtaaacagacagctgacagaatgggagacaatatttgcaaactatgcatctgacaaaggactgatattcagattctatgtggaacttaaacaaatcaacaagaaaaaacccccagataaccccattaaaaagggggcaaaggacataaacaggaactttttgaaagaagacatacaaagtcatcaagacaaagagtattggagatttgtccttgtgcaagaaatgtctccaaatcttacagttatcaaataaattaactttataaacataatatcactattaacaagttataatgctcaaataaacattagcaaaccctcaataatatgaacctagttttagtcagccatgcttgctatcaaaaatgatattacaaatttaaaaatcatttcaaaaggcaatcaagatttatgtggccaaaaaattggaggttaaaaatgtattacaaaggggtgtcaggtagttaagaaataaacatatctgttcttttcctggttttgttatatttgtctatttttaaaatttgtaattggtagtgtgctcttccttcattctaaataaataatcactttgtactgaatctggtgtttataattttagattatttttcttaaagaaggcttttcaaattgtataagctacaggatccacaaaacct

SEQ ID NO: 476860 - DNA, 1879 bp, Homo sapiens
tagttcatgatacttaatttagcagttgtggcccattggaggtcatgccctgccatacggagactggagactgtggaggggtggctgtctggtcagaaactgaagtaactcaagaatggaaaaccaaacatcgtatgttctcactcataagaccgggttgtggagagaggaatttgtctttccttgtggctgtggaaatggctgctaagttcacgtcggaaactgtgatgcctttgtgcaaagaactggttctccgtaccatgcagggctggggcaacctctgcattgttgacttaaggttcacagaattcgctgcctgccagggctgtgtcctggctgcctcccaggtcattgaaatgcccagcagagataccaccataagcttcctgacttaaacactttaccttcctagaagcaaccaatacacttttagggactgagctcttagtaaactcatcattacccatcatgccccagttgagaaaattccagggaaatgtagaaaattctaggaaaataaaaaaaaaatgcgaaaaagtgggaaaaaactaacatttgttgagtttctcttcagtgcctgggattaaacatatgtcattctactaaaggtttacaactaccttctgaaaaagatatgtattttatatatattttatatagtatatatattttatatagtatatatattttatatataatatatatattttatatatattatatgtattttatatatattatatatattttatatatattatatatattttttatatatttattttatgtatattatatatattttatatatattatatgtattttatatatataatatatgtattttatatataatatatgttttatatattatgtatgttttatatatattttatatgtattatatatgatatatatattatatattatatattatatattatatatattttatataatatatattttatatataatatatataataaatataatatatattatatatattattattataaatataatatatattaattatattattattataaatataatatatattatatattattattataaatataatatatattatatattattataaatataatatatattatattataaatataatatatattatatatattattataaatataatatatattatatatattattataaatataatatatattatatatattattataaatataatatatattttatatatattattattataaatataatatatattttatatatattattattataaatataatatatattttatatatataattattataaatatatatattttataatgtataatatatattatatataaaatatatataatatatattttatatatattatatatattttatatataatatatataatatatattttatatttattatatagataatatatattttatatattttatatattttatatataatatatattttatatatatttatatgtaatatatattttatatatattttatatatattttatatataatacatattttatacatattttatatattatatattttttatatattttatatatataatatatattttatatatataatatatatattatatatataatatatataatatatattttatatatattatatatattatatgtatatattatatatataggttctaagacttatccagatgttagttttcaatgtctcatttgccactagtttcactgtgtttgcacgcttcttgtaacatttttgaaaattttgaaaactttctgtaaatgtcttggcactaaaaaaaggtaatagtaaaataaaataaaatgtata

SEQ ID NO: 476861 - DNA, 708 bp, Homo sapiens
gaaaattcagagacaccagcaaccacagaggcctaagtgcatgttacagcttgtcacagctctggatcaggaaatcccaagacctgggcccccagaaggtttaccgctcttccactgtagtccagcaaatgagagcgtgtcaccacctgcttcttggcgagccagccaggaacttgttacagcccttttcactcttgtcattcagcaggctgtgggttcttgtcccgtgaccaagaataaggttatgtggacaaccagagaagaagagataaataaatcctatcagttctctttctctggagaactgattgacacaggagaggaagtggccccagtggtaaacaactttgcattaaaggaactctcagagatatttcccaagattgaaagcacaaagaatagaacattggaagctgattcaatcttactcagcagtatgacagttcaccaaaatgttcactctgttgttcacatagttgtacaaacaggagaaggcaagcactgctaaaactactcttgatacatatttcacaaagaaagattttagttcccaatatttcaattacttaaaatttcagtgtatgaaatattttcttatttttaaatttttctatacatttataattgacaaaaagaaagttagttcaaccattgtggaagacagtgtggtaattcctcaaggatctacagaatcagaaataccatttg

SEQ ID NO: 476862 - DNA, 1461 bp, Homo sapiens
gacaaacaaagctgagggcattcaggaccactaggcctgcgtccagcgaggcctcccgtggcgtcagcatgttcatgtggaggaatgtggaacctcgctctgtggctgtgttcccctggtactctgtccccttcctgacccctccctgcagccacacgaggcccggcaacctgccagtcactcagtggcctccaaccagagcaaacaacctgccaagttggcagctgttgctcatgagcgtccaccaggcccagtccctcagtgcactgcgcaaggaacaggactcatcttctaagaaggatggacacagccccaacaaatgggacaaggaccacatccggtggcccatgagtggtggtcatgagcttcagcaagcggcaccaggctctggcagagcgcaccagggtcaccccaaccaggataactggaccgtcagccagatcctgagcaagcggtggtacaccctggggcccaatgagacacagaagtaccacgacctggccttccaagtgaagcacatggccagtgaggacacagcgagtgacgaggagcccatggtcatccatgaggaggagggggtgacgatgtcattgctgatgatggctttagcaccactgacactgatctcaagttcaaggagtgggagccttcaaagcccaggagtctggtcagggcagcagagccggccccctgtggcccctacccctggggacgggggcccagggatgccttccaaggcgacctgtttcctcccaatggatcctgccaccttctggtgcaagagacctgaaagtgtgggcgacctggagctaccaggcccctcagtcatcacggtgggagaagctgaggacgggctcagggaactggagaccgagaaggcggtgtcctcttcactgcatgtgccctggaccagtgccggccctgatcatgcagctcttccaggcccactgcttcttcctgtccactaggccacagccgccctccaggcccactatgcacacatcctcccctccaaggtttcttctgcccctgccctgactcccagccctgtgggggtcctgaccccacctcacctggctcagactctgacgctgccctggatgccccaccactgcctctgcccgagagtcacccctgtctgaccccacctcaccctgctcaggctctggtgcaaccctggctgccctgccactgcctctgccccagagttgggaccttgacagcctggctggaaggggacaccccagccctgcctcaacacctgggggtctccataactacgacaggcagcccctgtacataccatgaagtgtgggaccttcagagcttttcactttttggaaaatagctcctgctggggctacaagatggagtgtgaggagggccttgggccacagggaggtgcctgtggactagggggagttcatgtaccccttctttccccagaggggctggactcag

SEQ ID NO: 476863 - DNA, 710 bp, Homo sapiens
aggcttccagaataacccactgggaactgctggtgtccaaattaaagccactgccagcagacacgcccaagtccctggtgctccacgtgccacggcatgcatgtgtccacagtcttgctcatgggcacttgggcaggaggctctgcgcccgctatgaagcgcaccacggtcactcagtacagcacgtgtgcgctgcttactgccctgtgcctgctgctgcctgtgctgcaggaaacagcccagagtcgaaggatggtcaccagccacccggaagaccgtcctgctctggcacgcaaacacggagcatcgcaaccggccggcctcggctttccaagaactcagactgtcactcccgccttcacattccagaccccaacagcagctgagcccgcacttctgagcgcgtggctgggtagagctccagaaactgagacaatcacagacatggcagaaaccgtggatggtgcggaaccccgtatatgctatgctttttcctgcccatacgtgccacacagcttggacatgctggacaaaggaatgactcacgtcccaggctggacacagcaggacgatcagacttcatcatgctactacccagaagagtatgcaatctgaaacttacaaattgtttatttctggagtttctcatctaatattttcagatcacagttgactatgggtaattaaaacctaggaaagtggaagcatgg

SEQ ID NO: 476864 - DNA, 470 bp, Homo sapiens
agacaagctaagaatgggtgtgctccagagtgcaccttccaaccacaagggctccgaggaagctcctgcacaccagcgcagccagcaaaacactctgcttcacacaatgttacaccaccgtctactactgtgcaaatgttctgagtctacatttccagctatgaaatttcagctcattaaatttaccctttcaagattctggtatcctaatgacgcaggccaacatatctggcagtctctgttccagcctttgaactgggatttacaccaccacctcccctggttctcaggccttcagagtcagactggaattataccactggttttcctgggtccccagttgtactctgcaaatcatgtgaccctgactaatgtattttataaactactttttgtgcatataatattcatgtccccaaggtcaatattagctctgtggggcagacagtatatttcagatacataggctg

SEQ ID NO: 476865 - DNA, 1302 bp, Homo sapiens
acagctccggtctacagctcccagcatgatcaatgcggaagacgggtgatttctgaatttccaactgaggtacttggtttatctcactgggactggttggacagtgggtgcagctcacggagtgtgagccaaagcagggcagggcatcacgtcacctgggaagcgcaaggggttgggggatttccctttcctagccaagggaagccgtgacagatggacagacggtacctggaatatcgggacactcccgccataacactgtgcttttccaacagtcttagcaaacggcacaccaggagattatatcccacacatggctcagtaggtcccatgcccacggagcattgctcactgctagcacagcagtccgagatcaaactgtgaggtggcagccaagctgcaggaggggcgtctgccattgctgaggcttgaccaggtaaacaaagcggctgggaagtttgaactgggtggagcccaccacagctcgaggcctgcctgcctctgtagactccacctctgggggcaaggcttagctgaacaaaaggcagtagaaacttctgcagacttaaatgtccctgtctgacagctctgaagagagcagtggttctcccagcatggagtttgagctctaaaaatggacagactgcctcctcaagtgggtctctgacctcctcagtagcctaactgggagacatctcccagtaggggcctacagacacctcatatagcagggtgcccctctgagatgaagcttccagaggaaggatcaggcagcaatatttgctgttctgcaatatttgctgttctgcagcctccgctggtgacacgcaggcaaacagggtctggagaggacctccagcaaactccaacagacctgcagctgagggtcctaactgttagaaggaaaactaacaaacagaaaggaatagcatcaacatcaacaaaaaggacatccacaccaaaaccccatctgtatgtcaccatcatcaaagaccaaagctcctcgccagcaacggaacaaagctggacggagaatgactttgacgagatgacagaagtaggcttcaaaaacttggtaataacaaacttctccgagctaaaggaggacattcgaacccatcgcaaggaagctaaaaaccttgaaaaaagattagatgaatggctaactagaataaacagtgtagagaccttaaatgacctgatggagctgaaaaccatggcacgagaactacgtgacacatgcacaagcttcagtagctgaattcgttcaagtggaagaaagggtatcagtgattgagtatc

SEQ ID NO: 476866 - DNA, 641 bp, Homo sapiens
ctcggaaggggcagggctcccacttgtccccatcctgccaactctagggagcatacaaccccggccacatctctcccctgcagctggcatgatggcagcagccgctgccatcacaatcatagcttattgtagcctcaaactcctgggcccaaggagctactttgccccttttgcccttatgccatgtgaagatgcagcagtaagtttgagaaacaaacctcaccagacatgtgttgctcctggggctctcctgccccacgttcagtcagcactgagccagcaggaaggatctcacaggtcatatcctgagatcaaccctccaccccttcagagcagagccttggtcaccatttggacaaacacagtttgcactttgaaatggacccagggaagaggccatgcaggctcaggcacatttagccaggggcctgagtgcccagcgtgtgtcctagaagagagggtgagagctctgggtgggccagggtacagtcagtggagggccagagaggcactttctcaagcccaggattcagggcaggggtcctcttgccaagatcgatggctatgattcctccgtgaaatgacgactgtgtcatgtcttctcagcacacctttcattcactctcagccaccgtggggag

SEQ ID NO: 476867 - DNA, 908 bp, Homo sapiens
tgatggatattggcggacactgatggtccctgccacactcaccctcacagtgctgagcatggagttatttctgcccagtcagaatgtgagctccctaaggacaggaacctcccggtgcctggggggcagcaacacttgtctggcctggcagtgtcccaaaaaacaccgagttgggggctgcaagtccccacctggtggggcagctgcagaaacagagcagaatccacagtcagaacaagaggcgccacaagggcctgcagaagcaggacactccctttatgtcaggccaaagcccccccacccctggggaaggagaggaatgccacctgtcatcaccggatgggtgagtcacctcctgcaggctggaggccatagccagcccaacctctctctttggccccccagctctcccctgtgggtgaggaagctgatggatgttgagaatatcaccctaaaaatcatgacagcaacagctgccatctctgcggcatggaacctgtcactggaagcttaagtacacagccctgggttccaagcccagatcccatgttctaacctggtaatttgtggggagtcaccccttcctgatctccatttatgcatttggcaaacatttattatgcaagcactctgaactgggtaaggggtgctgaggatgccacaacgaacaccccaaaaccatcctgccccgtggaacccattgggtagagatgttcaaaacttacaataataataatgttaataaattttaaaattctgagtgtcgattggtgatgatgtcacagagagaaggggcctcatgacacttagatcacagagaggattcaggggtttgagtgacattctcaaaaggcacaggaaaaccaaacaggatttttgggttaaccagaacctgccagaagatggac

SEQ ID NO: 476868 - DNA, 1425 bp, Homo sapiens
ccgcgagggtccacagcttcattcttgaagtcaacatttgagagactgacgacacgtctcagactcctccaggtgacccagagcttgaagttgaaccagactaatttctccctgcaacggaaaggatgactgaccatctttatttaggtccctctgctgcagatctgctgccgtttgctggcagtccactccagaccctgtttgactgggtatcaccagcggaggctgcagaacagcaaagattgctggctgttccttcctctggaagttttgtcccagtggggcacctgccagatgcaagccagagctctcctgaaatcaaacagggctttaccagtgtgattctgaagatagagcacaatcaaagcaatgtctaccaagaggtgaaggtggtccaggcaaagcaaaagcaggctggtccagagcaaagtccaagttcctatgccatccaaagtgacaatgaaggtgttctaaatggatgggaaaatgctagagaatatttatccaaccagtgtattctgaggacctaccagttgccaggcactgtaacaggttttgtggaaatcagtgatgaatgagatggatgcggcatttgtctccagaggccttacagtgaagaggagaagatgtagactaatgaagtactttttagttggtttaaaatagaatgtttctcagttgaatatttatgagaatctattttttcatgtacatacaatttgaattggttttaaaattgtaacagagagcaaatctttctcagtaagactcactacggtagaaaatgtgtttctctcttctttttttttttcttcctgaaaatgacagtttttttatgcccatgatggaaacacaaagcactggagctcatgcactacagacaatgctcaagaccttccaggcataacaaataatagcaccacagagaacacaggttctttctgcatcgagaaactcagttgcattttatctagaagcattgatggcaataattgttccaaatttccaatgctctgtgggtgtatcaggactatctaaaaataggaacacttgtttctttgaattataaattctaggatgcacgactattttctctactatattacctaccaactttcttatttttaatggtagctaaaaagttactaccataagactatcttttctagttaaaagtcaacaagccactagattaaaaatatgaaaaggatgtttcacaataaatcattttaaaatataaatcagaaagtatcaataaaaatgtactattaattatagacatttaaatctaaaccttgtgtgtaattaaaaatagtatacacttttgcactgggttaaatttaaaagccatttttaatgcatgttaggcatagcaaaaaaatctataaaaagaaaactagatttatgttcagtttgcaagtctgt

SEQ ID NO: 476869 - DNA, 1261 bp, Homo sapiens
ctctctctctctctctctccctctctctctctcccccccaacccccctgctgccggccatgtgaatatgtgcttgcttcccattcaccttctgccatgcttaaacttgctgcttgaccacatggtagaaaagaaaaacccattttctgtggagaaattcaagctggcagcagaaatttacataaataatgaggagctgaatgttagcagccaagacaatggggaaaatgccttaaagacattggggagtacaagggggaaatgtggagttggggccccacacagaatcctcattggggcactgcctaatggaattgtgagaagtggactattgtcctgcagactccaaaatggtagatccaccagcagcttgcgccctgtaactggaaaagctgcaggcactcaacaccagctcatgaaagcagccgcagggcctgtaccttgcagagccacagggccagagctctccaagcccttgggaggccacctcttgtgtcagtgcagtctggatgtaagacatggagtcaaaggagattattttggagctttaagatttaatgactgccctgctagatttcagacttgcatgggacctgtagctcctttgttttggccaacttttcccttttggataggagcatttacccaatacctagaattcaaaatggccatgtttagaaaatgcagagaaattcaagataaaacagagaatgaattcagaagtctcactgataaacttcacaaagagactgaaatacttaaaaagaatcaagcagaaattctggagttgaaaaatgcaatttgcatactaaagaatgcatcagagttctgtaatagcagaatgattcaagcagaagaaagaattagagagttcgaaggcagacaatttgaaaataaactgtcagaggaggcaaaagaaaaaagagtaaaaaacaatgaagcatgcctactggatccagataattgcctggaaagggcaaatctaagagttattggccataaagaggagatagacaaagaaatagtggtagaaagtttattcaaagggataacaacagaaaacttccaaaacctagagaaagatatcaaaatccaagtacaagacagttatagaacaccaagaagatttaacccaaagaagactacctcaaaatattcaataatcacactccccaaggtcaaggataaagaaaggatctgaaaagcagcaagagaaaagaaacaaataacatacaatggagctcaaatacatctggcagcac

SEQ ID NO: 476870 - DNA, 1844 bp, Homo sapiens
cgacctgtctgcagaaaggagcacggttgttcatgtacctcattcttcctggacacaggacaagaacatgggacccaccaaatggtaggaccgaaagaactgtaacacaaacaggcctgaaacacatcccccctgctcactgcattgcaagtaacaagaaggagagaggaggccagaccttaggcctcctgagccagagctgtgacgccctctttggggctctatggttcctggtgtctccaagcattcaggtgccactgtgctccctggagcccacagtggaagccacttgtggtacacatggggcagctgcagccttgcacagagctggcacctgtgccagatcctggagctgcccaccccaccacagccggcatgcctggctgtgggcagcagccagaccctgtgcttgctcgctcatgcaccccttgccactccaatcctggctcacccttggcaggtgtgggatccaggctgacagcacaagctgagtgtagctggccagattgagtgggcagagcccaacaggcctgagggaaacttgggcaaaggtatactggtcacaaatttttctagctagtgaagtaacaccccaaggatcatgtggtatttctgaaataaatatttatagaacaccagaagttctttgtatactttttcattcattccttcaagttaactattattttggtgattaatttgactgttttaattttgaactttatataaatagaatgaatcaaatagtaggatactcttttgtgtttggcatctttcactcactactataattatgaagtttatccgtatttttttgtggcagtggattttaaattttcatttgctgtaaagtattccagtgcctgaacatatacatttatttaccaattttaatattgagtgttttgagggttgcttctagttttttgctgacactaataatgctgccatgaaatttgttatatgtctttgtttgcatatgtgtgtgcatttctgttgaagaaaaattactggaacatagggaaacatatgttcaacttcccttacattgccaaaaagtttccaaaagtgattattccaatttacacttacataaaatgtttgagaatatcaattgctctatatctttgccaatatttgatattgctatcctttttcattttagtcattaaggtggatgtgtggttgtattttactgtgctgttaatttgcatgtccctgacaactaataatagtgagtaccttttcaaatgcttattggctatttgttgttgttttgaagtcccttttcaagtattttgtctcttctaatgattaatttgtttttaattattggtttgtcaaagttctatatatgttctggatacaagtcctttatcagataaatatgttacaaatatattctcttagttagtggcttaccttttaactcttaagtgtaggtctgtttctggactgtctcttctgtgctgttgatcgttttgcctattcttgctccaataccacagtgccttaattactatagttttaaaataagtcttgatatctagtttatcctccagttttgttctatttattatttaagatcgtcttggttattcttacctgtttacatttccaaccaacattttaaattatcttgccaattaaaaaaatttgctaggattttgattggaatatcactacatttatagatcagtttgggaatacttgaaatctttacaatattgagttttaaaattaatggatatgacatattcctcaatttatttaggtctttaaaagtatgactcggttggtggtcttcacattccatgattcacctgcaaaacagagattggact

SEQ ID NO: 476871 - DNA, 2682 bp, Homo sapiens
tgaagagagggtgatcagtgggtacccagtatgcatctttcatacattcggggagtttccctgcacacgctctctatttactgctgccatgttagacatgactttgtttctcattcgccttctgccatgattgtgaggcctctcagccatgtggaactgtgtgccagacccattgcacagaccgatggcacttgttatgtcatctcagatgtgaccaaaggaccaagaccaattcatggccatgtgacaaggtctccagtatatgttttcagtactccccggggacatctgaattcccttgtggtttgtgactacgtgatgaagcctgagaaaattcagggatcttcttgccaagtcgtttatggagacactaagctgcaactcaatattgtccactgggctgctgtggctgttcctgtccaatctcagtggctgctaaaagtgaatgtagttgttccactaagcgggtagaactcagggtgattcttatcacactggcccacattaccctgagaagccttgttacatatttacggattcatcagctgccttcagtggactagttatttggtcttctttccctctttgttgtcatgtgtttgtacatctttcagtgagacagtgactatccttttctcccagactatattttcatggatgtttatatagcaaacatctttggaaggcagagatattgtcttcctctggaacaaagttcacattttctacttgtactactatttcacattcactacttctactgcatactatatatgcaagtataataacagtcatatctccctccagagccatgagttagcctgctttgcaacccttagataagtttcaggttccctaagctagggtttcattccttatacctcacggcatacacaggtattatttgactgtctttatatgttctgtgggaattggtcactcaagaaaccggtgcaagaaaataatgatgctttggctaccactattgctatgagcaatgaactgtcccttgtctctgactcaggagtctcatgtcttttgccaacatttatgaaactctggcaggctaactaattagcttgttaatagggtaagagctcagatacttgagagttcatgacaattatgttttttcattttttaaaatttcttttcatgtcaattttgttgattaaaattttctagaaaataataaagttgacttacaatttcaatttttacataaaatatttcatagtattagtctcatatttaatcactactgcatgtgtaattattttcttttatgtttttaatattagttatttatgacatttaaattcattaatctgtcagagctcatctcatcatttcaaaactccgttgcttaaaaattactcaactgctttactaagagttggcttgattttctttactcactgagatctgaagaactgccaagttgaaattttatagctttagaagttattttatatatatgtatgaaatgatatatgtatataaaagacatattacaaataaaatatacatatttatatataaaaacatacatatattatatagagtatataaaaatatacatatatataaaataacttctaaagctataaaatttagttgtgtgtatagccatataatttttaatatatataaaataatatatatatatacactcacacaaatacatatatatggcaagctggcaaaaaagttggtgttctttcctgagctcatacttatttcatagtcagttaaatagcttccaaactatagataaacataggttaactacaccaaactgtgataatcacattagccaatatttggaaaaaacaaatctgagcatcaagctgtttagctttaactattatcatcaattttccatatcacataattatgggggggagcattagtaaataagaaaataattggattccatcttacaatgtgacctcagaaagatattgagaatacacattttatacactaacatatgtgtgtttataaacaactttataatattaaagtgatttgctttcttttatactttttcatgaatgttactagtggtgtgctagtaaatgtttaatatctggctctcagggtggagaaaattctgatttgtagcatatgacaattttgctccgctatggctgatgttaaccagcatgcaaaagttcttaaaatttaacaatcgtctctcagaagctaaacacatcactaaagtatttggtttacttctgtgaggtgataaaagtttatgaagacatcttatttgataatgtttttaataactatatgtgtgtatataaaaataaatttgaagtattgagttttatattttaatgtatgtttttattatattttatatttatatttaatattcatatattcatttagatgcctaaaacccaaagtctaaattgtatctcaatatatcattatcttattttttcattgctaaatagtgacaaagagaatatgtttgtcatgttttttttccttgtaatggactcttttattctggaaatgattttagcatgccgatcaatttttttttaaacttaagatacttaatttttaaaatttgatagcttccctacaagtctgtgattccaaatattagggaagaaaagaggcttcgtcctgtcttctgagagctatcgaggtttgaaatgccac

SEQ ID NO: 476872 - DNA, 703 bp, Homo sapiens
cgcaccgggactgcaggtggagctgcctgcctgtcccgcgccatgcgctcacactcctcagccgttgggtggtcgatgggattgggcgccgtggagcagggggcggcgctcctcggggaagttcgggctgcacaggaacccgcggaggcgggggaaggctcaggcatggctggctgcgtccctcacggcccggggccagcagggccggccggctgctccgagtgcgggcccgccaagcccacgcccacccggaactccagctggcccgcaagcgccgcgcgcagccccggttcccgctcgcgcctctccctccacacctccctgcaagctgagggagtgggctccggccttggccagcccagaaaggggctcccacagtgcagcggtgggctgaagggctcctcgagtgccgccaaagtgggagcccaggcagaggaggcgccgagagctgccagtacgctgtcacctctcaattgtcccctgctagaataacagagtaattgataatcatggccataagaggggtgggggggcagagtcaggaatttctgcactatgtggcacaaggaggcatgtatgctgattagagcatcttattttcataagctttcaatccagacttcaactgtttgccatagcaaatgcatatgatctgagttgttagcttagatgatctacaattaagtttcgtaaaaattacctt

SEQ ID NO: 476873 - DNA, 1062 bp, Homo sapiens
acagtgactttcagtcattcaggattttataaagatgatacacacagcaagatcagtgcagaattccaatgggtccacaagtgtgggcatgcaacaagactcaaagcaagtacaagctgacacagaaatatcagacaccctcctagtgcttttcctggatatccataacttgacatgtggggcttgtgtgctgagcaagttaagtgaaacagtgcatctcacggaaaacgctgtgggtggatgtgaaatgggttcaggatggtcaaaaaaaggcaaactcagcaaacctaaggcattagacagagaagacattcttatgaagactatttttaacattctcttagtttacatcttcctcatctttgaagctgacagtatgtatagggtaaaagttcctgagtacagaacaacacacagagtgtatcctgaagtggcagtttctagccaaggaaaggcttctgagacaaagacagaggccgtgggcagatttgctagtcgtttgtctaccaaagggtctagcccttctatgctgaaacgttcttcaaagaataagtgaatgcattactgttaggggaaaatatgcattcacagttataattaagataatcttttaaatcattttctgatgtgcaagcttgttctttcccaccttctcacacacacatctatttatatatggcttagtgcttatgccatcatatatgtgtgctgaagggtgatgcaggtattatatcttggaattgaatagttcaggtccaagcctcagttttatcatttagtattcagaaataaatatatgcacatatgtgagcatacatatgtttacttagtattttgtaactgtcccctagttattaatttgcttttctacatgtagagtacttttagaaaatatgaactcgtgcatttcctacaacagttgagtatattattatatactgttatatataatatttatattggttgagtatataataatgtataaacattattatggactcaactgttgtagtttcctacaagagttgtagcaaataagagttcatattttcaaaactgtct

SEQ ID NO: 476874 - DNA, 589 bp, Homo sapiens
tatgaaggattatgcagtgattgctaagcgagacttgttgaatagttttgaccaaaatgctgatcgtgatatggacgatgaaatccaggctgaggtagtatcagatggagatgaacttagtgggaactggagcaaaagtccctcttgctatactttagcagagagactggcagcattttgccccagccctagagatctgtggaagtttgaactcgagagacatgatttagaatacctggaagaagaaatttctaagcagcaaaggattcaagaggtgacagaacataaaagtttggaaaatgtgcagcctgatgatgcaatagaaaagaaaaacctattttctggaaagaaattcaaaccagctgcagaaatttgcataagtagcaaggagccaaatgttaagagccaaaacaatggggaaaatgtctccaggtctgaggacttggtgccctgcatcccagccatggctaaaaggggtcaaggtacagattaggccattgcttcagagggtacaagcctcaagccttggcagcttccacgtggtgttggtcctgcggatgcacagaagtcaagaactgaggtttgggaa

SEQ ID NO: 476875 - DNA, 606 bp, Homo sapiens
ctccagcaagggtttggaactaggctgacactgagatggctgcaataacagaaatataattcagaatatggatagaaatgaagttcactgagctacaggagtacactataacccaatgcaaggaagaaatatgggattatgtaaagagacttaatctgcgactgactggtgtgcctgaaagagatagggataatggaaccaacttggaaaacatattgcagaatatcttccatgagaacttcttcaacctagttagaaaagccaatattcaaattcaggaaatgcagagagccccaagagacttagactctcacataataatagtgggagacttcaacactccactgatagcactggacagatcatcaaggcagaaaaataacaaagatattcaggacctgaactcagcactagatcaaatagacctgataattagctacagaagtcgccacacaaaatcaacagaatttacattcttcttgtcaacacatggcacatatttaaaatcaatatcataatcaggagcaaaacactccttagcaaatgcaaaagaattgaaatatcaacaaacaatcttttggacaacagtgcaataaaattagaaat

SEQ ID NO: 476876 - DNA, 516 bp, Homo sapiens
ccagactattcctgttatgacgagtaaagacctcttagtatttgtttctgatattcatgcaccatggcaaaggtgagaatttgggccctgcaccaggaagaggactgcactggcgtgaccctggatgttcagggatcagagcacctgctgcataccctcctgcagcagggagcaccggcccagatgagcaagtgtcacacacagggaagaagacatcagccatctctgagactggccatccatccaggagcatttcttgggctcagagcaatggtgacaggggtctcagtcacttggaaagacagtacccgggataccttgagacacctagcagaggctgctgtgaggcgaggcaggagtggcagacacaccacaagtggccatgggcttgtggcaagaagtggactgccaggcccgtgtggcctggcttgctggtcgaaagtattcagggcatgctgggggactctgggaataatcgtggagctttggagaactgggatcccaaaccattgagtt

SEQ ID NO: 476877 - DNA, 734 bp, Homo sapiens
tattttctaaagttgttctccttgctttctctgtgggtgttctagttgagaatattagcttctcgtgggaacctaagtggcctttagttccttgttaccgctgagggctgcaatgcatgctgtcatgggtgtgtgcgagggcttctgtgtgacctataatgaggagtgggatggctggttgtgcggcagatgcatctgtaaactcaccaagtatagccccgctgttgtgcagagcagcatgccactccacactcacaccagcagagcacagggacctgtctactcacgtcttctctatactttacacaaagtagagacccagttccagctgcaaacagccggcctctggggctctgtgggtgatgagtcacttagcccacaggaccctggaaacaccctcctcagcagtctcctgggagacagaggctctctcagagcctgtgtccctgccgggaatgagtgtttctcaccaggaggcaggccaggggacagttgtggagaaacagcagtgggggaccctcccccgcaaggaaagaggaagctggaggactggactggtgtggagccagggcaattctgatcagagtatggtgtcctctctagaatcgatcccccagctcaggtcctgaggacatctggcaggatcctgggaatgggagggtcatgaggagaaactgagaatgtgtgttcacaaacactttgcaagacacaggggaccgtgcacccatgtgtaa

SEQ ID NO: 476878 - DNA, 804 bp, Homo sapiens
ttcatctcagaagataaaatgtcaaactcagagctatcccacgcttgtcaaaatgcgtcgcaaagaaaactcacggagacaagcacctaggcatttgctagtaaaaacaacaaaaaaaaggcgctgtgtccttggttactgtgacagctgtgactgggatcgtcaggtgggaaaggggtcaggttactttccacagaaaaaacagaaaacatctggtgctgacatgctgatgaatcttccttcagctgctatggaaaatctgggactggggtgggggtgtggaggcattctgctggctcatgcagagggggaagctgagaggaactgggctcatctgcaggtagcagggcctggccccctcctctcctcaccctcctccccttctctttctccttctgcactcacacatgcatattctatctttcactttttctatctggatgcaggggtagccagccaagtggattccttgtcctggtggagtttataactaatatcaacagggaaataggattttgaggcatagaatgctcagttacatcatctgtttcccccacagttggagttgacatgctctgcggtctatgcagaatttcactgaccattagtcttttaactgccctatttcatcctgtttacaatgagctgttacgtaacagatcaaaatggcagcgttccaagaacttaactgctactcaaatgtcagttggggtacgtagtgtttgaaatatttttcacttgctgttaatagctgttatgtggttcctgtgtccaaatactaagtgcatttgctcatagatgttc

SEQ ID NO: 476879 - DNA, 1508 bp, Homo sapiens
ttctctctatgaatgtcagcatgttatgaaggaccatcttctgtgttgctctcacccgactgccctggtgcagtcctccactgaggagggcccacatcagcagcagagttgcggcaggggcactttgccctcacagtggagcctgtgacttccctgtgtctgcaagtgtcaggggtggtggagaagagaggatgaggcagcccccgacacagcagcccctccccagcactgagtgtcaggagcggccgaatgggtcagctggtaataatagtgcagtcattccatctgtaagcctgtcttgaaaggcaagtaacagaagagttaattaagtgcctggatcaattaagatcttgatctcctcgctcagcagtgctgaggcgagtgaggccaggggagctcgaagctccactcctggggctccacttggccctgcaagcggctcgaggcacaggcagggagggtccccattcatgcaggggctggaccatggaaggagagagaaagagagagagaagaagaagaagaggaggaggaggagaagaagaagaggaggaggagggagaggaggagaggagtaaggagaagagaagtagaggaggaggaggaggtggagggagaggaggagtagaggaggaggaggaggagaaggaaaactccaagagtaaagaaagagggtctccactcacagacaaaagaggaacaaccagagatatagaaggtagacaagcggaaatgttgtgccgtgaagtgcaagagaagcctcagagaaatccaagagaatgctctgagaaagtgctattggacaactgtgtcaaattctgccaggaagacagtggacacaaaaagattaaaaggatgaacattgtgcaaagatatggtagactggacatgtgaaaacactgctagtacagaatacctaaaatacttgtgaaatacacatgcttattttaaaataatgtctgaataggtgggaatgttaagtaaatcctcagatgctaaaggcgatgagaaaaataagatctagggtggtgaaatgtgaacagtgctgggagtttactttagtaagaactcttgattctgggttaacttgctatacacatggccctatctccaaagccatgagaaggaatataatcattcaagaatgggggggtggagagagagagagagagaaagagagacagagagagagagaagaagaagcagacgaagaggtggaggaggaagaggaggagaggagggagaggaggaggagaggagtaaagagaggagaagtagaggaggaggaggtggaggaagaggaggagtagagggggaggaggagggggagggagaggaggagtagaggaggaggaggaggtggagggagagaaggagtagaggaggaggaggaggtggagggaaaggaggagtagaggaggaggaggaagaggtggagggagaggaggagtagaggaagaggaggaggaggtggagggagaggaggagggggagggaggcaagaaaaa

SEQ ID NO: 476880 - DNA, 634 bp, Homo sapiens
gaagatcctggctttatacctgggcaacatcctaacctaatcagcgcccagctaatgaccatccttttggggtcctgctcttgcggttgcgtaagtactcattctgctcatctttgcatgacttaagatggtgctgttgtttttgcctgtgaccgagagcctaatagaagaacttctggaaccatcagcgtggctttctgggccctgggaaatctggatgttagaattaacaggttcagatcggcatagtagaggagctaagtgtgcaaaacttgtcagacacaggccctgtgagaaatcagcacaaaacaaaatgggagacaaagatgcagaacccatcttgcaccaagtacgaggtggaattcagaatccaaacttgggtgcagaagtcagagctgtgctcggaagctgtgtctgcctggattccattttctatcctactaacaatcagcaagcacttcgagggctctggcatgtcagggccctgtgtcatggtgcatggataaacagaagccctagtaaatgctgcaccattgcatccacttagataatacgatgccctacttgtaatatataattgaggtttattcctcacaggaattgaaggaaaagggacagagataatgtgatttta

SEQ ID NO: 476881 - DNA, 2592 bp, Homo sapiens
agctgtgtcacgagttaacaagatctgctatgtcttggaggagaaagtgctttgtgagtaggacttattgcggtgtttgcgacccggacttaagagcatctgaagaaatctggagagatgaaggaatcttgagaggcacagctaaaatctgcttgcctggaaccaaagctgctggagccatgaactgcaaggaacacttcagtggtgatttggaccaactgcctgagtgttggctagtatccaagatctccacatgcctcaggcagagaggagaacactattgtgaaatctgcaaaggatcctccacagcaaaagcctactctgcaggggaaaacacttttatccggggcttatcttatggatcaggggcaggggaggagatttttcagactccagcctcttctagcttttctgcatcaactaacggcatgagagagtgttggggtgggagaatattacagcccaggagcacgttaaagattggaaattaatcacaatattatagaatgtttccttcccttcagtccacatcaagagggccccagtataacaacagtggattgcagctgaaggagctgaaattcagtcttttcctgaggaaaaatctaagggaaacgcaatgataacttaggaaaaaaaaaaaaaaaagacactggaggaatttgaatcctctgatgcctactgatgcagcaaacattaaagacagcctaacgtctagcccagtaaacataaaaactcacaccaaaggccttattaggggttgaatgcttgtgtctcccttcacccccaaattcacatgttaaagtctaatccccaacatggtggtggtataaggacatcgggcatttgggaggttgttagttcaggggggtagagcctttgtatgaatgacaatagtttcactgtaagaagagacacaagacagatgatctctctctttattatgtgaagacaaaaagagaaaatggccattttcaaaccaggaagggagccctcaccagacactaaaactgatgctgccatgatcttggacttaccaggctccagaaccctgagaaataaatgctggttgtttaagccacccaatctatgaaattctgttataacagcccaagctgactaaggcatacctatcaactccagatcttattagccaataaatcatgtctgggtttcagtaaaaaattataaggcatgctaaaaggcgaaaaaaagcctcatagtctcaagaaacaaggcaagcatcagaaccagaatcagatatgacacagatattgaattatgagacaaggaatttaaaataattatgattaatatgttaagggttctattggaaataatcaacaacatgcaagaacagattgggtgtgttgaagagcttgcagaatctctgtgccacgcttgccaaggttcttgcatccctcatctgtcatagagaaagtggtggagataaaattgtgccagcagcaccttgtcaaacccctgctacaggcatccattgtgagtcatgggataaaggataagagagcagccagaggcttcagcatcatatgtctgagttctgcagaaaggaccaggcccagaagactcctggcttccacacatacccatgaatcacctgattaaggcccactctcaggattattcccctatcaatgcactgaatctactttcaaccaaggtaccaaaaacttcattgctcaatctaataaactcctttcaatgaagtcctacttgtcctgtgtcttctgacagtgttgtcaataccgttttaaagcccatgttctagttttccttattttctgtctctggatgacgctgaaataaggttttgcttcttgatattaagaaaaatttctaagcatatgattatggaggtagaagattgggatacctagaaaatgttacaatggagaatttttacttttattattatgcctttgaaaatatgaccaaattaaactgtcactagaagcataagtatatattcctatcatcacatgttgccagcatttaagtactattataaacgatcattttttgtaattaatccttacaaagttcacataattaaaaaataaaatttactaatttgaaatatattattagtgagaatagagagttccaaatagtttaacattgtttgctgatttgatatcttctgtcatcttgtctaacagggtatacatttttcttcatttcaatgtggttatctaaatgttgtagtaagtaatattttatctgctatatttgatgtaaatatttctacttagttatatttttacacattttagtgtaatttatactggaactggaactttaagcggtaaatattcaaaactgaattataaaggtcatatttttatgttttatggcatacatttttaaagaaaagaaactttctaaatggacaattttaaaataagcatcttacatacttccaataggaaaaaatatttcaaaactttggagacaattttcaaaacctattagagagaatttgacatttgtatacacattttcaaagaaacattgacatcatttaatttagcagttctactctagtcttaataaagtaacaggggtgcacac

SEQ ID NO: 476882 - DNA, 536 bp, Homo sapiens
agttgctacatacttttaaacaaccagatctgaaatttaattgatgtttctgtttatcttgtatgctgtaaactttctggattcactcattagctccaaaaatttttttagactccttggaattttctatacagacaattttatctataaagcaccctggttgggaggagcagggtgcctttgtactgctccatacctgatctccactgatagaagtggtgggaaaggactcattgcttctcagcggggaagagtcctggctctctactcagccttctctgacaccacaggggaggctcgaagcacctctctaccgctggatacaatgggatacaatggtctagctacaatggcattggataaatacacccattccaaatgggataaattagccaaaataaaggtgctaaaggccccatgcaagtctgaaatccagcagggcaattaaatcttaaagctccgaaacaatctcatttgactccatgtctcacatccaggtcacactgatgcaagaggtgagttcccatggtctttgg

SEQ ID NO: 476883 - DNA, 716 bp, Homo sapiens
caaagaataatactatgagtagcaatagtagcagtagcagcatcagcagtagtagtaatagcagtaggaacaatggcagtattagcagcagcagtagtagtaatagtgatagtgatggtagcgtcagcagccatagctgtagtagcagtggcagtagtagcagtgatattagtgctagcattagtagcagcattagtagcaatagcactagtagtagttgtggtggcagtggcagtattagctgcagtagcagtagtattagcagtagcaatagtaggagcaggaatggcaatagcagaagcagcagttctagtagtactggtggtagcaggagcaggaacagcagcactattagtggtagcattagcagcagcaatagcaatagtattacagtagtgatagcggcagtattagtagtactagtagcagtggtggtattagcagcaatagtagcactgagccacgtggccaaggaagggctgagatgtgaggtctcgtgcacacagcttgggccccatgtcatttccattgaaatatgtggctcaaggtcactggcactgttgagggttcacggaacttctgcggaaaagcccgtggatattactggctaccatgtggcatttgcttttgctgatgagaaatctgatgccattctaaatgccattattattgatacttattaacgaggcttagaaaaatgtcgttaaaatgtgacc

SEQ ID NO: 476884 - DNA, 943 bp, Homo sapiens
tgatgtggtagataaaaacagaaagaccagactatctttttccacttacaggatgccctgtccagagaggagaaagctggcagtctggccacagcagccttgctgagcagcagtgggctccacccagttcaaacttcccagaggctttgtttacactgtgaccataaaacctcctactcaagcctcagcaatggcagatgcccctacccccaccaagctcgaatatcccaggtggatctcagattgttgctgtgctggcagcgagaatttcaagccagtggatcttagtttcctgggctccgtgggagtgggagccaccaagccagaccacttggctccctggcttcagcacccctttccagggaagtgaacagttctgtctcactggcattccaggcaccactgggaacctacggaggagtcctggaacagattatctctcactaccttcggatggaaccaaccctgctaacatcttgtcttgtacttctacccttcacaactgtgaaagaataaaatttctgctgtgtaaactgcccggttatactgccttggctctgacaactcagtgtcctgagaccatgattcaacaggttctttatctgtgactgtcgttaagctgcaggatgacgggtatgatggctctttatttcaataatttatttcagaatctgtcacaggagtcattcagtaaaaataaacaaacttgaataaatgaatggatttattgaagtgattaattctgtaatctgctctaattgaaactacagagtaccagaaaaatccaaaaacacacaaatattctgatattgacacagaatttcagagttagaagagagtgtagtgaaaatatttaagcactcatcgggaaatgggacttaagatccttaaggtgagcatttctgctcctgaccaagatgaattaacaagaagcatatttata

SEQ ID NO: 476885 - DNA, 511 bp, Homo sapiens
cagaaagaccccagggagggcggatgtcaggaatccaaatgaagggagcgtgcacagaggaggggccacaactgggtttacaagccttgctaccacaggctggcagatggagtttcacttccctcctgttcaaggagactttctcattcacctttcaggagtctcagtgcttggtggcccctcgtgccttctgtttcacgtgggcactcaacaccagatcccccacgtttcactctgctcccctgtgctgttgtgagagtaataccttccatgacaaaccacaaagagatgacaatgtagagacccctgacccaaaagaaatagactgcagcaccaattggctggctttgtggctaaggagctggaagaagctcctagctaacagccaggaatgtgggaacctcagtcctacagccacaggagactgaaatcagcaacggcctgaataagcttggaagtggattcttgccaaagcgtccaaaagggaatgtgatgcagccaacacctttgg

SEQ ID NO: 476886 - DNA, 587 bp, Homo sapiens
cagctcagggcagggcagcagcatgggaactgtagatggctaccacagtcaaaaactcaagtgtcgacaggcaaagactagtaggaaaggcctgagtaaaagctgtaatataggacaaatgtatagggagaaagacctgctatctgacttaccagtaactcggggtctgcaacgtacctggagaaaaagtgaaaactttagtcaaatgcctagaggaagttggcatcggcatgtggatggggagaaccaagaagacatgttcaccacttactgtcaaagcagcagcttccctaagctcagggttcccagctgcaggggaaccccctgcgggagggacatccacctgagacccacatttcccacaggatatcaattatatcatatttatgttttggaaaatacaggaaagcaaaaacagaaaaataaaattaccccaaataccatcaatccttaaaattatacagattagctgttgaaagctctttctctatacttctgtattctactcccaagtggccaaagagaggtgaggccaggatagggaaggaaaaaagaaagtggagaggagagagagaggagttggggag

SEQ ID NO: 476887 - DNA, 494 bp, Homo sapiens
tccttccctgtcattgcgcaccatttttaagtcattcactgtattaaaaggcagtttcatgctatgccaattcctggagatatgtaaaggcattatctccactgtcatgagaggagggcggcgcaaaagccccgcagaactccacgtgctcaggtgtctaccaggaaagtacggctcatcagctgcacaggggcttagggaggggatggaacaagatcacaacatggagagaggcctttgggtgggcgatggctgtgggacatacgaacgaggggtggatgtggctgagaacgtgaaagacagggaaaaggagagcagctgcaccgccctgggttctggccctggagactcccagccttttgtggcctggaggcttccactgccagctcagctaagcaggaccggagccacactccgctgggcatttcagaggggcagtgggggctgcacgaaggaaattgagctcctgtctatggagcatggctgttaagaaa

SEQ ID NO: 476888 - DNA, 1475 bp, Homo sapiens
ttccaacaccactgagtcaaccctcttgactaagccgtctgagcagggttgcctgcagatctctgttctctcacggctcccggggggtcagctactgatgttaagcgagagaccctttcaaagcacagagaccgttcttcctacagaaccctctcagggccactgcacagcaagtgggatgaagcagactgcccctgcaggcgaccaaccatcaagaagggctggcacagaacatttaacagaaggctttctgtatgagtctgttctcatgctgctaataacaacatacccgagagtgggagtcggtgcttgcacgatcgctcacatgtggagcctggagcctcactgtgactcacaggttcaccttctgacaatgcatgtggaaccggcaggtgttcttgatcagggagaggaaccagattttcccagaagcgctaagcttctagctggccacgtgaggctgtggataacacacgcatcactcagagcagtaaggcatggctgtgtgtcatagctaactgaggctaagagaaaacatacaagtttcaacaatggagctatgtaaattggaaaatacctctgactctcccattaattcttctctttgcatttcatggaatgttataagacttcagaaagaacagaaatttttccacagactcccttattgaactaggagtaaataaaaacaattgtactgctttagatagaaataatacaaatacaattttgggggtggatgtttgtataagtgtgcagatgatatttattcagagtcaatagaaagcaaaaatgattctgtggtcgagttggctgtcctgcccgtgctccatgcaatgctgttcaacagcagctggtgttcattcctattgacatcaaagttattcgtatgaaattgttctcaaactttagctattcaaactgagcaattaaaggacttttgtgatttcgttcaactagtgatgttcaattatctcactgtcaaaaactcattatattctttcatacatttcatttaaaaaaatcttctgtttatttgaagcagtgaaatcatacttcaattttgaaaaaagaaagcccccaaaatccatgttgactttttatatgattcattgagtaaagcctttacgcttctgactacttttaaaaatatcttcagttatagaattatttaaattgaaaaaaggtatcatttttatacttaagcttgttgaaggtattaaagaaataattgaagaataatgtatcactctaagtatcaacaatagtagtaaaagggacaacattacctataaacagaaaaagaaattttgacacaaagtggacaattattacagcatttgctgagcctacctttgaaatggatttcacaccttaagaattctttgctttttcatggatgtgactaatactcttccagcctggaaataaggagactatcatgtgcaatgttgaggataaagtgaattaaagtc

SEQ ID NO: 476889 - DNA, 626 bp, Homo sapiens
gcagcacgagcagggccacagctctgggtgcctgagtcatcaagggaaaagaaatgtcccttaaggagatggcatttgggctgaaatatgaatgtgagaaggagccaacaactcaccttgcaaacattctaggaacagccttaggcggagggacaggtgcaaaagcccagaggcagggatgcttgcactggggcgggacagaggtcagcacagcagggatgacatggttccctagggggatgccttctgctctgcaggctcgacatcaacttgtgacactgtggaaggagcgggcacctcaccctccacagtgtgtggctagaacagtcatccagtccacacagcactttctgttccacaaccagcccaaactgcctttacaatgcattagaaaagccacccttcctccagcaagtagttgctatctgctgcaacatagttgtcagaaacatgtagatctacaagatctgtttgtgtagagagccccaggatttgatgccctaaatggtgggtggaccagggaacatgacactccttcacagctgtgggacctcagtgtcagaagcatcaaatgatgtgtctcacattgcactacctaaaatgagttagatttagttctgtgggct

SEQ ID NO: 476890 - DNA, 596 bp, Homo sapiens
cagtggtgtcatttcctttctaactaatttccttgttatttcttgtaaggaggatgcagcaacaaggtgtcatcttagaagaagaaagccaccctcaccagacaaccaagcctgatggaactttgatttcagatttccaacctccagaactcaaggcatctgcaccctgggatgcatcagcccctggacttctgcacaacagtgtctttgtctccttggccccgggaagttgccccttttctctggaggacaccaggaaggagagggtccatagcatatccctgacagctgcaggagctgccagcctggccactcagggtcctttaaagaatttatattcgggaggcatcacatcctccaggttcagctgtgttgtcacaaatggcaaattcactttgtttttaagggcaaataatatttcattgtacgtatatgctacaatttctttatccattcatccagtgacggacatttaggacatttctacatctaggctattgtgaattataaagtatgtcttttctgtttatagatttactagttatccttttacacaagtctggatcaccacagaaaatggacaagaaaatttggac

SEQ ID NO: 476891 - DNA, 827 bp, Homo sapiens
tttaaggtgcggtgagctgtcgctccggtgaccctttgacctggatttgagcccctcagaatggacgccgcttgccgagaccagctcagtcggggagaccctaacccagcggtgctagaggaattaaagacacacacacagaaatatagagtgaaaagaagatcatttctgtttgaatatgttgaccagaggtcctgcaagatgtgctttgctgagcagaaaagtgctctcaatgaccagattgtggatgtcgattctcaaactgtttcaccaaagaacttcatcaacagagcagaatcccatggggagtctagggctagcctggaacctctcagatttgccattatgaataagggttttctgcttggagatatggaccagacctgcatcccgctctatggggctattcaggcaactgtaccaggggaggtggctgtggttgatgaaaacacccatgtgctgggaagctggtgcaccccaaatccatggggacagaagctcctgtgcccaggagccttctggaccatgccctgtgcattttatttgataaagaaactagattgtcctatagaattccccacactggactttgctgattgtatctccttgcttatttatctagaggaactgaaaacttatgtccacacaaaagcctacattggacgttcacagcagctttattcataattgccaacacttagaagcaaccaagaagtcctttgttctgaagatattttggatagagctagtacttaggggagtctcttcagtatagatcattaaagccaaatcaagcaggaagtaattgtaaactttcataggtttgc

SEQ ID NO: 476892 - DNA, 3385 bp, Homo sapiens
gctgttcatccttcctttccagaccacagtgggaaccacccacggcacagggagtacatgtggcatgagaaggactttctaatccacgtggggtgtccctggggcagtgcctgaccacaggccacataacaaggtatgtgatggaatgcagccaacatttgttccttactgttccagaggctggaagtccaagatcagggaaccagccaactggttccctagtgggggctcctttcctggtttgcacacagccacctgctacctctgtcctcacagacgatgccacggacttgttcctggaaaagttccagagccagccttaccgtggcggctttcatgaggaccagtgggaagaggaatttgaaaaggtccccctgtttatgaagaaagcgccatcagaaattgatcccagggagaatcctgacttggcttgtctccagtcaattatttttgatggggagcattctccagaacaggccaagacctataaagatgagggcaatgattattttaaagaaaaagactacaagaaagctgtaatttcctacactgagggattaaagaagaaatgtgcaaatcctgatttgagtgctgtcctttataccaaccgggcagcagcacaatactatctgggcaattttcattctgctctccgtgatgtgacagctgccaaaaagttaaaaccgtgctacctcaaagcaataataagagatgccaaagagaagaagcttctggaaatgagggctaaagtagacaagctgaagctaattgaacagagggatgtgaggaaagccaacttgaaagaaaaggagaggaatcagaatgaagttttactccaggataccaaggctaggaatatcaggctctctgaagctgcctgtgaggatgaagtttcagcctcagaaggtctaggtgagcttttcctggatggactcagctctgagaacccccatggagccagactgagtctagatgaccagggcaggctgagctggcctgtgctctttctgtacccagagtatgcccaatcggatttcatctctgcttttcatgaggactccagatttattgatcatctaatggtgatgtttggtgaaacaccctcttgggacctagagcaaaaatattgccctgataatttggaggtctatattgaggatgaggacagggcagaactgtactgggtgcctgccaagagcaccttgctgcaggatctacagcaccacaggcactttgtaaaagccctgacaccagcatttttggccattttggatcttcatgccctcagttctggctacacagatccccatctctgtgacttcctggagagtcacttcctagatgaggaagttaaactcatcaagaagatgggtgaccacctgaccaacctccacaggctgcacaggctggctggcctggaggctgggctggcgagtatctctttgaaaggctcaccttcaagtacaactaggagcctactgagcccagggacttctggggggccccttgcaaagtaacagggcttctgcctaagcctctccctccagccactgggcagctttttaactaccctggagcactctcccaagccttggatcaaattaaaataaagcttttggaagcaaaaaaacgaaatttaaagtctattttgtctaataatagtggagacgttccagatctcttttgattagtagttgcatgaagtatcttatctgtccttttattttcagcatttttgtgtctttatagctaaaataagtcccttttagatagtatatagttggatcacgttttttaatacatactgaaaatctctgccatttaattgaatagtttgattcatttatatttaaagtaattactgtcaaggaaaggcctccttctctcattttgctatttatattccatagattttgtatatgtttttctcaattccttcattatggatttgttttttgtgtaattgattttttctagtccatttttgttcaattcctattttcttttctgcatagtttttaattattttcttcacttttttattttctttattttctaccgcacaatctggagattgtaattaacatattaaatttataacaatgtagcttgaatcaataccctcttagcctgaattgtgtacaaaacctctgctattatacagcctcatccatctctttatgttattattgtcacagattttgtctttacacattgagtgcccattaacacaaatttatattatttttggcatttgaattttaaaccatataggggaaaaaagaaaaagaaaagagaagttacaaaccagaaatacaataatattagcttgtatatttatctctgtagctgcctttactggtcttctttaattcttcatacagctttgagttactgtctggtgtccttttatttcaacctcaaggaataccttcagcatttcttgtaggacaggcctactagtgatgaacttcttcaaagtttatttatctgggaatgtctttatttcttcttcattgattagttttgccagacagaattcttggttaacagttttttttctatcagcactttaaatatattgtcccacttccttctgcccttcatgcttgctgatgagatgttgactcttattcttatttaagattccttgtacaaaaacatgacaagttgcttcttacttcctgctttcaagattcttttttggcttttccttttgaaagtctaattataacgcgtaatggagtctttgtgcttttttggttaaaagtccattgagattccctgatatgctgatttatgttatttctcacatttgaaaaatttggaccattatttcttgaaataacttttctgcttctttctctccttcttctaggatttccattatgcatataatggtacacttcacagtgtcccacaggtctcttaaggtatgtccatttttcttcatttctttccacttctgcttctcaaattgaataatctacattgagctatcttaagtttagtttgaaattttgaggatgctttcttctttctgttcaaattttatgctgaatctctctagtgaagctttaatttcagattgcattttttagctccagaatttctgtttggtctattcttatattttctatctttgttggtaatctctatttgtctaggcatcatatttatggtctcctttgtctatggtttttctttatctctctaagcatatttaagatggttgatttaaagtctttttatagtaaatccaatgtctgtgttttcttagggacagttttggttcatttattttttcctgtgagtgggtcatacattcttgtttctttgcatgtgttgtaaatttttgataattgaacatttttaatatcataat

SEQ ID NO: 476893 - DNA, 5960 bp, Homo sapiens
cctgagcaggaccccacctcagacgatgccacggacttgttcctggaaaagttccagagccagccttaccaaagcgccatcagaaattgatcccagggagaatcctgacttggcttgtctccagtcaattatttttgatggggagcattctccagaacaggccaagacctataaagatgagggcaatgattattttaaagaaaaagactacaagaaagctgtaatttcctacactgagggattaaagaagaaatgtgcaaatcctgatttgagtgctgtcctttataccaaccgggcagcagcacaatactatctgggcaattttcattctgctctccgtgatgtgacagctgccaaaaagttaaaaccgtgctacctcaaagcaataataagaggtgccttatgccatctggaactgaaacactttgccaaggctatagatgccaaagagaagaagcttctggaaatgagggctaaagtagacaagctgaagctaattgaacagagggatgtgaggaaagccaacttgaaagaaaaggagaggaatcagaatgaagttttactccaggataccaaggctaggaatatcaggctctctgaagctgcctgtgaggatgaagtttcagcctcagaaggtctaggtgagcttttcctggatggactcagctctgagaacccccatggagccagactgagtctagatgaccagggcaggctgagctggcctgtgctctttctgtacccagagtatgcccaatcggatttcatctctgcttttcatgaggactccagatttattgatcatctaatggtgatgtttggtgaaacaccctcttgggacctagagcaaaaatattgccctgataatttggaggtctatattgaggatgaggacagggcagaactgtactgggtgcctgccaagagcaccttgctgcaggatctacagcaccacaggcactttgtaaaagccctgacaccagcatttttggtctgtgtaggatccaaacttttttgaaagaattatctctgggggagaaaggtgcaccaggtaagatgactgagccaggccccctggatctcctccctcaccctcctctgctgggaacctagcatgcctgaatcagtccagtgccttatttctgtcaccctggggatagaccttcctagtatcatggtgggggaggagcctctggattccctgaactgcagcctctctggctggtcttcactttcttcagttgatataaaactctgtgccttggccatgacatccctggactccatctctaaagggaccatctgctgcagttaccacagcaactgacctgactggcaccctggtctgtggagacggactagggatccagtgacatgattctgaactttcgtggagttcaacaccttgttacagaagctacccttcaaactgcatatctacacacaaacaaactatgcgtaggattccaaggctttaaagctgagagaccctgacctcaagttatttcatgagcacagaggggagccatgtggggttgctgtagatgccttgaggtgaaattggggcaggaaagccacatcctgctctgcatttataaagaccatacaaacggagatccttggtacccctaaaaagattgccagttttcttcatctttgccatatggaggactgtgacagacttggacagtggcctctgagttcctctgcagtttcacattttaggattctgtgtcttttaaactggaaaatcttctagtatgttgggttgttgttataaggtatacttttgtctgcagctgtttgttgcctgcttcctaagaggggtttatccatcctgaaaaaaaaaaacagtattttctaaattcttctttgacttagagcttatttatgagtatgttgtttaatttccacatatttctgagttttccagctatccttctgttactggtttctggtttcattccttcgtagtcagagaaaatactttgtatgagttcaaccttttaatatttactgtgacttgttttgtggcctaatataagatttagcttggagaatgttacatgtgcacttgagaagaatgcatattctggtgtttgtggtagtggagtgttatttatatgtctactaattccaattgtttatagtgttgtttaagtcctctatttccttactgacattttgtctatttgttctattcattattgaaatttggatattaaagtctccaaatattattgtagaattttttttctcagtttatttctgttaatttttgtttcatgtgtcttgggggttctgtttgatgttcaggtatgttcatcattgtcatatattcttgatggattaaccttttttgaatacacaattttcttgtcttctatgatacattttaaagtctaggcagcacattcagcagtcctgtggatctgtctcttgcttcaacagtgtttggatggaacagatccaggaactctctttcttccagtctccagctaccttccaatcttctctccattttcaaccttcgggaacatcttctcggtcatctcctgcttctgggaccagccaacaccatttttgtagttagctccttcttgctaaccatgagctcccagatttatcagaattattccattgaggtggaggcagccatcaaccacctggtcaatttgtacttgtggatcttctaaacctatttctctctgggcttctattttgaccatgatgatgtggctctggaaggcatgggccacttctgcaaatcagctgaggagaagcatgagagcaccgagcatcgctcaaagatacaaaaccagtgtggcagcatgctgtcttccaggacatccagaaaccggctcaagataagtggggtacaactttggatgccatggaagccacaatgcccttggagaaaaatctgaactaggccattttggatcttcatgccctcagttctggctacacagatccccatctctgtgacttcctggagagtcacttcctagatgaggaagttaaactcatcaagaagatgggtgaccacctgaccaacctccacaggctgcacaggctggctggcctggaggctgggctggcgagtatctctttgaaaggctcaccttcaagtacaactaggagcctactgagcccagggacttctggggggccccttgcaaagtaacagggcttctgcctaagcctctccctccagccactgggcagctttttaactaccctggagcactctcccaagccttggatcaaattaaaataaagcttttggaagcaaaaaaacgaaatttaaagtctattttgtctaataatagtggagacgttccagatctcttttgattagtagttgcatgaagtatcttatctgtccttttattttcagcatttttgtgtctttatagctaaaataagtcccttttagatagtatatagttggatcacgttttttaatacatactgaaaatctctgccatttaattgaatagtttgattcatttatatttaaagtaattactgtcaaggaaaggcctccttctctcattttgctatttatattccatagattttgtatatgtttttctcaattccttcattatggatttgttttttgtgtaattgattttttctagtccatttttgttcaattcctattttcttttctgcatagtttttaattattttcttcacttttttattttctttattttctaccgcacaatctggagattgtaattaacatattaaatttataacaatgtagcttgaatcaataccctcttagcctgaattgtgtacaaaacctctgctattatacagcctcatccatctctttatgttattattgtcacagattttgtctttacacattgagtgcccattaacacaaatttatattatttttggcatttgaattttaaaccatataggggaaaaaagaaaaagaaaagagaagttacaaaccagaaatacaataatattagcttgtatatttatctctgtagctgcctttactggtcttctttaattcttcatacagctttgagttactgtctggtgtccttttatttcaacctcaaggaataccttcagcatttcttgtaggacaggcctactagtgatgaacttcttcaaagtttatttatctgggaatgtctttatttcttcttcattgattagttttgccagacagaattcttggttaacagttttttttctatcagcactttaaatatattgtcccacttccttctgcccttcatgcttgctgatgagatgttgactcttattcttatttaagattccttgtacaaaaacatgacaagttgcttcttacttcctgctttcaagattcttttttggcttttccttttgaaagtctaattataacgcgtaatggagtctttgtgcttttttggttaaaagtccattgagattccctgatatgctgatttatgttatttctcacatttgaaaaatttggaccattatttcttgaaataacttttctgcttctttctctccttcttctaggatttccattatgcatataatggtacacttcacagtgtcccacaggtctcttaaggtatgtccatttttcttcatttctttccacttctgcttctcaaattgaataatctacattgagctatcttaagtttagtttgaaattttgaggatgctttcttctttctgttcaaattttatgctgaatctctctagtgaagctttaatttcagattgcattttttagctccagaatttctgtttggtctattcttatattttctatctttgttggtaatctctatttgtctaggcatcatatttatggtctcctttgtctatggtttttctttatctctctaagcatatttaagatggttgatttaaagtctttttatagtaaatccaatgtctgtgttttcttagggacagttttggttcatttattttttcctgtgagtgggtcatacattcttgtttctttgcatgtgttgtaaatttttgataattgaacatttttaatatcataatctgtaactctagaaatcataatcttcttctccccaggatttgctgttgctacttgtaggttgtagttgtttagtgactcttctaaattctttttataagactgttttctctgttatgtgtagtcaccaaagttccagttctgttaacttactggtcagctggtgatttaacagaggttttcttaaatgcctaaacccaatgtaacaaaaaatacttcaagtctttgtggactggctacgtgtttgagcattcctttaatgcttagctaggccatttacatttgcttaatgtccactttcagcttcacgggagcctaaagacaggagccagagatgaaagttcatggtgttctccagtcttttctgagcatgtctagtcctgggcatttgtgtggacttccaggttatccaattatgtggaatctattaaaatacttattctcacatttatattctttccctgacttttcctaacctttctagtctgtctgctgcttttgctatctgttataaccttccccaggcagcagcagtgagtatgtttgccttaaatgatttctttaaatgccactcaggaggctgcttcaggcctgagaaagttcagaggcatgtgaaacatagggaattccctcaccaatcactcggggagccaccagacagacatacaatcataattgtttgagactaagtgcctcctctggggccatcaagttatgtcaataacatgggcagccagccccacagctaccaccaagctggaaagtggtaaattgtataggtaagttaaagcaccacaatactcttttgctgaaatttaggagcttctttctttgtgaaacacttcttttattgttgtatattttttattagattccttagttttaaaaagttaacctaatagtttat

SEQ ID NO: 476894 - DNA, 839 bp, Homo sapiens
ccacacaggcaccttcccttccaggctgcagggtcccccattggcagtggcctcgtctccaggactttcctgctctagaactcagagaagaagctgccacaccaatactagcatgtgacaaatagcagcagacaggctgagcaattaaacagaccccaaatgcttgtcagtggggctgggcctcaccgaggaccaggacctttgattcccatctgattaataaggttaaattagctggttctctaaggggactcctgaaaccccatcctgctgggaaatccagatgtagaacccagggcactgcatgggcagcaccagtgcctatctccacctcccagccctggtgaggatggcaggggaggtgctggaacatcctcctggggccatcgagcctgtcatgctgaggctgggcactgccctgctgaacattcccagtgccctcagtgccaagttcttgggggccctggtggatgctccactccacactgatgggcctcgaggagagggaagcatcctgcagaagggacacaaccaggcgccagtgggcacagaggaggtgctggaagcccatggaaatctgccagtgcattcaaggacagcagaagctgcagttggtgtttctcaaggcccctcgggaccgtctgctgtgggtggcatccacgtctatgctcttttccgaatgagaaaagcgcaggtggaaatgggaaaggtgcaggaagacaccgatattctcactctcattcgtgcactcaacaagcagtttctggagcccacccatgccaaacgctagggatacagtgtcctggacagatgggctccccgtggtgctgaactctttg

SEQ ID NO: 476895 - DNA, 1211 bp, Homo sapiens
tgtgcctggggtcagagtttagtgcctgtctcaaggctccccaggactttctaggactcaaaactctgtttttactttgcaggatctaggattgagctcctctgaggatgagagcccctctctagcaatcaggagccccaccttgagaaagcccctgaaacacagcacccctgaggaggcagccctgggttggagcccaaggccatcgggaggtgcctcctatctcagtgggtccccaatgcctgcacacttctctcaggaccttgcatcccacccagcaggggtcagccctccagccactgttaggaaaaggaggctttctactctctgggcctccaaggagtccagcttggatctctcagctcctggggaggagccgcccacatcagcctccttaacccagcggcagcggcagcggcagcagcagcagcagcagcaagagtccctccgggcaaagagctgggcacaaaaccctggattgcctgggatcctgaacacaacagggaggaagagacgagacccgaagaagcgggcagctgcgggtagcagccagttgggaggtgccctggccctctcctggcagaattctgcctcctcgcccatttcctggtttatcctctggccttgttctagtagcttcctgagaaggggcacttttccggccagcagtcttggagccctttctcagaactggaaggccctgtgtgcccctgtccctgactcccacctgcccaagcctctccaggtcccttttgtggttcttggtggtgctgagtttcattttggggacttgagcaatgaagccagcaaccggctgtctcctgtggcctgcagagaactgggtaaatacacgagcatctgccaatggttccgactggagagagggcgggtgctcatcatggatgatgaagctctcggggtgctccgatcacatataacaaaggaggctgcagaaggggcctgaggagggctgtcagggggtcctaaggtagtaccttgtgtctgctgtccccatctttatgtccatatgtacccaatgtatgtccatatgtcccacttgtaagtaagaacatgcagcatttggttttctgtttctatgttaattctcttaggatcacggcctctagctgcgtccatgttgctgcaaaagtcacattctttcttatggctgtgtagtattttacagtgtatatgtaccacattttctttat

SEQ ID NO: 476896 - DNA, 989 bp, Homo sapiens
tccagcaaggggcggcaggagtaaaggaatgacaggtgcaaataccttcccaccaaagcccttgttgccctctggctcctccccagagtcgtccccactctcagtcggtcacccactccttgaacttgagatcagtgtcagtggtgctaaagccgtcatcagcaatgacatcatcacgccctcctcctcatggatgaccatgggctcctcaagctgctccttggtatccgagctctggagtgtctgggccgcaactgacaggcgttcagaggacaccccaggggcagtggcagtgcccgtctctgatatgctccgctcccacgagcccttgtacactcctgctagcccctggcttgtgggcttggcctctgagctggacttctttcggtccttgttgcaagtgggccaccttcacttggaaggccaggtcgtagcacttctgcgtctcattgggccccagggtgtaccaccgcttgctcaggatctggctgacggtccagttatcctggttggggtgaccctggtgcgccctgccagagcctggtgccgcttgctgaagatcatgaccaccactcatgggccaccggatgtggtccttgtcccatttgttggggctgcatccatccttctcagaagatgagtcctgttccttgcgcagggcactgagggactgggcctgacatcatctgagtggtagaggcaactgggtgtcaggggacatgacggagaggaaagcttcatcgtggtcattctctgtctcactgtccagcagggactcccctgaggggcccagggctcctcctccatggtgggaggtgggcttttaccaggttccaccacccccaaagtgtgtggggttccgggccctgggctttcagggcaggtggctccagggggccgcgcagggtcaacactccctgtcccacctgaagatctatattcaagtttacagattatctctcctgttgaagtttactattgtgttatat

SEQ ID NO: 476897 - DNA, 1496 bp, Homo sapiens
gtgacaggacccagtgtgagaagtgagggtggttcaggcaggctggcagggagcccccaacgtgctgtagatgtggggcaggagcacctgcatgttccagcggcgggctcctcagggctgggccagggcctgtgccgtgacacacgtgtccttgcagcagcgtggcatgaagggcagggcccacaagctcttctacaaggccatcgtgtgcggcaaggagataatccgtactggggactgtgccgtgttcctctctgccggccgccccaacctgccctacatcggctgcatccagagcatgtgggagtcgtggggcaacaacatggtggtccgcgtcaagtggttctaccaccccgaggagaccagcccaggcaagcagttccaccagggccagcactgggaccagaagtccagccgcagcctcccggcggccctgcaggtctccagccagaggaaggacttcatggagtccctggcgctccctctgcttctgtctctgtccctgtggctccctggggctccctcggcctttgtgccccctacctgccatcctgatgtccccgcgtgcccgcagcgcgtgctataccagtcctcgcatgtggacgaaaatgacgtgcagacggtgttgcacaagtgcctggtggtgggcctggagcagtatgcgcagatgctgaagaccaagaagtaccaggacagcgagggcctgtactacctcgcgcgcacctacgagcccaccacaggcatgatcttttccacggacggcatgcccgtgctctgctgagcccgccgggctctgctggccaccggccacctgtgccccgagggcggccagggacccctctccatcactgccatggtttggagaccatgtgcgttgtgtgcatgcgagcgctcctgcaggcgtgagcatggggccaggtgtgcacgtggacgcccgggtgagcatgtttgtgcatgtgtgtgcccgtgtgcatgcacgtgtgtgcatgcacgtgtgtgcatgcatgtgcacatgcttccagccccaccttccaacccctcagtgcccccaggacaggggcccctcttagctatcagggtatggccctgctgtccccctcagggcagtctcagccgggaccggcccttcctgcccagcacattgcaagcacttggccaggccggccctccagcctgctgctgcatgggggcccgggtgcccccaggcccatgcagactggggattcagtggggaggggcgcttctaaggaaccaaactgacgctcactctgggcttcccgggcacccttagcatggagcccaccccaaggcctcccactgtgcatgggatggggtggcccgatgccagctggcctactgactgtgccaggggccttgcccccaccctctcaggatggcctagacttggggaacacagcagggtggggttgcagcccggggtatcaaaggcaccaggtggagagggcccggcacaggcccaccctggtccaaaccct

SEQ ID NO: 476898 - DNA, 1384 bp, Homo sapiens
gctccccaggcactgcgggcgtgatgatctctctgagccgcatcctcacggagctactgctgcccgacgagcgcgccagcatgctcatcttcttcctggtgtcggtggcgctggagctgctgtgcttcctgctgcacctgttagtgcggtgcagtggcttcgtgctcttctataccacacggccgcgcgacagccgccggggcaggccaggcctgggcaggggctctggctaccgcgtgcaccacgacgtcgtcgccggggacgtccacttcgagcacccagccccggccctggcccccaacgggtccccaaaggacagcccagcccatgaggtgaccggcagcggcggggcctacatgtgctttgacgtactgtggccaagggtccagcgcagctggcccaccttcagagccgtgttactgcaccgctacgtggtggcaggggtgatctgggccgacatgctctccatcgccgtgacctacttcatcacgctgtgcctgttccccgaccttgagtctgagatctgccactgcatcctgggcgagtggctgcccatcctcatcatggctgtgttcaacctgtcagacttcgtgggcaagggcggccacgtgcctggctctctgcagatcctggtagccctgcccgtgtactggcggggcacccacctgctggcctgctcctgcctgcgtgtggtcttcatccccctcttcaccctgtgcgtctaccccagcggcatgcccgccctccgccaccccgcctggccctgcattttctcactgctcatgggcatcagcaacggctccttcggcagcgtgcccatgatcctggcagcaggcaaagtgagccccaagcagcgggagccggcagagactgcttctcccaaacaaaacgcgttagccatgaaggagtcggagccctgggtccgaatggacccgcctgcagtctgcgtcagcctctgggaaaccacagcggtgatgccagctgggcacgtcaggacctccccacacacccacgtgatgccacaggtcgggggatgtgccggactagggagccctcctattgccttcctggcccaggatagaagaggggagccattaaaagatgaaggcagacggctgcaccgccgcctgcaagcagagtttgtgcatggacgggagctgggactgccatctcgggatcccggtggaacttgggctgccccggataagccggtcctcagtcttcccatctgtgagagcccacgccgggcccttcccttgcccgaggccggctgactgccctccctgggttaccctctttgcaaagccccgaatgtcctctgcaggccacccacactaaccaggcatcagccaccacacccagccaacttaacttttaatttttt

SEQ ID NO: 476899 - DNA, 621 bp, Homo sapiens
gcaggagattttattgaccccatgacatccagtgacagtgtgggagcaggctactctccagggacatgtttctggaggcatatggagaagggggcccaggtggacaagaagtacccctggaaggacctgggaggggaaaataatgccaccttcagtttcggttttcagaaaggggttcgcaaggaaagtacatttgtccaggaatcaggtctgagtgccatagcccagtacacaggctatggaaccagcaaatttgagttccaatccaaaactctgtctccgaaccagattaagagacagggtcctaggccatgtcaacatgtcatacatcagaaatgtggtgtctgttctggacttctgctttgctggtttgcccttaacatggctgtcagtaaaacttttgaggagtcaaaagttgtacttggatttttcactgtgtgagggtcagtacctctaacccctgtgttgttcaaaggtcaactatatatgattcttctggacagtgaaaatcactaaaactcgagtgaaaagaaaggcaattaactgacaggtaaagtaatcataaatatttgtgatataggaacaactgttctttactgttgctctaaatatctaagaacc

SEQ ID NO: 476900 - DNA, 735 bp, Homo sapiens
gtgtgtgttgcccaggatggtcttactcctgggctcaagtgatcctcccacctcagcctcccaaattgttggaattaccgttgtgagccactgcatccagcccttcatcacatatctaaaaacaatcaccagagaaagccaaacatcaggagccagaagagaaagcttcctaaagaagccagagaagtcaagactagccccacctggctggaatttccagagacaaacgttaaaccacagcctgaaaatgcagttgcatgtttcaacccggtcttatcctctagaagctgaaaagggcaaggaaatagatgatcccctagggcaggggtcctcaacccccaggctatggcctattaggaactggaccgagcagcaggaagtgagtggagggcaagcaagcgaagcttcatctgaatttacacatgctccccatcactcacactcctgcctgagctccacctcctgttacaccagctgtggcattaaattctcacaggaatgtgaaccctattgtgaactgtgcatgaatgaaagaaaaggatcagaggctctgagtgtcacaaagggtgcacattcactacttgtagtttatgtaactggtaaggcttccggtcactaacaggctgtcagtaaaacttttgaggagtcaaaagttgtacttggatttttcactgtgtgaggatttgtgatataggaacaactgttctttactgttgctctaaatatctaagaacc

SEQ ID NO: 476901 - DNA, 609 bp, Homo sapiens
ttggttgtcacagctggggaggagagaggctaactggcatctaatggatttaaaattacctgcaaaattatgctgtaaaatcttgatcctacctgcttatttattttgcctgacgtgcctgaagtggagtggtagagctttagaagtaactgttgtggctataagagaacatgaatttatcaagggacagagtctgggagatgagatttttggaaaacccagacttaggactaaagggagtgaactatcagagaattgcatggaaatgtcagtacgatatgaatcagaaacacacatgcaggacttgaaagatgttactaacaatgtccactacgagaactatggaagcagaaaactggcagctgtgacttacaatggagttgataacaacaagaataaagggcagctgactaaaaagtacacacatttagcaggtttagaactttgaacagactttcagaagacaatcgcacaacatatttattttcatagtgatttagtgtaatgattatgaaagtaatttgggaaataaattagctttagcaaattttactgtaattttttttatttagggcacataccttagtaatttaattgtgaaagctatgc

SEQ ID NO: 476902 - DNA, 988 bp, Homo sapiens
aaatcattttgcatgctttcacacctaaatcaacatcaggtaattcatactagggagaagtcctacaaatgcaaagaatgtggcaaatcctttaactgctcctcaaaccatactacacataaaataattcatactggagagaaaccatatagatgtgaggaatgtggcaaagcctttagctggtccgcaaacctcactagacataagagaactcatactggagagaaaccctacacatgtgaagaatgtggccaagcctttaggcgctcctcagcacttactaaccacaagagaattcatactggagggagaccctacaaatgtgaagaatgtggcaaagcctttagcgtatcctcaaccctcactgaccacaagagaattcatactggagagaaaccctgcaggtgtgaggaatgtggcaaagcctttagctggtcctcaaaccttagtagacataagagaattcatactagagagaaaccctatgcctgtgaagaatgtggccaagcctttagcttatcctcgaaccttactagacataagagaattcatactggagagaaaccctacacatgtgaagaatgtggccaagactttaggcgctcctcagcacttactatccacaagagaattcatactggagagagaccctacaaatgtgaagagtgtggcaaagtctttagcttatcctcaaccctcactgaccacaagagaattcatactggagagagaccctacaaatgtgaagaatgtggcaaagcctttagcttatcctcaaccctcactgaccacaagagaattcacactggagagagaccctacacatgtgaagaatgtggcaaagcctttaattgctcctcaacccttatgcaacataagagaattcatactggagagaaaccctacaaatgtgaagaatgtgaccaagcttataaagagaaactctacaaaagcaaagaatgtggtaaagctgttaactagtcttgaa

SEQ ID NO: 476903 - DNA, 607 bp, Homo sapiens
tagagggtcagcctcagagacccccttcccacgctgcctctttttgcttgcccctgcttgagcagctgctgtcccttagagttctctcaatcatgtccccatagttgccaccatgacggccttgcagaagaaggaggagggggaggagaagaaaggagaaggagaagaagagatagagaagaagaaggagaaggagaagaaggagaaggaggaggaggaggagcaggaggaggagaagaagaagaagaagaagaaggaggaggaggaggaggaggaggagaaggaggaagaggaggaagaggaggaggaggagaaggaggaagaaggggcgaagggaagagaagaggaagaagaaggaggaggagcaggagaaagaaagaggaggagggagaagaagagaaaaagtagaaaaaataagaaagaagaaggaggaggaggagtgggggaagggggagtaggagggggatttggggaagggggaggaggagaaggagaagaagagaagctgcagctggtaacctgcccaaagacaagaactcaactctcctggggcccctagggtcctgtgggctggtaagatgtccacagcatccatcaccagggagta

SEQ ID NO: 476904 - DNA, 807 bp, Homo sapiens
ggccaacatgcctagctggggtctggcaggccttcagtgggctccaaggacgggccagggctgctctggcatggcacccccctgccgtgtggacattgcaaaccgccttctcagccccaccagcaggattggggacctctttggcagctccagggaaagggcttggaactgcccaggaacgcaggctgtctcagacacatctgaggtgtgcgtgacccagtgctgctctccttgtatcttagacctgctgcagggcctgccactgttctctggggacagcccagtgggacagggcgttcattacttgaagctggcctctttcagctgcccctctctctgtgtctggtgggtgcctgatcaagcctgctctccaggtctcatcacccctgatggtctccctcctcccagtggagacaccacagtcatctcttagacctcctagcctagggcagcttctccaggcactgcctggggctcctctattctttgcatgattctcagagcagagatcccacagatgatgaattgagagctgaattgaggccttccaattccctaacaacctacactaaccaagttctaaaaatattagtaaaacgtacggacatttacctaacacacctaacacaattagataacaagctgtgctggtattccatttaattctcccaaagcaaagttttttagttgcccatgaatatatatatatatatatattttttggttgtgaattcactacatctaaaattagacttggaatattgtttcttcttgatatactaatgtggtttaataaatgacaaatac

SEQ ID NO: 476905 - DNA, 559 bp, Homo sapiens
tctgcggttgcccccatctgctgctccataacctcaatgcaaaaccatgccttgcgttgatatggagaccgtcatatcaacaatcacagagccagttcaaggcttcatgaggctcctagtctggaggtcaagtctgtgctctccttttaccttaggcttgcagcttgccaggaggccaagcgacaaaacctggcagatgggaatggtatttcaggacctccaaggattctcagggagaagctatggaatctacatcacagaggactttagtctgtttctacttgacagcagaaaagataaattgaagcaatctgctaagccgatttgccgatcgttggttacacagagggccaatgtggtgtttgccctggaatctgtaggaagagctagtcgtttggatgttagacactctggtttccctggaaggccttgtggatgggtttaactctggatccagatgctgtgtcaccaaccttcccatggacattgtgttgttacttttctgatcttagtctcagtatctttggttctaaaaccaggctcatgagaccaggtcaac

SEQ ID NO: 476906 - DNA, 1077 bp, Homo sapiens
tatacgtgcaggtttgttacatgagtatattgtgtgatgctaaggtttggggtacggattctgtcacccagatttgcgcttctctggtgattactgatgctgagcatattttgatatgcttgttggtcatttgtatatcatcttgtgtccggaattggtgggttcttggtctcactgacttcaagaacgaagctgtgaaccctcccggagtgaagctgcagaccttcgcggtgagtattttagctcataaaggcagttcggacccgaagagtgggcagcaacgaaagctaccgcaaagacagaaagaacataccttccacagagtagaaggtgaccccagcgggttgccgctgctggctcggcagcctgcttttattcccttgtctggccccacccacatcctgctgattggcccactttacagaaagctgattggtctgttttgacagggtgccgattgttttatagttttagatcttacatttaggtctttaatccatttttaatttttgtgtattgttaagataagggtccaatttcattatttttcatgtatatgttcagtttttctcacatcatttgttgagaagagtaacctttccccattgaatggtcttaatggccttgtcatagatcatttgaccacacatgaagggtttatttcttttttttttatatactttaagtcctagagtacatgtgcacaacgtgcaggtttgttacatatgtatacatgcgccatgttggtgtgctgcacccattaactcgtcatttacattaggtatatctcctaatgctgttcctcccctctccacccaccccatgacaggccccagtgtgtgatgttcccctcacacatgaagggtttatttctggtctttctattccatcgttctatatgtctgtctgcatgccagtatcacactgttttgattactgtaattttgtaatatgtttgaaaaccaggaagtgtgattcctccaaatttgttcctcttttccaaaattattttgggtattcgggatcccctgacattccattggaatgttaagattatttgttttatttctgcaaaaa

SEQ ID NO: 476907 - DNA, 553 bp, Homo sapiens
ggatcctatccctgaatggttaaagcccttctgtggcttcctcacgtgctggaagaatgttctttatcatctggcctctgcttcaatcttcaacttcactacatgccactcttccagccactggttatactggtcctcttttccaccttgaggtcctcaaaggttctattccatgggcttaggactccctgccatttctggtgtacaggacctttatctaatattggactcagccagtacatctgctgtggtgcccttggaggaccgttgaatcatacggtgaaaacgctggagcctgcaagtattacagccttttctgcttctactgccgttaccaccatcctcaacaccaataccataacctcggccactattccaactaccactactatcactagccactctttagtgtcattgaattatttggcaggtaccattataggtgatctgatgtttatttttcattaatgcatataacaggaattattatctttaataatgaggaaaccaaggtttagagaggccaggcaagctgaccaaggcatacttctaa

SEQ ID NO: 476908 - DNA, 541 bp, Homo sapiens
agaaacctttgatgccacattgcccaattgcttgtgatgatcaatagattttgggccctttgtgaagtgaataaacaactacccacaaaagatgttcagatgtgtccagagtttcttccttccagtgggttcgtggtctcgctgacttcaggagcaaagctgcagaccttcacaaaagaaggtagtgtgcttgctgtcctgtttgcctcaagtggacagttggtatctcaagatccttcagattgcataatattcagttcaatagactgtgctcaccaagaaccctcaacccctactatacgaattccttcaaaggatctgaatcttgacatgagcatttgcctggctgggtgggagtggggacattccatagaggagatgcaagaaatcaaaagaaatgagtcttgggagaaggacaagggggacaaggagaaagtttagtgaggccagcaggtgactttacatgctgggacatcttgtaggtatttgggagacactgaaggattttaagcaaagaagtgacactctgacttacgttttt

SEQ ID NO: 476909 - DNA, 636 bp, Homo sapiens
gatgatatttccccaggcatgactggcctcacaaagaaacttcccttgagatatgtgctgtattcacatgcaaactttgatgtgtgcatctcaaccaagcagaggccttgaagcggaaattgagaaactggttctgaaaaacaagaagcacagtctggctggaacagagggaacttggagaggagaagtcacagatgagagtggccatagggtggtgctgggtgaaggagagtttgaaggcaatggtcagaagtttatatttggtccagatgggtttggacattcacttactgagggcagaagcctggacctgctgatttctcatgctcgattccaagctctagattatgacagttctataagaacactggttgacacgcatgaggaggaagcagctgtttcagtggaattccctctggagaggaaggaagggagcttgttagaaatgcagaaactcagaccataccccagacttactaaataagaatctgatttaacaatatttcccaagtgtttcataagtaactaaagtttgagaagcactgtgttagagtttggagcaaactaaataaaataaaactcaaggtgagaaaaagttagagaattataatcccacaggacagaaaacagtgtaaa

SEQ ID NO: 476910 - DNA, 791 bp, Homo sapiens
ttatcatctcactcttgcacgatggcagtagtgtctttttccaaagaagccaaaaagacgctaatggatgaaatgctttgcacatatgggatggaaaattgtgctcggctaagtcaaaaagcagctcctgaagaacgtaatgtggctgcggcttcacaggtgcctgacccgctgccctgcgacagtgctgctctgtgtgtttggccctgctcctccactccagccggcaaagggggaagaatggattcagtcaggcagaaacttctagaaccgcttcgaattgctgcttgtgccaaagaagatctcctccttctcacccttttatccacacacaggagcattgaagaactaaacagctctcatctcaacttcctcccaacctcactcttggctcgtcctcctctgaggagcagctgtttttcagctgatgtttaagctcacacactctaagttaaattactccatttcttaaaaaaaaaaaaaaacaaaaaaaaacggagctcctttttcccagtttgctttaattccccctaaatatcattcctacaggggtgcctcactttacacatttttaactctcctccagaacatatggtttatacacagcagtataaatccaatatttgcaaattgaatcaggattgaaattcaccaagaaaggataccatttaaagaaaccatgtggggaattctttttttctcttttacatttcttttctttctttttattccccttgaagccaagaatcctttgataatgcaaatgattgattcttttcactctttttttc

SEQ ID NO: 476911 - DNA, 704 bp, Homo sapiens
acaggacaagaactcaggatctgccgaatggcaggacaaaaagagctggcctccctgagccagggctgtcacgccctctttgaagttcctggtgtctccaaccttttgggtgccaatgccttcccctcctccagacgcgggtgcctgcagcataagccacgtgccttacatatggtccagctgcagccttgcatggagccagcacctgtgccagggcctggagctgcctgctccactacagcagctgatgtgcctggctgcgtgcagaggctggaccctgtgcttgcttgtccacacacccctcaccactctgcacctggctggcccttggcaggtgtgggatctgggtcagcagcgcaagctgagcacagcctaccaggcggagtgggcagaccaagcccagcaggcatgagcaatattcaggcagaaggtgctgctggccacagaggtttctggctggtgaaaaacagcaccaccaggagcagggactttcgcatatacagtaaaaatgtacagtatcttcaatgcaaaaacaatctccccagatgcatctgatgctcacactagattcagtacttctgaattggctaagctcttgtgtcccattcatctccagcactaggtgttgattgaaaagttctcaaaggttgtgctcaccattcatttgcaccttgactgtgctctgaacattgaaaaaaaaaaaa

SEQ ID NO: 476912 - DNA, 807 bp, Homo sapiens
gcggtgatccctgttctgggacctaactggaagttccagttgtgtaggtgaagggaggggaatgaggaagaagaggttcccagcggaaacagtagcatgtgtggacttgagctgtgtggtccagaagataagtatccttggagcaaacagcggcaaagggaaaactgagatggaaagatggagagatttaggcctgaaatatgaacttacagcaatcagcataagaatgccacggaacctgaaaatcactgtccctggaggagctgagagagcacagttagcaggtgggaagtgcggggagggacaggagtggcaggcagaacacccaccgggaggacactctaaaggaagggatcgtcactgtctaaggctgtggatgcagaccatgctgatagagagaaggatagacatcctccacaggcgagtgtgcaggtgtaaaaggaaagaagctaatgaacttcccgacagaaagtgtctacttttcagcaaagcaggggtacaactttctgcgggacatgaaggcccatgcatggaagtggagcctagaagcttcctgaatgtcttcctgctgcacttttcacctccatttctatccctgctagcaaaagaagagcctaatggtgacatcccatacctaggggagcttttgaggtcacaggcccatggcaggggccatccatttactctcttgaaaatgatcaaagagaacacctacttcactgggttactgtaaagaagatgatgagttcatctctgtaaagcgtttttcacattgtgtggcactccattcactcatttgttcaacac

SEQ ID NO: 476913 - DNA, 631 bp, Homo sapiens
cgggtggtacaggtggctacgttgtcttccccacagagctcctccacaccacttcctggagccattcctagcagaatgtacctagctgtgatggtagacagtggtgttgttaaaatggaagatgaagcatttcaggaagtcacaaaaagcaactggtgttcactgagcatcaatcacattgagcttgacaggcaatgcgtagccatgactcagccatcccctcaaccagaactctccaatactgtgtatcattgcctccattttcatagaggcagtgaccgatggttagagagacacctcaaagaggagatgcaggaggatgagcagtctgcagtgcaggaggttggagacaaagagaaggtgatgtcacagaaacctacgggcacatggtcccttctccaaggtactcattacaccaaagtgagcatgcatgtgaccgagggtgccctggagaggggacattcacttccgaaaagggtgattaccaaaggccacgtgacagaaggagacctttggtttgggctggaaggattgttcaggattttgctggacaaggccaggtggaaggaggatgtgatgagaccctgtttcctggtagttgcccgtgtatgagggggtcattcctacattc

SEQ ID NO: 476914 - DNA, 638 bp, Homo sapiens
ttgacagcatctctgtggtgtattccttaataaaatgaccatacttcatgtcatgaatagtgaaagaattggacatcgtgggtctcctggaagaattgaatatgaagaatacaacctcacctatggactattatcatccagagtgactctgaagaccttcctgtgctcagatacggtacagggagatgcagaggtgcccatggcaccagctggacaggactttctgacttcagagctgaccaacagaggtcatcacccatcccaagatgctggcctatggacacacagaggcagtggcatagtgactggtattgaagacagtgaagaacaaaatagtgacataggattgctgagggacaagccaaccagtagagttgagaagcaacaaaaagggccaccagcaacctggtgtttcaggaaaagcttcctgcaagtgaagatgactgatcccaatctgaaggatgattcagagttaaatgggagaagggaggatagcatgagcagaggcagaaaagtgaccaatagtgtgaagatgtgaataaggattgagacagaaaatataaatcacattccagcattttcatctcagatactcacaagctcagaaaaattactgcaaaatggtactgttttcatac

SEQ ID NO: 476915 - DNA, 1498 bp, Homo sapiens
gagtaactgacaccttctgcatctcgttgaggtgctctgcaaatgcggcaaagacaccactgctctctgaacatggctcgttctaaggggcgtggctttggggtggactcaatgcagattctggggctgcttcttagttctggggctccatggggtctgggaaccatctcattcttgtcagtaccagggggctttggagctgatgaagtggccttgctcttgcttaaagtgggcaagccatttggtgtgattcaaggtccaaggaggaatttgaatattccattattacatgagaattatggtataatgcaaagactgctacaagaggaggggcaaacaagagctaagaaagccaagacctcccgggtgttgtgctttcgcaagaccaatgtttccaggtgtcctgaggagaggctctgtgccaattttgcatccacatcagaactacattatccattgctgtgttctgtagttgtcgcttataatattagtctcacaaaactacatatgtgtctttatttggatcttgcacatctttccaacatggaattctaatcttgactttcatcccaccctgatccagacctataaagaatgctgcaagagaactttacagtgagtgcacatctgaccagactttttcgtatctcatacctagatctcttacttttgagttctgcctactattgagacaccctcccaaataagacattttctttctcacttggatgaagatttcccattaggcaagaccaccctcggcatccttttcaaattactgtgacatatttctttacccaatggaaccaatggtgccggggggaatgagttccttatcctcaaatgcacaaaatgtacaagcacagaatcatctttagttatgcaggatgaaagaaacttatgagcttattctatgttctttctctgtttacctgtcagggctggaaggtaataaaaggtttgagtgtcctgtggcatctaattacctctcttcttcaagagtccatccctgaaactctctccttgcaggatgagtctttcctgttaggaatgctgctgacgagataaagagatggctgtttgccctatggcctcttagaataggtgctggagaggagcatgtgagcctttcccatgaagctgacctacctatagattaatattgcagattagctctaggctttacctagtcttctaggaacatctgggttgacctaaatataaagggccagaccgtggagaactctaaccggccccctgtttgtttgcccatcctaacatgttttcttagacatagataataatttttgagttttaaaaattatatgcgaatgatatacctgtgtacttacatagatcatcagaaaataagatgtcttcactttttattgctagcaagagctggaagaaaaatataatcaaattctcctgcaatttctgacgttacatggagatccaacagaaagaagccagcaactatagtgtagaaaggattctg

SEQ ID NO: 476916 - DNA, 879 bp, Homo sapiens
ggcatactaacaaaagtggaaagaaccatcttgggaaaccatccaggtcccattgccttttcttgctcatgaataactcacagtgtggaaatgcttccatatgctacaagttgttctcatcatttgctgaagggaaaacaaaaagaagagaactgtagtcaagtttgtgacttgcagaaagcacgaagctacagcaagtgcacacttagtggcagccttcggtgggtccaacaccagccacttggagcctcactccctgccaaagtctggctcaggctttggtgttctatatgttttgtttctattacaaataagacttccatactaccaattacattactcattggtccaggaattggagagaaacctatagactggccagcagcctatgaggaggcaagcattggaagagcctttgagtcagcggagtggctttggaaccactatactacggttggaactgttgagcaaaatggccatcatggccccatctcccaatatggtagtgagaggtgaagccggctgggcttctgggtcggatagggacttcaagaactcttctgtctagctaacgaattgtaaacgcagcagtcagccctctgtaaaaacgcaccaatcagcactctgtgtctagctaaaggtttgtaaatgcaccaatcagcactctgtaaaagcagaccaatcagcactctgtaaaatggaccaatcagcaggaagtgggcgggaccaaataagggaataaaagcttgccaccagagcacgtgtggcaatccgctggggtcaccttccatgttgtggaagctttattcttttgctcttcgcaataaatcttgctgctgctcaccctttgggtccacactacctttatgagctgtaaca

SEQ ID NO: 476917 - DNA, 524 bp, Homo sapiens
ggtacagacctgctggagccagaaaaggaaaacaaataaacagaaagtctctctcttcagagcagatgactttcaagctacctcgtgagctgacctcaggagtaataatgatgacagttggatactctgcccctactagttttgttatggtacagacactcactctcttccctcttcctgccactgtggctatgaaaccaagtgtggctggagcctggtcagcctgggcctgcctggcagtgatgggcagagttcttcctttacctatgatgggtggacagcaggaggcttctggctcccaggagctgtccctcttcctgcatattgtgggccttctttcctgcaattcagtcctgtgcagtccctgtcagggtgagggaaaagaacgaacaacaacacaaactttcactgaacacttactgggtgctgaatatgctcggcattttatatcgacaatctcaagtcctcttttccagatgagaactttgaagctacaaggaatgaatacattgaacatctagtta

SEQ ID NO: 476918 - DNA, 647 bp, Homo sapiens
aaaggaagaccgtgaccacagaggtgggatgctggggagaactggggccaagaagcaggacttgccatcaccagctcttcaccaagtaaggagggaactgtatgtggaattccccgtacctcgacttcccaccctgccgcggctctgtggggctcagctcacacttccctcttgctcctggtttcccttctcctacttgagacttcccagcctgtggctgagaagtggcctggcaagtctgctaacccgactagaaggagcactgcagtgccgaagagctggccagcctcaccctggggccctccgtttggaaccgaggcttgctgttaacttcaggaagcatttagcatgcctggataggagaatgtgcatggatggattggctttgctctcttcctgcgccgcttcggcctttgtcctcctaccccatctaaagaaagaccctctagtcactccaattggaagaagctaaaacctgatcacatccctacctttgaaaaagatccagttttagaatgcatgcttctacgccagcggtagaagggacatctcagcagttacctcccttctgtatgcctgttcctgaactattgaaataaaaactccaaatacgcatttggtcatacgtgggacatggtgcaaccgtc

SEQ ID NO: 476919 - DNA, 756 bp, Homo sapiens
gacccataccctatactcagatccttgcctgctcttctggaaactcgctcacagcgggcatgaggaggagctctgagatcagagggagaggttaacatgaatgataacaggaaaaatgatcaccttccagaaaaaactacagcaaagccagtcaagaccaggtgaactggagccttcacaaaaggctgtactggtttatgctggactgggccttcccattcttatcccatttgcagaagatctcagtgatggcgatagtggaaggaaagtatttagtccatccaccttgctgtcaagtcagtgtggaagctccctggcccttaagattcagctcagtgttgacaacaaagcctgtaatcacagtattacagtacagcctgtaatcacagaatcacaggaaggtagatgtagcatctggtcaggagccctagctctggctccttgtacaaggagtttctctttgcaaactattctacagtcactccaactccatctgaactgcgtgagcaacacagtggcaatgcagaataaaatgagctcgtcctaggccatacagtatccacatgaactattgcgctctgccattgtatcacaaaagcagtcatagagcatacacgaaagaatgggaggggctgtgttcctgtaatctctaccgatggacactacaatttgaatttcatatagttttcataatttttatgtgtcacaaaatgttattccttatctgattttttcccctcaaccattaaaaaatat

SEQ ID NO: 476920 - DNA, 1043 bp, Homo sapiens
gttcttaagcatgaagtctctggagccagactgcttaggtttgaatcccagtttctcctcttcccactctgtgtcttttgggagtgggcaggaagctccgcccatgaaacagatctgcttctccattgaactggaacctctaaacaaatgtaaaaagggaatgccgataactcgtggagcactgaatggatctgatgagcataaatatgtgtgtcagaaatcagtgcctcggcaagcccaactagaagcaattccccttacccacaaaacagatcttttgctggaggtgttaaaaagtggattaaaccacctgctaagtggactatccagggaagatcttcaagagattcagcaggggcctcgggaggtgtccacaacacagtccctgaatcaaccagcaagccaaccaaccaaccaaccgaacctaccaaccaaccaaccgaccaaaaaaccaacctcagctttcaattccaaatgcaacatttctcttaaccagtgcctaaaaggctgaagctttgctcaagctttgcttgaacaccgaatttgaatgacatactatctgtctttactaaatatctctcagagtcctgtgactatctgaattaaaatgtcagcaaagtcatccactacttctaggtcaaggcaaagccagagatatgtgaacctccagatatatgatttagaatattttgtttcattctgtgggttatttagctttgtaatgtcctttaaagcacgaaagtctttaattttgatgaagtccagtttatcatttttttcatgttgcttgtgcttttgttgtcatgtctaagaagggaaatctgccgggtctcagacctgttctaagaatttctccattcagtgttgaactcatttttggaagattgtgtgatttaatttttatcactgttaacatcataatgcactttatttatttaatttttcagacttcctttgttgctactgtagaaaaatggtggaagaaaaacatctgaaaagcctcttctccataaaagcaatgagaacgctggaaaaacatggtc

SEQ ID NO: 476921 - DNA, 1302 bp, Homo sapiens
gcctgttacccagttccaaagtcgcttccacattttcagatagggacgtttatgtctgcagaagttgtctgctgccttttgttcagctatgccctgcccacagaggtggagtctagagaggcggtaggccttgctgagctgtggtcaatctcagactgcttcactagcagtgagcaaggatccatgggcatgggacccaccgagcccggcgagggagggaatctcctggcctaccagttgctaagaccatgggaaaagtgcagtatttggacggaagtgtaccattgctccagagctgttcctatttggccatcttggaagcgactccaaaacttccattttttaaaccatgagatctcatgggactcattcactggcgtgagaatagcacaggaaagacccacccccatgactcaaacatctccaatgggtccctccctcaacacatgggaattatgggagctacaagatgagatttaggtaaattttgaaataacattttaaaatttcactaagattttgattagaaaggcattactcatttatactgtaatttagggactggcagcattttagctgttaggaacaaggctaatgtatttagaaaagtctgtattcaggacttagttatttttatttacttgtctttatattttttattagctactcttacatattttagttattttctatctttgaatcaaaccccctcacttttaaaagtatataaacgtattttaaatttcagaaaaattttaaataaaaagttatcaatgattctgtgctatgaggctgtggaaaaaactataactgagaaaggtttgggaagatttgaaaaatgaagtcctctaaaataataaatgactccaatgagacatctgtttgaataggcaactggctagcagcctgcagtgtattctcccttgatgggtccctaaaatatctatgaagacacaggaaagctaagacagtcagctgacctaatgttagattctgagaggaattgacactaattacatgtcagatgacacaggactgagaaaaaggcaagcagggcttatctcatggaaaatcttggctttgtttaatgaagcggaaactgtctgagcaaagagtggagggtgctttgcatctcctccaccatgcataccaggaagcaaggatttagggcttgtgctaaaaagggaaatggtgcattcattcttctgcctctaagatgctgattgcggggttgacaagcatgctatctgccccgttgcttctttctctctcatctttgtttatctactcattcaaagacct

SEQ ID NO: 476922 - DNA, 954 bp, Homo sapiens
taacgtaactacttcagaagtgggcaatagtaagctttggacaaaatcaactacttggcttgaatcttaagggagtcagcagtctccctgagatggagcagcccctctggtgtagaccaggtgcatttagcctgaagacacattgtacttgcaagctcgctaagaagataagtaaccccattaagcccatgcagattcccaatgactcctttactactcagagatctgtgcctacgctggtggttaattcagctatgcgaagtgagaagtccacatgtcagtggacctcagaatcattagttcggtgccttatttacagtaaggatgaaagaggggtcacattaggcccaagctctatctcttgtcagattggacactgtcctctaggttgtagtacatgcagtaaaccaatggctgatctaaggtgctataatcctattagaacacaggagctcaggaacctagaggtggaagtgggattggctccccaacttgcaggatattatattgctagattagatattctggatgcccagcctgatgagaccctccagtgtcctcagggctggggctgcggcacctttcccagtggcttgtgatttcatgtttaattatctattttcttcacactctgtcttagatttaagtctttgattcatcttgagttgattcttgtataaggtgagagatgaggatccagttttattcttctacttttggctcgtcaattatactagcaccatttgttgaataaggtgtcctttccccactttatgtttttgcttgctttgccaaagatccattggctgttgatgttcatttagcctttgaagttgctgttctttggatgtggcttttgcttttatgttctttgatgctcttgagagtttctctgtgatataagttggctttagtcgactggtttcacttctggatgatttcaggggccaagga

SEQ ID NO: 476923 - DNA, 559 bp, Homo sapiens
agagtacttccaagcttctaaacctatcgggccttggagagcgtggtgaagcgctatgagaatatggctcagtgcatctgcggtcaggaccaggcctgtgtctctctggaggccggcacacatgtgtcctgggagagcagtgctgtggattctgcagggtgggaggaaggctgggggcacaggccatttgccaaaagatgagacacatcagaaaaatgccttcaaatacagcaagattttgggctggggacccataggtcatcaatctagcattttctgtcaacatactgtggcacagcctctaattggggaaaaagtatgctcaacacatggtgcatggccacctgggaaagagacagttgtcatggagcctgcagcccatcagggcagaacactcagcttccctgaaaatggactgactgtggaagatccatcctcccccaatgtgggtgggtaccacctaatcggctgaggatccagatagaagaaaaagacagaaggaaggtgaattctctcccttctggaactgggatacccatcttctctcattcttggacat

SEQ ID NO: 476924 - DNA, 1021 bp, Homo sapiens
gccaccagcatcaaagaacaaaggcagataaatccaggaagatggggagaaaccagcgcaaaaagggtgaaaattccaaaaaccagaatgctgcttctcctccaaaggatcacaactcctcaccagcaggggaacataacctgatggagaatgagtttgacaaattgacagaagtaggcttcagaaggtgggtaataacaaactcctccgagctaaaggaacatgttctaacccaatgcaaggaagctgaaaaacagcacgagaactttgtgaagcatacacaactatcaatagccgaactgatcagcggaagaaagagaatcctaagcaaaaagaacacagctggaggcatcacgctacctgacttcaaactatactacaaggctacacttaagaagctgagtagctgtttggcggtccaaggcctgggtgaactggttaatcgccggaggcgctttcagccacttacagaggatggctctctggtgctgcaacctgatacaatggggccatttcataaagtccctcagctgcaggtctgttggagtgagctgcagacactctttgcctgggtatcaccagcagaggatgcagaacagcaaatattgcagaacagcaaatattgctgcctgatccttcctctggaagctttgtcccagaggggcagccacctatatgaggtgtctgttggcccctactgggaggtgtctcccaactgctgcactagcagtgagcaaggctccatgggcgtggcagacaccgagccaggcacaggagagaatcaccttgtctgccagttgctaagaccttgagaaaagcacagtatttgggcagcagtgtcctgtttttccagtttatgtgtccttaaaactgatatcaattccttgaatgcagcatatagttgggtcttgctgtttgtctattcagtcattatgactttttattggataattttatctatttacattcaagataattattgatagaatctcaggattcagctcaagcttttttccttttt

SEQ ID NO: 476925 - DNA, 1093 bp, Homo sapiens
gcggcagagtgctgccagccttgcaacccctgtgaacagcgttccccaatacaccagcagcaaacaaagcctcagcagacttctctgccatccaccgaaccatggctgtgctctttctaatgggggacggatctctggaaggagtctttcccagatctgtctcttctttaaatgctatatacttccctgtctgtcccagactatggaggactccctcccttctggaaggctctcaaggaaacacaaagtaccagagcacgttcctggtgcagaagatgcaacagaaagtgggatctggatttgaacttgctactgagttttgtaaactaaaacaacccaaaagctactctgtaattcctgcttctaaactcagcactggccacttttggctttcaggggaagatcagaacagaagaaatgaattccctgtcaagaactgtgaaggctctgagattccactctacttgcaggctaataagtcagccatatacaattttatgtatgctgacagaacacatgagactcctgggtcagagactgaggagatacatcttcagagatagtttattactcaaatcatagcagtaaacagagtatcagcattatttgtgctggtttccaagatccaatttccgcaaagtgatgcaaagaggaccagatgacatctgcacatgttgtgttgcaggagagaaaccttgaggtagggaacccaaatctttaataatgtgcaaattctgtttcaactaagactctatgagggttgaagaagccatttcttttcttcccctacactttctattgaaatatacacatggaaaactgctcaagatataatttcacacttgatgaattttcatgatgggaatagacccatgtaaccagcatccagataataaaatgggtaattaccagcatctgaaagcctccttatacccttctcatttatttacaccgtcattcctcaaagggaaattatttagactctgtatgtcacagttgatgcatctgtaaagcagacataataatagtatctctcatagggttgctggtgctattaaatgtgacaaagtatatgaattgcctagcaaagtgt

SEQ ID NO: 476926 - DNA, 2097 bp, Homo sapiens
gccatgacttcagacgggcagtgtggaagggaaatatggggttggagcccccacacagagtccctactgaggcaccacctagtggagctgtgagaagaggaccactgtcctccagaccccagaatggtagatccaccgacagcttgcactgtgcacctgggaaagctgcagacactcaactccagtccatgaaagcagctgggagggaggatgtactctgcaaagccacaggggctgagctgtccaagaccatgggaacccacctcttgcatcagcataacctgaatgtgagacatggagtcaaaggagatcattttggaactttaagatttgactaccctgctggattttggacttgcatgcagcctgtagcccttttgttttggccaatttctctcatttggaatggctgtgtttacctaatgcctgtacccacattgtatctaggaagtaactaacctgcttttgattttacatgctcatagtggaagaggctttccttgtctcagatgagactttgaactgtggacttttgagttaatgctggaatgagttaagactttgggggactgttgggaaggcatgattttgaaatggtcaattttttatggtatactttgctcagaaagtctattgtgtctaaattttccagtttatttgcttaatgtttttcatactattatatcattatttgatgatataataatgtatctgtgtatctgtgattatttacctttttaacatccaataatgcatggtttaatcttcttttgtcttcattaattttcccagttttgatgatgatttattcttttaatgaaccagttgttggctacattattcttggacctttatgattgttcttaatttccttttgttgtcattatctttattaaattcacatttttgcttttatttttcagatgttaatttaactacatcaaacttttgcggttagtgtgtacctgatttatcctttcttattctataaaacaaaacaaagcaaacaaacaacaaacaaaaaccttagtctttatattttgggatttttgttcttacaatatgtgaatttcctacagaaatctattgatttctgtttaccatggatttgtttttactttttttacctttccaaaatttatccagactaaccaagtctttacctttcccattgccccgttagtgggtagtatcatagattctatttttagtttttagtgattactcttaaaatttttttgtagagttaccttagagtctaaacattattaatatatttactctcattcaaaaacatataaggaccttagagctttaacttagatcattcccttgactattatgtcattatttattgtttagtatttaattctaccctgcttgatattcctataattagtcatccttattatggctgttttattctattgatgcttattttactcacagatatactaatttattttctaaacattctcccttgcattttaatatttattttagaaacttttattttttctttctaaaatacatacttgagtttttcctttattaaaggcatacagttgataaatgttttgttttattttgtctgaaagtatccttattttgcctttattctataataatgttttagctgaatatagagttttaacttaaattttatgttctgattgctacttttgtgatcaatctcctacaatggtaagacattagaaatatttcatttcaaatcagagggatacttgctgcacaacttctattcaacattttttatctactatcataagaactaaaagatttaagaattgggaaaaaaggtgtcccaactttattactcataaatgatacaattgcttatatagtacatctaagaatttatagaagaaaatgctaaaaaaagtaaaaatgcaataaacatgatagatattagattaatgtgtgagagtaaattacatctctatatctaagaaataaaacatttgacacatttgctgttgttgtttttactctcaagtaataataacttttatcaccccaataaaatgagttatcttattatatatctgttggcagtatgtctttgtcttccaaaac

SEQ ID NO: 476927 - DNA, 702 bp, Homo sapiens
tgggagaagcatgggtttccagggtcgcacattcactcaccacttccctaggggcaggggaggttcccctggctccgtattgctcctggtgcctctctcctcctgctccctcctgcaccctcctgccctatggtgtgcttttccttctaacacccagcttttaacccctaactgctgccaggctgctggagcaaatttgctgttaaacagagacctggaaggagtggttctaaagacagaaaagtttgacagtggggatggggaaaggaaaggtgttgctggaggaattggcaagggagcaaatgagtcagaatttaggatggtactgtggagggaagacctggggagatcaagggaatcatgtgggagttggagaggagaagagaaggcaggagatggaagagagtgtgtaggcttagtgaatgtcaatgaaagaaacaacacatcacatattcctatctacattgaagattcctcagagttcacatatcacagctgtggagtgtgttacaaacattttccagagctctagcgtcccagtggttgtggaatttaggcctctccaaggcacattacagccttctcacacttaggaacattagacagcacttcagcaccatgcatggtcgggggtgggggtcattttaatgagcaaaatcatctataaaaatggaaaacaaaccatggcactaaatagatcac

SEQ ID NO: 476928 - DNA, 839 bp, Homo sapiens
gtgtttatgagctgtaacactcatgtcaaaggtctgcagcttggctcctgaagccagcaagacgacgaaccagatgggaggaaggaacaactccagatgtgctgcctttaagagctgtaacactcatcgagagattttagctccagagaaggatgtagcagtaatggttgattgttctttgcaggcactggcaagatacattctggaatacagacaacaaatgatgcagtccaaatggaaggaatcatcaaaaagcttggagaagtttgttactactgaccttctgaagcctacttctgtcaagtcgttgaagtcattctccatccagctttgttccattgctgacatcaaggataccatcttcacaagtgaggatggatacataaaaaatgctgctttctgtgtcaaagatcaacacattttgtttgacagcaaccatcctgatcaagccttaagcagtagcagtggcatttgggtaactggcaatacagagaccatatctagaaaagttaaagagaagaatacccctgacacagtacctccactgctgagaatatatcctagagaaactcttatccagaggatgtttgttttctatttaccaaatgcagtatcctatatatatgagacaaaccaatttttctattccacgtattcatcaaattggtgaacatttccctctcagttggcaaatttgattttaatctgataagcttgatttcagaatctgcagtgttcatctcatcaaatctgccaataggatggaaacattgcagccaagcaatgaataattattaatcattttgtgtgaagttttgggaaaagtaacctaagcttat

SEQ ID NO: 476929 - DNA, 759 bp, Homo sapiens
cggcagaccaaaggaagcagcttctgcgggtttttggagtggccacactgccagtgttacacaatgtctgatggatttggatacatcacaatatctctgagtctcagtttcattcctggctatcctctgtttaatccaggatggcatcagcctgccaagaaagattctaaggctgttctgggcttggcagccatcttttgggactcccagatgcctgtcataggaatgaggcctgcaggtattctcacctcttctgtaagcggctttcacatcctcattatagttccctacctattgccccttggccagcccctccatttcagtagaagccagtatgtaacaacactttcacacaaaatggcctgccagaagtccagaggcgggaacctcggtgagctgcttttcaaaggtctccgacccttaaatgaaacctctttggtgcttttagggattctgttgttggagccacaaggacccttaagaaaaatacttggagccagctggtccctgccatcattgaaacccaaagggaggagctccacggcctaaacacccagatttagttctcagtaagagctatcttcagtgcagtttaagagagtaattgttgtaattgcataattatgtatattttgataagtttgcaataaagtatttatgaaatgtactaattcattcattaagccattcaacaaccacttgttgaatatggataaaaccacacattcttgtttaaagaagcttataattttgtgtgtg

SEQ ID NO: 476930 - DNA, 832 bp, Homo sapiens
tctttttccatcactttcattttaaatgaaacaattcaaatctgtagaaaagttgacagagtatgccccttactttaatgcttcagttgttaacagtttgccacatctgctatatctatctatctatgtgcaccacctgaaaggatgtgaagcatttcccaataatatcccacagaaacttcaacttaccaagtttgtggtaaatttcaggatattaagacaccctgaaatgggtcactgttcttggataccagattctaagctacccattgcaaaatgtcttgttaaagccatggtgaccactgtctctgtgtccttgtcaaactttttgtcccctaacggcatcctctccttcaaatattgtgcagcagatctagggtcccaggtgagtggacctccgtaagcagatcacaaggtgactaatgaaacaccaagtcatataattatgacttaatggatactttctgttgttgctgatgatgaaatgtcctttcatattcagactgtatcttcctgtaaatcaggtacagaaaattcattgccttcaggcacaggtcttccttcccaaaatagttcaaagtgtacatctcttttccaaaattatgtaaatcttaatttgtaataaaatcacatgaatgagttgtgggaaattaaagtttgaaagacaacatgattggcaacctgtatagtaatttttatttctgttttccaaataaaagaaattagaagactgtacctttttattctctgccctctgacactgatcttttctttcttctgttgcaaattaacttctcgcccactctatcccctcccgtactgttttaactaa

SEQ ID NO: 476931 - DNA, 747 bp, Homo sapiens
agccaaggacaccttctgcagagcccagactgagctggagccttcctgtctccttggtgaaaactctcccgcggcagactcagcgttgcattatgtacgcatgcacgctgccatcaggggtgtcggtggagcaggggcggggtgcttctctggtttatactgcagtagggagggaaggcttgggcaccagccaaaccttctttcagcctcagaggaaacctccaccaaggagtcaaaggaaagagctttcaatggccaagctggaacaatttgtgcaacgacaacaactaaaagaaataacattggactatcactcaaaatataaaataaatatttatgagtctatactgatgcatgagtttttttcaccccttcactggacatgcggcaggggcaccacgtctacttggcccactgtgctcagccccatgtggagggagcttgtgagtgggcgagtgcgggatccagatggctgctctgggtgccaacacagaagcaagctccatgtggggcctgcagtcagaccaggtgtgttgcctcaaagggaacgtggtggcacccaggtgagggtgcctatgaccctgaaggcccagagcaggtgtcacagtgctgtttaattccatcatctgcagtctgatggacggcagtgtgttagcagctcagctggccccttgcctcattgtgtggggtgactgccctctgccagagagggcaaagggccagtgtgacaaccttttcagggtaccc

SEQ ID NO: 476932 - DNA, 1868 bp, Homo sapiens
tcagacttatacctgagaatagatggctcttttctctatagttgcttcctggatcccctttgaaaagatctcttccacagcttcaggcttcctgaccgctggaacacagctgcaaagctgcactcttgaactcacggctctagtagcagtctcaggaagagtacctccccagggtgtcagatccatacgttcttggacctttaaagcaacccaagcctttaatgttgcactaacaggattgtctgccacaggaagggcacactctccagcacccccccggagtgctacccctattgtgaactgtgcatgcgagggatgtaggttgcaagttccttatgagaatctaatgcctgatgatctgtcactgtctcccatcaccccagatggaactaagtgtgatactcataagtgtatggttttaaaagatctgaacaagaagttgcttttagcagtcaaaaatttcactttgtcccctgctaattctattctacctactccacataaatttatccaaatgtagtatcattctatgcttaaaaatcttttatagatcaccacatcatatgatctgcacaattgtgtatatacattgaacactttttactttatgtgctcataatgctctaattaacattttctgccattacaattgctaatacacagttgatcaaaacagatcaacatgctgacacttttgatagaaaattattaaacataaaagaaaatttttgttgggagtgcatctctttatgagatgaatgtgctttgtttttaaaattagttcatatgtctatccatgaatagtatttattaataatatgaaaatgatttgacatcatttttgttttcattttataaatgtaagggctaagaaatcttgcttatgtgaataaatggggacagaaaaggtttgctgaaacaaaaatcagtcaatcctttcaactcgttctaaattttatgtcaaaaatcacctagcgatctatcataacattatttttcatgttctagcaaatgacagcttgattaagcttgtcttcaattttgttagatgaaaagagttggaaaccacctggcttgcaaagaggtttttatccaggtatcagggttttctccaagaaaggcttgccaagacttatcaaatggttattaaatatatatgttatttttggctcaaaggcattttctaaagtaagagatattcaaaggggttgggaaaataaaatttctttcttttaatgtaccttagccaattcagaatttttaataaaattatttttatcttctcacatgttttcaatatattttatgtcaaaactttgatgacctaagacaacagatttagctcactgaatctgtggaaaatgtttgccatccaacctgattggcaaaggcaacgttaggcttacattcttcagaaggacttcagtttccattcaaataaatatgttgatatggattttaaggaacattgcaaaaaccattaaatttaaatttaataaattaaatttattaaattatgaagaacatttcataaagtagattgctaaaagtcataaagtcattatgtagagattcccttagtctcagagtataaagtgggaataataaaaacagtatcattattaatacatacctcattggatgatgtaaagattaaataagataatgtttgtgcattgaaagtacatgttttaaaagagctgtaggcttccatggctagatggtctgttagagtcagaaatctgaacactgtccttttattcacacagcatgcttggagaggttttaagaattccagccccacaacagatgcttgcaataccttttggtggctactctagcaatagagtatgaattatctacatctc

SEQ ID NO: 476933 - DNA, 536 bp, Homo sapiens
actctcgcttcatcggttatgaagctgctgatggaaggattccatggaaaagcagcagagctgcagagtggacagggagaaatcagagctataattaactttgtatttcattgtgttctacagcaggagaaatgcctgctgcctctccagttggctttggaatccaagaatgtgaagctggcccaacatgctttggcagggatgcagaagcttctgtcggaagagaggtttgtatccatggaaacagattctgatgagaagcagctgctcaatcagatactgaatgccgtgaaagtgacgccttcgctcaacgaggacctgcaggtggaagtgatgaaggttggtttgacgtggccaagagtgtgcgtcactgggacaggaacacatcctgatcccctgcacttgttatctgaaaatgcctctgcgttgtggtcatgctagctcatcttcatttggaacggatgcttgttattcttgctcatggtccccctaaattaccctgatggtttaacatcaaaagggacaatttcaatcaa

SEQ ID NO: 476934 - DNA, 723 bp, Homo sapiens
catacacataggattacaagcaaactccaacagacctgcagctgagggtcctgactgttagaaggaaaaataacaaacagaaaggacgttcacaccaaaaccccatctgtatgtcaccatcatcaaagaccaaaggtagataaaatctcaaagatggggagaaaccagagcagaaaagctgaaaattctaaaaatcagagtgcctcttctcctccaaaagaacgctgttcctcaccagcaacggaacaaagctggatggagaatgactttgacgagttgagacaagaaggcttcagacgatcagtaataatgaacttctctgagctgaaggaggatgttcaaacctattgcaaagaagctaaaaaccttgaaaaaagattagatgaatggctaaccagaataaacagcgtagagaagaccttaaatgacctgatggagctgaaaaccatggcacgagaactacgtgacacatgcacaagcttcagtagccgattcaatcaagtggaagaaagggtatcagtgattgaagatcaaatgaatgaaatgaagaaatatggagaacgccacaaagatactcctcgagaagagcaactccaagacacataattgtcagattcaccaaggttgaaatgaaggaaaaaatattaagggcagccagagagaaaggttgggttacccacaaagggaagcccatcagactaatagcatatctttcagcagaag

SEQ ID NO: 476935 - DNA, 1095 bp, Homo sapiens
tgatcggcccccagcattcagctcctcagaccacacaagtgtctttttaaatcttttttttttttttttctgagtaaagcatggcctctgcagaacagtggtgtatgcttgcaggctttagtctacctggaccaaagctgaacccaagaggctctggaggagcaactggatggaaagagcgagtcccagaggtccatcctggaaggaaggaactggtgaatattcagggagatttgaatggagacttagaaagcctgagaaagttagagctgggattcaatgtctttggacacggttatcctttccacttggataacccatcgcaagcagcaagaagtgaaagatttcacagcgacttcctggagggccatatcatgataaccatccagacccttgctagactggccttctgccaaaggaaaggaaagcaggagattcctgaaggccaaagaacgcccgccaggaactgggcttttgagaagccgagaggtcagatcagcctatcctcacattattcagtgacgtcagcaacaattcactggggatttttccaaggttacaagcttcctatgatccctgtcttggagaccttgaaggcagcttttgaccttggcagccacgtagtggtggaaagtattggagggatcagtgtcaaggctttgcgtttggcttgtggtagcaaaaatcaaatagggtccaccgggtctcccagccaaggcagcttggaaggaaagagcccagaacaaaaacagtaaggttctgacatatttaaagtacaggatgttcaggcaagggagtgaaagtacattaggtttgttttcaattcataaatcatctagttccaaaagataattctgtacgttttggttagtttaagaaagacaaatgcttgactatgggcagcatataatcttttggaaaaaaacgtttcatttgattgttcccaggctttcagttgagaattttccaaggtgaagtcaccttcttgctgtggtctgcagctgtagaaagtctgaagttagagtctttgaccaaactcattatttttcctgccaatgatcctttagaggatttaacaaaacttcaaatttcact

SEQ ID NO: 476936 - DNA, 840 bp, Homo sapiens
aacctaactgcttgtagctcatgccatggaagtgacaagggttgtcatgacaaaacaaacaggctttgctggctggcagaggcttttgtacacgagtaaacgggacatcaactggattttcctgctgagctttccgggcagactcagtgactttgccagctctggcaggcttcttgggcactgcttcgatgatacccacagcaactgtgtgtctcacatcatgaacagcaaaacaactcggaggagaatagtcagagaagctctcagcacacgtgagcttgctaggaaccacatcagcgatggcgcattagctgagttcaagaatttggggccatcttccagcttcttaccagaacagcaatcagtctcctttaagctcagcaaacctgagatcgtgccactgcactccagcctgggtgacagagcaagactctgtctcaaaaaaaaaaaatggtttttactgtagatttttgtaaatagcctttatcagataaagaaaattcttttctagttccagtctcctaagagtttctatgatgaatcgatggtgcattattttaagagcctggaagacacagggcttgtactcataaagatctatgaaagtaaaacagaggcctgtgattcttgaatctacatttatgagtaaaatgagcctatagctttttactctgataatgtcttttcctggtttggtaacaaagttatgctaacctttaaaaaggactgggatgtattcccctttatagtacagcaataaatatgtatttgtgtattacatatatgttacttccagtgttcatgttgacaatattgttatcaatttgattcttgtcccat

SEQ ID NO: 476937 - DNA, 488 bp, Homo sapiens
aatcagaggtaacacctgccattaacaatgaatggaagccatctgaaagtgccccctgccaggcatcaggcagaacaccacttaagtgtcattgtctccgagtgctacacactacagattcacacattgctgtttgcctctggggaaattgatggaaagggtaggagatctgcagagacagaagccatatcccagcaagaagcaccaagactcatgaataataaggcagcccatttcctggactttacagccttccttgcccgatgtgctccctcgcccacagccctttggcctgctgacgggaatctggattctcttctcccaaactgtgaatgtgagattgctccagatggcaaagctgaatcaacagaccccagcaggaaggttgggtttatttcacagcagatgaaacctcaagcccgataactctatggttcttgcagactcatagagagtctttctctcttgcgtgtatgtgcagacttggc

SEQ ID NO: 476938 - DNA, 914 bp, Homo sapiens
cctgagcgagactgggcgagaggcagggagagaatatatgaaggcacatcaatggaagacttgcagaaaatgatggttgtggctcttatatacagattattagtttgtttctatgagataatttgcatttggggagcaggtggagctaccccagggaagttcctgctggggcttcgagttgtgacatcagtgcttattgcactaagttgggttttagtgattccttcctcaaatgttagtattacaacgtccactatacgagctttgatcaagaattttttgattgcttcttttttcactgctttcatcacactgctgttttttcagcataatcgaaaaacctatgacattgtagcaggaaccattgtggtaaaaagaaatgggttcacacttcctggggagccaccaaagaaggtccacacaggagttaggggacccttaccctcaggaacagttgatctattacgtggaaggtctagtctaaatttaaaaggtgtcactgtacatatgagaataattgactgtgattataccggagaaattcaattagttattagttcctcgactccatggtctgcctccccaggagaaagaattgctcagttgttgctgttaccttacctaaaactaggaagcagcacagtgaaaagaacaggaggctttggtaatactaatccagcaggaaaggctgtgtattgggttaatcaggtgtcggacaaaagacctatttgcacagtagctattcagggaaaagattttgaaggactagtagatactgaagctgatgtctctattattgctataaatcaatggccccagcactggcctaagcaaaaggcatccattggtattgttggagtaggagctgcctaggaagtttttcagagttccttgattttaccatgttaagggcc

SEQ ID NO: 476939 - DNA, 612 bp, Homo sapiens
caataaggccaattcaaattctgaaatgtttgtttcaccagaatgatatttactagtacagtaaacagaactacaaaacaactatgtcaaatagtgcaaacaacaatcaagatttcaaaattgcctaaggtggaagtaagagggagcttattaaacacctgcatcattgggtatttaaggagtggagattcagactgtccttggattaatgtagaaagtgaagtgtatcagagaccatctatgtggttcacctgcctcgctgcattcggttttgcttgtacaacagagcatgtgctgcatgaagcagcaagatggctgctcagttccgcaggctggatacagcagaaagatgaagagttcaagctgtatgacctgtgggtcccttacagccctaagctctacactgtattgcctgtgggtatgccacattagaaaaataaatatcaggctcatctcaggaccctatttactctctgacatcagtgccttttttgggaccacagtgtttctactgagagtggctttaactaacctgacttgaggaaaaagatcttcttcccatgattgtgcctctgaatagccactgcatctaacctgagcaacacagaaaga

SEQ ID NO: 476940 - DNA, 553 bp, Homo sapiens
gttacccagttccaaagtcacttccacattttcagggtcatggaggggcagggctaccagatcctggacacagcattatcgtttccagaccccctgaagcgactggccattgccattgctgttgtactaccagccaggacaggaggcagcctctatgtgcaggagataaacagcaagagattgaagtcggaatgtctgccaagatggctcctgaaatggcatttgcctccttctgtaaacagtgctaggtattttgtacatagtggggaagacccaccttccatgcgggccggcaccatccaatctgctgggggcccagaaagaacaaaacagggaaaggttctctggcctttggatttcaggacttataccagtgacccccacaaccctcaggttctcaggcctttggccttggacagaaagttacactatcagcttcttatttttgaggcctttgaacttggactgagccatattatcagagtctggagactctgagcatcccagagtctccagattgcagatggcctgcagttggacttacactccataa

SEQ ID NO: 476941 - DNA, 618 bp, Homo sapiens
gacagctcggagctgtaatgatgtgtcacccagagagagcagagaggttgccacagaccccctcccaggctctgaagcagcagcagacacacgctgcaggaagcctgccctgccagggcctggcagagccagaccaagccagcctgagagcagccggccaagaggccacctgtccattatcaacatgataacggtgagcttaacccttagtgttcaggtggccattcaggttccctccctctttaccatctatcatcgaaagtctccacaaaaatgcagacagaagtgcaaaatcaccacagcattgaaagcccgaatatttgtcaatgagttaggatttaacaactgccgctgtgcatcctcatttgacagagatggaaccttcaccaagcaaggaagggaaagagctcctcagaccctcagagctgctttctctgaggggactccaatttccatgatttcaacaactctgggctggataggcaagacagtgactcactgcattttgaaatatgaaactagtgttaagaagagacaaagcctttcagagccactggagcaatgcactctagaagtttgttttgcacccactgtttttgacaagtaaagaaatacaga

SEQ ID NO: 476942 - DNA, 588 bp, Homo sapiens
ggagtcttgctctgttttccacatggctggggacgcctcacaatcatgacagagggcaaggaggagcaagtcacatcttacatggatggcagcagacaaagaaggagaaagagcttgtttgataatggcaagtgtgatgacagagatgtgccagaagattatacaactcaaaacagtgagccaggctggaccacagggaagctcggaggaaagaagcaaaagtgcaggttccttgagaatgaccttgaggaggtggatggaagtaaagaggctgtgcctgttgacttaaaggtaggaggagcccaaactatccaggtggcaatcttaacttccagttcaatggaatcgttgtgtcccctggtggcagcgttcctccctctggaactaaaacctctagaccagcagaagctgtttcgggatgatggggaccatggtaagaccagtgaatcccatgagcaggagctcactgccgcatttctttagccataaaatgagtgcctttgtcagaggcaatgctgtgtggaataccatgacagtggataaggcattccatgagtccacagacggtggtcttggcagaagcattgc

SEQ ID NO: 476943 - DNA, 641 bp, Homo sapiens
tcttcttaaagattaatttatttgaagagcttgccctccaggctctaggtgccaataatcacctgacagcaaattccacgaatgcttcgccttgtgtattcatcatcaagttgcccaagtcagaaacctgggaaccatctcacaacatccctttttaatgttgatgaagagctcttgacaattcttcctcctaatctaatctcagtttttcccaccctctttaatccagctgtcaatgctcctgcctggtcctcaccagctctcacatgctgtgttacagcagaccctaattgtccccctttcaggcctcacctctcccaacccacagtttttacggctgccagtgttggttctctgagtcagcccagatattgcttccttcaggcctctctgctgcaggtctgctggagtttgctggagttccactctagatcctgtttgcgtcagtatcaccagcagaggctccagaacagcaaagattgctgcctgttcctttctctggaagcttcatcccagagaggcacctgccagatgccagccggagctctcctatatgaggtgtctgtcaatccctgctgggaggtgtctcccagtcaggaagcacaggggtcaaggaccaactgagtcccttagcagagctc

SEQ ID NO: 476944 - DNA, 793 bp, Homo sapiens
ggcagacccacagaagaggggcctgtctgttagaaggaaaactaacaaacagaaggcataaatccacaaagatgaggaaaaaccagtgcaaaaatgctgaaaattccaaaaaccagaatgcttcttctcctccaaaggatcacaactcctctccagcaagggaacaaaactggatgaaggatgagtttgacgaattgaaagaagtaggcttcagaaggtgggtaataacaaactcctccaagcttaaggagcatgttctaaccccacgcaaggaagctaaaaaccttgataaaaggttacaggaactgctaactagaatgaccagtttagagaagaatataaatgacctgatggagctgaaaaacacagcacgagaacttcgtgaagcatacacaagtatcaatagccaaatcaatcaagcagaagaaaggatatcagagattgaatatcaacttaatgaaataaagcatgaagacaagattagagaaaaaagaatgaaaaggaacaaacaaatcctccaagaaatatgggactatgtgaaaagaccaaacctacgattgattggggtacctgaaagcgatgaggagaatggagccaagttggaaaatacacttcaggatattatccaggagaacttccctaacctagcaagacaggccaacattcaaattcaggaaatacagagaacaccacaaagatactcctcaagaagagcaaccctaagacaaataatcatcagatccagagttgaaacgacgaaaaaaatgttcagggcacccagaaaggtctgatt

SEQ ID NO: 476945 - DNA, 751 bp, Homo sapiens
ccaaaaggctttttttttttttttttaaatgtgttatcgccagatctctcttctattattcaggtctttaaaaaagagagaaagggagggagggcggctggcccgtccagtggcttgtttctcacactgtgggctcccaggcagtttagggcctttctctgaaacatgcttctctcagaggcctccgaattcctcagacattcaaccagccccagccccggggcccaacactcgcagaccagctgttacaactttccaggacgctcctaaattttctaaatgtgtgccatataaaaataaaattgaggacggtgagtgttcaggagccctgtgtgtgaagaatataactcatccggcggcttgggcccattatttccacattcttccgcagctctcagtttcacctcgggcctcagagcagttcagcgggaagctcaaggcctgagatttgggtcaagtgatcattttttttttttttttttttactttttctgccttagttttcttttaaagtcccccttttatttggaaacttttttttaaatacaaaaatattgaaagaaaagtagaaggttttatatttatgtgtgtgatctattttaaattaacttttgtgtgttgtgccaggtataaataggagttcatttttaaaactatattgatattaaattgacccagcactatttgttgaaaatattatcccttctctactgaattgttcttgtcactttatcagaaatcaatattccaa

SEQ ID NO: 476946 - DNA, 655 bp, Homo sapiens
aggaaaaggactttcacaagccaatgacaaatagcatatctttcagtggccaatgctcagaaactgtattagtcagggttatccagacaaacagaaacaataaatggaatgtatgtatgtatatatgtgcatgtgtatgtgtgtgtagtgtgcgtatatatgcatataaagatttactatataaaaaattggctcattcagttgtggaggctgagaaatcccaagatctccagttggccatctggagaatcaggagggccagcgatataaattccagtctgaatgtcgacaggctcaagactcaagaagaatgtaaaagcaacagcataaaaaaaggcctggtgactcagactcagaaccttcaaggtcttggtctgaacatgccatcaagtaagccacttagataaacagaggtggcctctgaagatgaagattttggaggattggtagaggaaggatatgatgattgtcagtgaaatcagcaccgacaggaagggctgttaaccattttacatattccatatttcttggagacttcattcatttcttttaagcctttcttctttttgtcttattgggttagtttgaaagccttttcttcaagctctaaaatctttcttctacttggtctagcttattgttaaaatcttctacc

SEQ ID NO: 476947 - DNA, 612 bp, Homo sapiens
atatccagtgttttttgggccaccaatgtacctaggaaaagacagtacaaataccttctctgttctgtcaattaccttgcctgtggtacccttccttgatcaaaaatctttgattgggcaaagtagcagaagtaccattaggcccttatttagcatttactgtgtgctagccattgctttaaacatttttcatatattaaatcatttaatacctgttgcaaatatgaggaaattgagtcacagagaagttaaaggattgtccaagttcactcagctagtagaatgtgagatgacaggtcgttgtgaatatgacttttccaaaagaggagagtttctaacttttcaaggccatgttcattctcctaattcattaggtggtcgaaaagctctgtcaggcagaattgtcaataggctaagatgtatttcaaacacgacgtccaaagatgttaatctttcttttcggattctgcctgtgtgaacagtgctttactcagggagatttagtaaaatagctcttttactctcacaaaatcaattctgtgtaaaaggtatgaatgaaatctttcagaaattctaaattgtagtttagtttatatgaaataggtatatttt

SEQ ID NO: 476948 - DNA, 1014 bp, Homo sapiens
tgaggatttatatttgatgtaggccagcagccagaggcaccagcatttggtgatcatcttaatccagttacctggattgatatggttcaaagctgggcttctatctctatcattgcttgtctgcacgcaaagaagcaccttgcccagaaaataagggaagagattctaaaagaattcactagtatcaatgggttgaaggccaaattcattactttaacactaagacagcaatgtgtgatccttctagagtcctgtgaggaccctattattgtttgccttaagtgcctagatcccatagcacttgctcacagtgtatccttggaactacccctgctaaataatgcctgtgataataaacacaaaatggtgatctttgatgcagaaggaagtttcgggtttggtagactattaattgctgcctcaatttcagaacttgttattggtttattcaggattcgacttcttcctggtttagtcttgggaatatgtatatattcaggaatgtaaccatttcttctggattttctaggttatttttgtagaggtgtttatagtattctctgatgatgtttttagccttatgttctaaataatgtttccctgaacatgatatgatatatttataactgttttaatttttgaatcttgggcccctcattttttgttttgcatttggccacccaaattatgcagcaagatctgagttctaatgaagcaaaggtttattgttgagttataaattccatgatctttgagctattaaagtctttatttattgaatatctcataacatttttccacttcaattttcttaagcttggccatttatctgcaacttagtatttacctggcaagcactattttctgtaacaattttcgcagtcaaagcttctataccctctgattcacaacgggatagaaaataatttcctatattcccccttcactgtattcctcaagcaaatatacaacattttgaatgttttattacaatgttattactattaatgaagg

SEQ ID NO: 476949 - DNA, 1146 bp, Homo sapiens
tttagaagcagcctctgcctgcatggctatatgtgtctagaaatttatttatacaccaaaatcaaatcaaaatggagtaaagatttaaatgtaagacctgcaagtatgaaacaactagatgtaaacattggaaaatttctccaggacattagtggtcagagaaaagaatccttgagtaagacctcaaaggccttgccgcatgtcttgggctgtttacagcgtggtgttctcagccatgtcgaggctgacactgaggaggaccccaactgtcacgagcaacacccgtcaaacacagccacccacctggggacagatcaagaagctgtcacagatggtggaagaaaacctgaggaaagcgggacaaccagtcaaaatgagttgtggttttacgggaatgagggcaaggaacacctggcccgcacagggcggaaaaccgcttaaaggcattcttaagccacaaacaatagcattagcgatttatgccttaagggcatgttcctgctgcagtacacatgtgttaggctgtttggtgctgcccacagcttactgatgctgcattcattttttaaaaaattatgttttgtctttgtttcattttggataggtcttattgtggtgtcctcagatcactaatcattttttctgcgctgtttaatctgctgttaatctgatctgatatatttttaatttcaggtattagagttttcacatctaaaattttcatgagtctttttttattgtccatgtcgcaacttaagtttttggactacaaaatgttaagtagagacacagacaatagaaatatggactacagttgtaatagctgttataatgtcattgtctgctgtttctaacatctatttcaattctaggttgttttcaactgattattttttttctcattatacatcctgcaatcctgtttctttgcattcctcacattttctgattgaatgccaaacattgtgaactttcttggtaaggttgtgaatatttttgtattcctatgagtatctttgagttttgttctggaacacaattaagttatctgagaatagtctatttttttcagttcttggttttaagatttttgagagggaccagatctgtatttagtctaattttcccctattactgaaacaaaac

SEQ ID NO: 476950 - DNA, 549 bp, Homo sapiens
gacctacagaaaccattatagacaataacatcactgctgttttgagccattgagagcagcttggaggatgagttatagggaagtccagaatgaaagcagcgaaaaaagcagttggaaaaactgtaagaataatccacttgacaggcttcagccttgccttagcaccaggacagctccaggatccaggccagtcacagtggttccagggtccagtgggcctagggtctgggactaccccagtagattccagttccagaacaaccccaataggctaagtttttggggctacccctgcagaaccaggctcaaagcccacaccagcaccaagttaacccctgtagagacaaactttagactacatgctgtggatacaggctccaggcctgcccttatagacccaatcaacaagtccatcccagtagatccaggctccaggctcaatcccacggacccagatgccaggcttatgcacctgctcacccaggcaccagccagcctgcccaaggactctagcagaaagcctgcccatgaagaatactagaagtctgg

SEQ ID NO: 476951 - DNA, 960 bp, Homo sapiens
ttatagaatttcagttttacaagatggaaagagttctgaaggttcatcagtatcatccatatccctgtcttctacctcaacatcttgtcctgctggaaggtcttcaggggcaagcacgcacggagctgttatcttctacgataacaatgccttcttctggaattcttcctgaagaacttgcctgtggttattttacagtcattgataagaatgcaacaaagattcatgaaacacaatcacatcaaaccacatccaagtccttcatacatgtagatgcttggtgccacaaaggaatgatgcagatagttttaaatattagttccattagatcatgttctacattatttttctatcagtacgatatcttgagagacaaactatctagtcaaaatgttcaatccatcaaagcctccaggttgcaagtgttggtatttctaagggaagaaataagaccatttggagatagtcatgcaagcctataacacctcaggtattacaggaaatattcacaacaaaagaacaaagaatagctgattataaaatataatgtgcattcttgaaatacattaaaatattaataatgaaattatgagaatattgcactctgtgtgaataaaagcaccagatctgattttcctgattcatccatatggttgagaaataatgaaataaactactttttacttctttcgaaactgtatgattcaagatgatgtgtcgctgtgttgcctagtaagacaacaaataaccacatatgattattgagtgtttggaatgtgtctatcctcagttgtgatgcattcttagtgtaaaatacacacagagttttaaagaaagacttagtgttaagaaaggaatataaaatatcgccttactactttaatatattaatgatatgttgaaatgataatatttgcaatccgttgggttaaagaaaatatattataaaaattattttta

SEQ ID NO: 476952 - DNA, 646 bp, Homo sapiens
tttgagtgaagagcatagaagttgtcattggactatctttgaaactcttctgcagccaagaaggctatggactctgagaaaactgaaaataatttgaattttattcaccttttaaccatgaaatctagccggggaaataacttaggagataagaaacagacaaaggagctgaatttctctgagtcgtactgtgagctggagctgaatgtacatgaatctgatgtgtcaaaaatatttataatagatgacttggggccccgatgctgcagccctcaggcagtcaaaactccaattgacttcagtgggaactttacctgtccaaggtccagctgccttgtgcctgtggcagtgtcccgattttccccgtatagtctgtcatggattcccttggctaggaaagggaaatcccccaaccccttgtgcttccgagaacaagtaggaatggctgagaacactgggggcatggaccccaccctgggcacagagccatacaaccaggaaagaaatctcaaacactcagcttctccctgtggagaggagggtttggatttcacatatactgccctaactctaaggtcctcatagttttgcttttatgtaatcaatttggaaaggacagaggattaggtatattcttgtctaagat

SEQ ID NO: 476953 - DNA, 694 bp, Homo sapiens
caaattgactcagctccagagcccataacctatatcccccttctcaattactgctgaataccatctgtataaattaagatggtccagaaaaacagaccaatagggtagatagataatagaaagatagataggtaagagaaaatttattatggaaactggcttatatgatcttggaggcactggactcccaaggcacaccctctgcaagctggagaaccaagaaagccagtggtataattcagggatgacaggtgtaagacagagaccgtatggcaaagaaaaatatattagaagtatccttcttgcatttcaacaatttaatcccaatgatgttaacactgagcaaaatcctaaagttggcaaatttatgtttggcttgcttctactgctgtttcacaagctctcagttctcaagataaatgctgctcacaaagtgagtgaaggggccttctttgtttctaaggatattgaattagcaacagacatagtttctgatcaaaacgagagttgttttggctcttcaatcaaagttgttgaccataaggagacaatagagaaattaaatttagaggaagggaaaggctttgctttaatgatctcaaagtgatatttagtttagctgagaagatgatatcaggatacttttccggcttagaaaaaaagactgcatcagactgaggatgacaggtcactg

SEQ ID NO: 476954 - DNA, 718 bp, Homo sapiens
ataaaaccataaagtctcctaccttcctcttatactcttttttcctcctatagtattctttctctttattctttttctcatcatcctttgacgaacttttgctgactggagagtctgaggactgactatagggatggaaaagaatccatggaagccaaaatactttatttcctgtggtagttttggcaagccctgcatccaaacagtacatgaaagtcccagaattaactatcagagcttccacatcatgttcatctttgagtgtatccacttaaccttcattgaccttattgtgcaaaaccttcaaaaagcccgtgggccaaaaggaggtcagaataacacgctgctggatactttcttgcagggaggtgtggagggagaggcactggcgggaactggggctgcgcacggaacttgcgggccagcgcgagttctgggtgggcgtgggctcagcggcctgcactcggagcggctggctggcgccgtgagcctggggcagaggccgccccctactccacagccccgggtcccatcgaccgcccaagggctgagtacagccgcacagtgtgggactggtgggcagctccacctgcagcccagtgcgggatccactaggtgaagccagctgggacttggagaacttttatgactagctagaggattgtaaatacaccaatcagcaccctgtgtctagctcaaggtttgaaaatgcaccaat

SEQ ID NO: 476955 - DNA, 650 bp, Homo sapiens
aataagggaactttcccattcaccgaccacgtaactgcaagcaggggtgggagctcagaaatcagcatccgatgctgccacaaaacagcgcgtatctcagcagagaccaacaggaactgaagagcccttctcagttcaaacacccatctgctaaggctagggagacttgtatgtctgccaaagaagttgaaatacctccaaggagaaagagaagcaagacacctaaatcgaattcaatatttaaaccatttcatgaagagactgtcctttcctcaatatatgttcttgacacctttgtcaaaaatcagttcactgtagatagtatggatttatttctgggctctccattctgttccatgggtctatgtgtctgtttttataaaaatgtcccagaagagacaacaagaccgagaggtattcataaagagagcttccaggagataaacagggcaccagaagagattggcagcagccataaatttaacactgaagaagcgtaagtctacatatgcctgtcatcctccaactacttctgcacatatgctattttaataaacgataaatttgttcatagaagtgtaaatattatttttctgtgatagatacaagttcccccatgtagcatctttgcttcaaaatcttaatgagaa

SEQ ID NO: 476956 - DNA, 637 bp, Homo sapiens
tgacagctgcagcagcataaaatgtctgattgctctcccggatgaacagtgcttccttgttcttaatgacaccagatggcacagcctacccggggatactcaggatgctgggaattgttttcaaatatctgtctggaaaagaaaaatggcttgttagaaggagaataaaacgttatctgtatcctgaaagtaatacagataaacaagatatagactatattgactatattgatatagactatatagactgtatcactcaaatagcaaataacctgaaatttttccaaatagttttcatgtgtgtatctatagaaatatatgaagaggactcaattctgatgaataaaactctaaagatttcaaactcagaaacaattactctaagaagttcctctagaatctttcaaccttgcatctctgaattagctatttcacttaaatatcaaatgcaggcacattgccaatctacgtatgaaagtgaggtcacactgaatatctaaccactcgtaaaagtttcttcctcatttactattttaattcattgcatcattctatgatctgtcttctatatcagctcacaaatttattggaggtacaggtcatcttttgtgcctggaaccaaatatattttcaaata

SEQ ID NO: 476957 - DNA, 725 bp, Homo sapiens
tgggaactcacttctggcatcagcatgacctggatagtcccactggaatgcagtggtatgatcacagttcgctgcaacctctgctttccgggtttaattgactcacagttctgcacagctggggaggcctcaggaaacttacaatcatggcagaagtcacctcttcacagggtggcaggacggagtgaatgcaagcaggggaaatgccagatgctcgtaaaaccatcagatcttgtgattgtcatgagaacagaatggggcacatggtacaagctgttggtggatctaccattctggggtctggagaatggtggctcttctcttatagctccactaggcagtaccccagtgggtactctgtctgagggctccaaccccacatttccctttcacactgtcctggaagatgttttccaccaggtctctgcccctgcagcaaacttctgtctggacatccaggtgtttccatacatcctccgaaatctaagcagaggagaattagacctgacctcttacctgaggtaagaggtcaggtctatttctgtcagaaatagaaatgttttttattctgtcaagtgattcaagttttattcatgaattatataactgctaaatacctacttttgcaaaaactattcagcatatttcttgtaagtacatagaaattcatagaatatattttgtgtacaatattttgtaagagaaccaacatatttttgaaacac

SEQ ID NO: 476958 - DNA, 610 bp, Homo sapiens
aaggaaaaaaatgagaaggtggatgctggatacttggtcttctcatagatctaggaggtactactgctcagatgtcatgattgctctggagtgtttgcaacaaaggacactgttgatttcttttatgatgtttctttataatttgagggaatggcaggactcggaagtctcttttttgctttttctttcttgttttctctctatgaatgatttttttttttctggtaaaggtagttttatttggttgaggtcttttgctactaactcttcattcagtgctgtagatccattccaatgtccatttagtgagaatcactgggagcgatttgtgcaattgattggtgacatcgagcacagaattgatgcttcattgctttgggagtccttcctagaggagacagaattgtcaaacaaaatgcaggagagtatttcatctgggtgaaactggatatcacaattgttagaactcagcttctgaaaatcctgcttattttctctctgctttttgacaccaagccgtgcctaactcccctgaatactagagtggtttgtatttgtattcatggtagctgtgcactaaaactactgcagataatttagtcttgatagc

SEQ ID NO: 476959 - DNA, 721 bp, Homo sapiens
tgtcccttcaccccaatgggatgcggcctcaggccgatgggaagacagatgtggagccaaaactgatccatctgtgtaagcaaggagcttacaagagccatggcctgagctctaagttggaccctttcagccaagattggagcagctgggacacaaggcagtatcttttcagcaatgccccactctactggtaccaatttacagcattagtccattttcacaatgctgataaagacatacctgagaccgggcaatttacaaaagaaagagctttaattggacttatagttccacatggctggggaagccccacaatcatggtggaaggcaaggaggagcaagtcacatcttacatggatggcagcaggcaaagagagagcttgtgcagaaatccgtgttctaaatggcatcagtgggtcctggctgttcctgaactctctatcagagtgtactgtgaggtttcctatatcatagaagtaatgtgattgatcaagaatcttttgcctttttaatataaattacatttctgtgattttcatgatgtaattgcttcagtgtatagttctttttcatgctaaatttcacatttccttgatgtggtcagtttccacaaattcaaaccagtgaaattcaaataggattacatttctttcatctaaataatttatcttaaaaaaatgaatgtgaatatggtggattagaaatagaaagcattggatac

SEQ ID NO: 476960 - DNA, 1570 bp, Homo sapiens
ctgctcacaagtgtgcacatctctcccaggtgattctgatgcaagtgatccacacaccacatgttgacaaatactgctctagaagtttactgaaagaactcctcagagggctgctcatccagactcagcaggagaaatactggggccactgtgcgctgtccactcggcagctgaccacagggcctcatgctacgccgcttcctctttttggcagagggcgtttcggccaggttcacaagtgtgaggagacggccacaggtctgaagctggcagccaaaatcatcaagaccagaggcatgaaggacaaggaggaggtgaagaacgagatcagcgtcatgaaccagctggaccacgcgaacctcatccagctgtacgatgccttcgagtctaagaacgacattgtcctggtcatggagtatagcctgatgaaatctcccaccgtcccgctcggtcccacccaggacgtgaatcatccctttgtccagcgtctccaccactccctgcgtgtggatggtggggagctgtttgaccgcatcatcgatgagagctacaatttgacggagcttgataccatcctgttcatgaagcagatatgtgaggggataaggcacatgcatcagatgtacattctccacttggacctgaagaatgaaaacagtcaccaccaccacagcggtatccacgtggtagccctctcatcaggacaagtaggtctccaagaatcgccggcagctcctcgagtcactcaggaagctccagactttgggacttgtttttctgtgggtttgctgccctgtggaatagaatcctatggagaatgcagcagaggacagtcggaaggatggggccaaagtgctaaggagaagagagggtggggcattgagaccaaactcagcaaaaccttggaactgctgagactgaagaacgactggagagaaaagccctcctctgccgtgcgactttcccataggcgcctctgcctgaactcaggcattatggtgaactgtgaagccgtgcagaggacaggctggataatgcagggttggcaggatacccgcaacctcatccaccacataattaaaggagaaagtacccacacggacaagcccgccccgaaatacaaacccagagagaagctgaaggtgaactttggaaccccagaatttctcgcccctgaagttgtgaactatgattttgtttcatttcccactgacatgtggagtgtgggggtcatcgcctatatgctcggtttgtcgcctttcctgggtgacaatgatgctgagacgctgaacaacatcctggcctgcaggtgggacttagaggatgaagaatttcaggacatctcggaggaggccaaggagttcatctctaagcttctgattaaggagaagagggaaggatgcccatggagcggccccagccagcccccgtacatcttctttgcttccttcctctccctcgagcccccatctcatgtttaatttacctccatgttgtgtacatgatatcccctaattacctctggaagctgtctgtttctctccattcccatggtgaccgtggcctggga

SEQ ID NO: 476961 - DNA, 824 bp, Homo sapiens
ttggggtgaggggctgtggtctccgtggcccctaatccctctctctcccacaacccctcccacccataaggccgatccacaggcccatgaaccaacatgagagttgtgccagttatgaaatatgtccatgccaattatacacccagggacagcgaagatgactacggggtgggtctgtgggtcctgtggactcctgtagcccagacctgtgccaggactccacttattaactggcctctacatgccctgctccatcaaggtagcagtggggacataatgacattcgggatccctggctcacactggctgggtcctgcagctgtcctcagaataggccctaacctgctccccaagaccagcacacctccagccagattaggctgtgacttaaccccagaaaatgtcttgttcctctactttatgcaaagcgtgtgccaggcagtcaacgagcatgcacttttgcacatttttcagacacccttgttggctccagccttggtagcacatggctgggctatggcaataaaagtctggcaagttagcaacccgtgctctcctcagacccagggaaaagcatagctttatggtcaccagcaatggtctggagactgtagttttaaaacattgtacagtcaattctccacatgcataggagtagaacaaatcatctgaaaggctttgatatttggctccacaggcattgtgcatggggagtaaaagggattgatttttgttttgagttgttttaatttttgtcttttgcaggtttaccttctcaattatattttgattagataaattgtaaaactgggcttcattccctc

SEQ ID NO: 476962 - DNA, 795 bp, Homo sapiens
cctggggctagagagtcgcggcgatgcctgcagagtcacttggccgtcctcgtttcctgcatcttcgtgactcccggccatcagtgcagatggggctccccgccactgtccccaagatatcccggggctcagcatttcatgtagttatttccggaccccaggcattcggaggcccatatggctttggctaccaggcagagccgtcgactgggaatgcagggaggtggttagaagctgggatgaagaacgacctgcgcctacctttaggaacacacatcgcttcaactgctcctcagaaatttctcatggttgaagtaaacacacaagacagcttggcaatggggttccccttccctgaggagttctccctgacagagccgctccgaattcctccggcagcacgcaggtccacacagtcagtgtgtgcaggggccatgagtaaagcacagaaggcaaggcacgctgcgggagaattcagagggcgtccgtgtgggagctgtctaaacggtgtgacttttggatcttctgcctttcgaaattctttccccttggctcactgaggcctgaaattccacagtcacaccctcccatgcctttgatgtctgccagacaaggactttgtcctccacgagaataccctgcaacagggagagcacacgcgaagcttctctggacatttttgtttcctcagtacgtttatcagattcttcctgagaggagagattccattgggtggatttggaaaatgaaaacaaagcaagagaatgttgggtgcctgcctagtatgtggaagat

SEQ ID NO: 476963 - DNA, 555 bp, Homo sapiens
aaatgactgtatgggcaccaggttcaggtggagcaagctgattataatctggttggctgaaaaacttgttggcagtttctttcttaactctctcgtgccaatggaaaacaagcccgctgccaaaccccattcagtaagaggcactaatgaacctccagcaatcagaccgttgatgtcagacttgttagctggggccaacatttatacacacgggaatgatcagtctcttgagatggacaatatttatcaagcatcttctcatgtagcacactttaataaaagtccaagccaaaaggggccaacctatgccctctatggcaatataaatctccagaagttgctgacctatttacagtttgtgacccaagattctttatgcaatagaaatagggttttgtgaaattttaggatttggaaaagacctcacggattatctattccagtgactttatcagactcaagatcccactcttccccactttatggaggaataatggaagtatgtttttgaggtgtacaatctgatcagttttgtgtatgtatacaactttggaa

SEQ ID NO: 476964 - DNA, 1044 bp, Homo sapiens
ccgcgagggtccatggcttcattcttgaagtcaaaatccgaaaactccctgcccccaggacctcctctgaatccactgcgaaatcctccagggatggttaaagtaccacatctgctaccaccatgccctctgccaccacagaaaccgaagatccctctgcctctgcgtctcccacagccacgatttggacaaagtgggattccaaatgtttcagcatttaatcttctttcttcagcccaggttgatatccgtggtattggacgatctatcttctgtaccagaaaattgaattttagcgagggctacggtggggttctacgtgtcgatggtgcagaggatgccctcgtagcagatctgtgccttggagatgtggctgatcttgctgtggaggaaaggggtgaccccgctcatggtgccaccgcagctcccggcgctcgcagagcggcggaccccaggcggctgtcaggcgatccacagtatccgtcgcgcctgtggcagccgcctcagacctaacatggcggcgccggcgccagctccgctaaatcagctttattttcacttcattaaaagaaaaattgaaaactccaaagaacgatcttgacttctaaaatctgaaaaacgatatcctttaggacttaaatcttggattgttttctaagatgcctcaaataactgctgagcaaacttatgtctaaattattgctgtcttcacaattcagtaaaaccaatagtaattaaagcatctattactgcgtaggcccctgcggtgtgctacatcaaagacaaatatgaataagccagtccctccctcagagaccttacactgtaatagatgcatttcattttattttacatatgagtgactaaaaaaatgtgttgaattgaaataaacacatcctcaaatagctaaagtgcaaagtggaacaaggttggtaccactagaaacatacaagcacaatgctatgggaagataaagataaaagaaacagaggaattctgcctggctagaagttgaaggaaggctttatgtgtaaggtagcattc

SEQ ID NO: 476965 - DNA, 849 bp, Homo sapiens
tatcatcaagtttctgctgaccgctgagtctgccatgaagaagacagaagacaacaacacacttgtgttcattgtggatgttaaagccaacaagcaccggatcaaacaggctatgaagaagctctatgacattgatgtggccaaggaagtcaacccagcaatggcagtgatagtctttgcgatcatccggttgatgatgatgttactgcgccagaaggacaggactccctgctccttgagaatacggacctatatggtctataatgcccttgtattgcttatctgcggtgatctgcttgctggcacactgtacctgcagcagcagctcgatccgcttgatgggagcaacctccgtcttggagatggccgtggccactctacctgccaggaagtccttgaaaggaaagaggaggcaggttgctgccagaagggactgggccgggaaccagctttgactccggggctgcgggtccatttgaaactcttaaattgaactaggaaaaaaaaaggtaattttatgcttcctatcaggaaggtagtgtttctcacttccaagaacttagcactaggtagatcttggttatgactgataattaataagttacagtaaagagtataagttatattctttcctgactttagctttcttgggaaaaacgcatactgactagcactgtgtctgtttactcatttatctttcctatgttaataaaatttagcacagacccttctctaaacttatggaatggttattgcttgtacaactttagggtatttcttataagctgctttattttgtcaagtttttatgtgtgtttttttatatgtacacatgtatatttgtgctat

SEQ ID NO: 476966 - DNA, 986 bp, Homo sapiens
tccgagtcacggcgccaaatttcatgcacgtctgtgtgaagagaccaccaaacaggctttgtgtgagcaacatggctatttatttcacctgggtgcaggcaggtgaaaataagagagtcagcgaaagggagataagggtggggctgttttataggatttgggtgggtaaaggaaaattacagtcaaagggggtttgttctctcgcgggcaggagtagggacacttactttggatatgggtttgcctatcctgcatgcaatgcttcttccaagactatcatctgtggactcatggaatgccttatccaccatcatggtattccacacagcatgtactctgaccaaggcactcactttacagctaaagaagtgcagcagtgggctcatgctcatggaattcactggtcttaccacattccccgtcatcctgaagaggctggattgatagaatggtggaatggacttttaaagtcacaattacaatatcagctaggtgacaacactttgcaagcctggggcaaagttttcccgaaggccatgtatgctctgagtcagtgtccaacatatggtactgtttctcccaaagccaggattcacaggttcagaaatcaaggggtgcaagtggaagtggaaccactcaccatcacccctagtgatccactagcaaaatttttgcttcttgttcccatgacattaaattctgctggcctgaaggtcttaaatccagaggaaggaatgctgccaccaggagacacaacaacaattccatcaaactagaagttaagatcgccacctggacactttgggcttctcctatctttaagtcaacaggctaagaaggtagttacagtgttggctggggtgattgacccagactatcaagatgaaatcagtctactactccatccagagcatgtaagtgttgttaactttatgtaatattatttgggttggggattggtgcatttccagttgtatgaaggatag

SEQ ID NO: 476967 - DNA, 600 bp, Homo sapiens
catagtccacaagcaggtttagcgatggtgaaaaaggaccatcagtctgtcctgaaagctcccaggacgccaaaccttgaaaatgtggcagatttctttgatggggccacgtgtgtgttttcctttctatttaagcatgctctcatggaaaacgattttgtatggacacaggaggaaatttcgaccatgagtgccttcgcctgtgagccctacggtctgccgggactctgtgtgcaggagttagatcctccaacagaatctcccttccgaaggcttctgacccagagggaagagatgcagcgaggccatcaaggcaaagatgtagcgttccagggtcctgaagacatctcgcagcacttcattggctgcatagcattcggcacagagcatgcagaccctttggctgcttaggttatgtgtgtcctggtggccaacgccgtgtttgttacacttgactgcacgtaattcttgagaatatgttcatagcctcatctgaaaagcactgaacttctgcaaacgccttttaaaaaaaaactttattgagatataattcatatatcatacaattcaccatttaagtgtcttatgatagaagattag

SEQ ID NO: 476968 - DNA, 481 bp, Homo sapiens
gattaagtcagtctctggaatagagtatatggttctgggggagagcctatatgaagatgtacatttgggaatcatgaatatagagttggtatgtcagaccataataatggaagatatcatcagagaagtgaatgtagatggagaagagaaggatccaaacactgagccctgcaagattccaacacgaagagcctggagaaatgagaaaggagcaagcaaaagaaatcagagggtaggagatttagtgcatgagggaggccgtggcctaagaggacgcacatactttccatctattgcaacaggaaggaagacagaatacaaaggtttgaatgctggggtgggtggatgtggaggtgggagcttgcagaaggtctcttcccatggcttccaatttccccaagatatggaagctgagtgggaggacagaggaggtgggtgtggtcatgaactgggagagtaggaggcctggggaatggagcac

SEQ ID NO: 476969 - DNA, 734 bp, Homo sapiens
gcctaaaatttaaagaaactgtagatgtttgctgagggctgccccaaatgcccccatcaaaaggcatcagcctaaatgggaaaaaatgtgtcttcttcaatccccctgaagttcccctcaatgattttctgttctgcaatgacatttccagtcaaagaggccaaagagataaaactgctgacctaaagactttttcttctgctcctgggggcagtctgggcacaaattcacagagtgcgcagtggggaagtgaaattgatggtgccaaacagcatcatctaaacaagcagaacccagagggggacatgaaaacgtccagcttcctttatggctgtgagacatggaccagtcgagacattatggaagacagtcagaggatcacagtccccacagatgaactgaacaataccaccagggtttcagctccaaaccctccataccagagagccctagctcaaagcagtgcttaccaagcttcagacctggggtgccacctttgtgatatttgccatgtccgatacctcctctgatgtttaattttatgtttcaactagattgggccgtgggtgcccagttatttggttaaacattattctaagtgtttctgtgagggtgtttttggaagagattaatatttgaactggtggactgagtaaagcagatggcaacccacacgtggggggacttcacccaatccatcgaaggcctgaaaagaacaaaaaggctgaccctcc

SEQ ID NO: 476970 - DNA, 697 bp, Homo sapiens
tctttgaacgaccccacggtccagcggcagctgtggctggggtctatcccagagctgctaagaaggggagtgatatgatcaaaatgatgcttgaggacaacggttcttgctgttctggctgctgtgagcagagtggattagatgaaggagatcctcaggctgggggtgctgatctgaggctgtttcacaaaccaggtgtgaggggacgtggcctagaacaggattctggggatggggtagaaggagcagagctcgaatatgttatgtgggataaacattcattcattcttagaaccgggcactgggaaacaaatgttactggaaaggggtctggatccagactccaagagagggttcttggatcttgcgaaagaaagtatttggggagagaatcaacaaatatttacaatctcttctctctgaatactgctacctggaagcctcatctccataataagaaccttggtctctacaaccccttgtcttaacctaggcatttcctttcttttgatcccaggtccttagataaactctttaaccaattgccaatcagcaaatttttaaatctatggcctggaagctcacctgacccagctgttttgagttgtcccacctttctggacccaactgaaccaacaagaaggaaaaacacctaggatgggtgaaatgcattgtcgtagtcagcttgggctgctat

SEQ ID NO: 476971 - DNA, 556 bp, Homo sapiens
ctgagggtgacctgtacgaccctcctctcaggaagcctttctcagtcctagtcagcatgaaccagcagcagcctcaggaatgggatctgggctttattcttcactgtgtcccacctatgctgggtccgaatgggtatctgcaaattatagagcttattggctgttcacaggcagttcgtgaagccagtgtcatggagcagctgagctttgctcaccctggcaatgttttctggaatgagcacttggagaaagtttggtggttcaaaggaaaggaacctaaggaacagaatgaaagtgaaggcatgtcattggtcaaaacaactttgcaacaagggaggcactggcggaggcaccttctagaagtacactggaagcctgaagaaggctacagtccaatgcacagcccagctgctggcttgcagcacaacttgctgcctcccgccatgtggctgaatgcacacaggggtgccctgacactggccattttgcaaagatccaggggacaatggcagctggtagcagcaggagtggggagcccacagcaaagggattaatg

SEQ ID NO: 476972 - DNA, 1074 bp, Homo sapiens
cgtagaggcacaggagggtggtgatggcggccaccggggctgtggaagtggggtccccggggtcagccgttgccccctcgcccgccctggacttgctgcctgccctgggtcatctgttctggcccatcagcgccgaggacaaggagcagcagcccacccagatcaagtcactgtgcatgaactgttaccgcaatggcatgacgcgcctcctgctcaccaagattcccttcttcagagaaataatcgtgagctccttttcctgccaccactgtggctggaacaacacggagatccaatcggcaggcaggatccaggaccagggagtgcgctacactttgagcatcagggctctggaggacatgaacagagaagtggtgaagactgactctgctaccacaaggattcctgagctagattttcaaattcctgcctttagccagaaaggagggaacagctttgtggaaaacccacaggctgctcagaaagatgatgccctggtgatcacacactacaaccagacccgacagcaggaagagatgctggggctccaagcagaagcaccaacagagaagccagaagaggaagatctcagaaatgaagtgctccagtttaacacaaacggcccagaatgcaatgcccccactcagaccaacatgaagctagtacaaatccctcactttaaggagggaccaagtacaagaactgcgtgcaagttcaccacactagaagggctgctgaaagatatctgggaactggtgaccaaaaaccctttcacactgggcgacagttccaatcctggccagacggagagactgcaggagtttagccagaagatggaccagatcatcgaagatcttcctggttatggttcacatatatgaaggggggagagagaggcctcctaaaccaggtgtccgaatattacaacatctagaaagactcttgaacttacacttcataaaagataaaaggagtgtttttttaaagagcaactgagctactaatgagaatttggcactatttatgtttttatgtataaagaaccctaaaggacattcgatggattctggtatc

SEQ ID NO: 476973 - DNA, 558 bp, Homo sapiens
tgccaaggttttgctttttctgagtctattaatgtttccatggttgaaataccactctctgattagctcaataagtcattttaaaaacagcaattttttttattatactttaagttttagggtacatgtgcacaacgtgcagattaaacacaccactctccagcagataatcctgcagtggcttccccttactgcaaaattgagaaccagtgcctttgtcctgaattcaaggatctctatgttgggtctcaacagcttcattgttctgtctcactgttctccttttgaaaataacaaccttgccaaacgctgcttctcccaagaagactgcaccaatctcagctcccaaaccagaccctctcctcttctgcattcacaagagttcgtctgccttccgggcatccctctcattttgtcttgcaatatatgcatttacttatctttcaatccaccttccaaccctcacagtctaggcccttggagcatgagaactgatgttactttacttttttttttttttttttgagacagagtctttctctgtcacctaggctggaa

SEQ ID NO: 476974 - DNA, 1199 bp, Homo sapiens
tgcagcagggtcctagcagagccagggctctccactcccgatagaaaatgagctgctgtggatactgccagcgaggccaagaactcctgcctttgacccatgggtccccagactgcctagggggttccttctaaaggaaactcacttctgtcaacacccaagagaaccaggaggcatgtctctcccagagtcgcaatccctgggggtcactgccttctctgtggggtggcgcatgcaggtctttctgtacacaggtgttgttagcacagcacaaggggcttgaggtaccaactactgacagttcaggctttctctcctcctatcccctctctgtgagtgcctcatctggcctcttgggacctctgaccaccccgactttctccaggacagtaaccagccaggccacttcttgaactttatcatctggctctcccatctgagccacctccaaaatctctaaccctcagccccctgacaacaacctcctcctgtggaatcccagagctcagcagtatcttaagggtcatttggttcaacttccacatctcaaagaaaagacagctgcagctattaagtgacgtgaccacagacacacagctgagggtgtgtgcctgtatgacctggcctacatctttctcctgtgctgggtgcttcctgccctggaacatcggactccaggttcttcagttttggaactcggattggctctccttgctcctcagcctgcagacagcctatggcagctctgcctcttgctgggttgtggctgaggttctcaggcaggggagctctggcttcaccagggctgaggttctccaggctggctgtgcacaccacagtcacctcagcagctctaaaaggctggctccactctcccatactcccacctatcccaggcagcgaatcagttcatctgggtgggttctgggccgagatggtgctgaagctctccaggtgactccgctgtgcagccaggatggagccacagtgagaccagggaccaggcgtcacctgagagttagtaccaagatagagcaccctgccttgtgttacacctccagctctctccaggtgggacaagcaactgccacaatctcttgattctcaggactactctctattacagtatcaagagattgtgacagttgcccattcagactggagagacctgtcaccagaccactgtggcggtcttccag

SEQ ID NO: 476975 - DNA, 1314 bp, Homo sapiens
gcacctctggcatcagcgtgacctggataaacaagttggctacattatgcaggagtacaatgacacccttcagagagctgaaagattgtctgttgctcgagaaaacttcctcatgggaaaaaacaatcctcctaacttggtgacacaggaagatctgactatttacacaaagtggttagtgtgccacctgcactctcttgggactgttcaccagtacctgcaggccctccagtatttgcccatctccaaagtgctgagtgtagctttcaaccgagtcgctgaagctggtcagaaaaatgaaaatgtctgtgtcaatgacattgaccctgacattcagggttctgcatctcctgaccctgtggataccagcatttctgtgatgaaggtgccaccacaggggcccacactggagggggaagaaggaatgttcagcattttgacagtaggaaccgatgtcgtagaaagcacttgtagcctcagtctgaaagtttcccaaaaatttcaaagcgtcttcatggagcaacagagattgcaaatgtttccagactgtgaagctggaatagctaaagcagataatttgggtttggcaggacccagaatgaccctgaaaaagaaagccaactggatttccttcataaaggtagttgtgttctggaaagtcaccaggaacactgagttagcaaatattgaatcgttacccctaggggaaatagagttagttcctgtgaacctctctgcaatgaccaactctgatggatttagggtccctgctgcttgtgggtggtatggtgtcatcccagatagatctactgcatcttatagtccaggcaccaacaggaactggtgctgctgtctccttcaatggatctgtgaacccatgaagaccctttccaaaagctcacttgtcctagccaacctagcaccaaagccagataccatttcagaaggtccttgaatctctttgcttgcaacttttattgagaatcattctgttatgttgtaactttatgtgaacatgtttgtccactagatcaagccaaaatgtgatccatggcaaaagaagcttttgactaaattaaaagaacggagaagaacagatgcattattgcaactccaagcaaagtttttgaagatctaataatatttggttaaatatctgggtgctctggtgttgggtgtatatatatttataattactatatactcttgctgaattgatccctttgtcattatataataaactttatctctttttactgtttttgacttaaaatctattttatctgattgagagaataaagggaattaaattcc

SEQ ID NO: 476976 - DNA, 794 bp, Homo sapiens
ccctttcttaaaaccagtacaactatgcaatgaccctacaactgctgggcttggaagacggcactgaccccagtgataggaatcctgttctgatgagaggggcctacttgtcctttctgtatctgtgccaccttcgaatcagagaactgcagcacatctgcttaggaattctgaattatttcagatctgttgagcgaaccctgacaatcaatacttcgggccttaccttggtttcagggaaactggtccccaccatggaagatagttcctgggtaaatatggcaaaaggaggtctgggcaccttgcagggcctgggcgctcaccactatgtccgtgagacacctgctgagcacaaggacacccttctcttttgggtctcctaccctaaaaagcacccaccaactcctactccctcacgacacacagacttcctctcagatcttcctttacccctctgccctcctccttgggttctagctcatcaagcccaattagtttggccctcagtggaactagagagagacatgggactgagggaggaagacagcaaattatggcagaaagagaaggaatatgtatgcctatataaagggtttggacaatgggatgtggatgggaagagtggaaaaatgaccactaatatagatgatggcattaaagttggcatcttgacaatactattgcttttcatcagcttcagaacttaatccaattgccattgcctgaaagacttataaaattcttctgtacaagaactttgggaaaggtcttttccaataaagtgaataaagcat

SEQ ID NO: 476977 - DNA, 694 bp, Homo sapiens
ccagagagaaagactaaatatatatcttatttattatatcgcaccatgatgctcattatctgtctgtggagcacagagctgggtgctggaaatctaaagagaaccaagacacagtacccaaggctgctgcaggagtgtcagcatcagcagactgctcacaaagtcactgtgttcatccaagggggccaccaaattttccacagcttgacttggaaatgcatgtgctcccacagtcacgtgacccccttggacgacaaacacagcgactttgtgagcagtctgccgatgataacattcctgcagcagccttctgaacagtcagcacacaagaacttccaaatgcctgaaccgcagcagacaggcgttcctccaaaacctcctcccccaggagcttgctacaagtgccagaaatctgaccaccaggccaaggaatgcctgcagcccaggattcctcctaagtcatgtcccatctgtgtgggaccccactggaaatcggactgttcaactcacctggcagccactcccagggtccctggaactctggcccaaggctctctgactgactccttctcggcttagcggctgaagactgacactgcccgatcgcctcggaagccccctagaccatcatggacgccgagcttcgggtaactctcacagtggaaggtgagcccgtccccttcttaatcaatac

SEQ ID NO: 476978 - DNA, 3601 bp, Homo sapiens
ttccccagagcccttctccagacaaccacgattcagaggttctcatgtctttccccagctggaggggcagggtgtcctggtgtgccttcccagcccagcacacaccaggaagccctcctctcctctacatgtcctctctctgcgaaagccctacagaaaagtcccttccaccatgaagctttaccagacccattccccaacgctcccgccactcagccctttctttgcccctggattccacagtgtgcagtgcctgattccttcgatgaaggtatcgaccagcaattctcttgctctccctagcacagaaacacagaagggccatatcaccggccctgaggaatccatgttgtcagaaacgcgttgctcactgttccgaggttcttggtccacactctcattcccaatcagaaatagccagttcttggaaaccaccattctgagcaaactatcacaaggacagaaaaccaaacaccgcttctcactcataggagagtcctttcaccaagacaattttggagtgacttttctgggccaagggtcatacctggctcacctccttttggtgaatggtgccttccaaggctttggagtataacatggtctgaatcattactactgactgttccaagtgatataacttcaccagaagcctcaagtgtgtggtttgaaggctggggagatcctaattttacagcccagccgttgatgtctcaacgggttttcccatcagtgggacaggagggtgatgaaagatacattgggaataactagatatggtccaggcccaggctgtgcctgggaaacaccattgaggaaggacctggaagccagactctgtagactgaggcttttaccggatgtaacactaagctacagggaaaaataaataaataataaataacctgtcaccgaaactcattcttaccccaaatcctgaaactaaccatccgatcactgatgccaaacactaaagagtcatttgaattaattcctcctctcttcatccatctaagcaatctccaaggccttcagttttagcatactagcatgttcccatcctcacggccatgaccttattcaagccattagcatcactctgctgctcctacctggcctctctgccggctgtcacaccctttcaaacagttgccgaagctgatcatgtcactctggtgtttaaaatacgttttacatctccctgtggcgtagaatatttacactcttaagctgggagagaaaatgtccctgtactcctcatccaagatctggcccctgccagtctccccagccctactccttaccatttcccacattcccctcacatctcctgggaaacttggttttacccaaccccccatgatatggtttggctgtgtcgccacccaagtctcatcttgaattgtggctcccatgattcccacgtgttgtgggagggacttggtggagatggttgaatcctgggggtagtttcccccatgctgttctcatggtagtgaatgggtctatgggatctgatggttttataaggagaaacccctttcacttggttctcgttctctctcttgcctgccatcatgtaagacatacctttcaccttctgccatgattgtgaggcctccccagccatgtgaaactgagagtcaattaaacctctttcttttataaattacccagtctcggctatgtctttatcagcagtgtgagaacagactagtacaccccactttgttctgaaggctatggggccttccctgacagccctctgcccccaacaataagtggaggcaacaataagtggcctcagtgccactcttggggcatgggcaggctattgcctgagcttacctctcggtgttgacatggtttattgatgtatctgttctttctgcttccttatgtcccaagatcctaacacataccttggcactagcagttgcccagtaaatgtgtatagaatttaattgagtggacgaatttggccttttactggggagggctcaagtcttcctcatggggcccacctccaaagagtttggacacagtggtctgtgtcagagttgctgtcctcacctctccctaaaccctccgcctgttggtgggttgtctcttcggacccagaaagtgctgcaaggagcagaaaaaggttagttaattctttagattcctggaaatcttcttcacagccattcttggggccagggccagggctgacagaaggggggtaccgctaaagggatgagagcttggaaaaaaggaagaaaaggtaaaaagaggttgatgctaccaaggtggtaaacacttacctgcctttccctcttgggcacaatccccatatattaatgtaaatctctgcacagcaagattcccactgaccatttatccccaggaccctgaggaaaagaggtcctaccttaattcaccttttcctcagttgcctcttaacttctttctctaaaacaagcctcttcaactggtctctgcatcttccagcagggcccagcagacctgatcttaaccgctccctttcagtaaatctggtctcaaaccaccctggctttctcttttctgtctttaaaaactaaacttccagctaatattccagtcttccctggagatccaatttgtgggcagggccatgctatctcagtgttcttgctgagccataatggtaagagtcggtatttacttcttcctaacatctttccaataatctgaacatctagaatctttttcccctcacattttcattctctgtcatcaaaactcattatgctgttctcattccacgtatttaaaatgctcagagttagtgcggcatctgtgcttcccatggctaactgtgccttctagatgagtatccacagtagatctaattagcacaatatttacctctgcttcttgcttattaataaagatatcatggcagagcagactcccgtgacagtcctcctgagccatatccaggtgtatgagtgtgagaagaaggctatttgattatttgtgtgatcattgccataatgatgtgttcataactgtttccccaaacattcagcagacttctcagaagcaatcgtcagacaagtattagagttacttttagagtgacattttataaaatcaattaagcattggtgagatatttttaaaaatattcccttcaccattccaccctgtccacatctgcttatggatccagagcccctaaaatggaagaataacaaagtgaaaggcacagagctgggggaagagaagtgggatgatgagcaaattttctgtggggtcactatgcctgcctgccatgggctggaacatgccttgtttgctgtgccttgaaatgtgtctgctgggcattttggattacctagtaatgttctcatctaaatcaactggaactcatgtttgagcagggaaatttcataaataaaccaaatcaaagaagacctccgtctgcaacacttactttgaactcttcagttgttaattccagagccccaagggtatttagacaatgcaaagaacccttttgtgtaaaccattacagtcagggcattgaataggattgttctatacatattatcaatgtgtctggtaagaagaa

SEQ ID NO: 476979 - DNA, 610 bp, Homo sapiens
cagcccatgaatgggaaccggctcccttgtgtcagcactgctgagggctgcatccctgagctaccatagctgtggcagggccaaggtcttccctccctccccatcctttccaaaccagtcacttcacggttccagacagggctttcagtttcatgtagcatcccctgaggagcacaccaggttcatgcagtttctccctcaccatgctggagaatttaggacactttcgcttgaggcagggtcacaggtcaatgcagaacaacacatgggggcccctcagaaacctccctcccctccggcagcactccatgagggatttggcgcctcggtgcaaaactcccatagctacgtccccagctcaggggagcttcgcaaaccatacagttgcatagcagttgctcaactctaccaatatagtgcaaaagcaaccatagacaatatgtaaacaaatgaatgtggtcgtgttctagtaaagttgtattaattaattccaataaaactttactgaaaaatagtcatggacttgtaaatatttatggaccttgaaatttaaatttcctataattatcatatcacaaaatattcttattgtttttacgtatttaaaaaa

SEQ ID NO: 476980 - DNA, 558 bp, Homo sapiens
gctcggtgcctgctgacgaactctgagatcccaatggtgatgtggagcttcctattctgtgaaaaaccaagaaaaagatatggttgtatactcaaattgtacatcacgtttgtcaaacgaagacattccaatactgcttaattatagcactttatttttagctgctgaactgccaaaacagtgttgccattttcaagggcagggaaaagggagtaaaaggtgtatttttgtcaggagaaatcaccacataactggaaacactgaaaataggagaggggaaagatggctgacagagtcaggcttgacaggaggaggatggggtccaggacacagtgtcagaggaaagaggagtatagacaggaggaggtggggacacagttcccctactctgacaggaggcaaggtgggaataattggtactgatagatctaagtttatgggaggtgggaggaagttcatagagttcctacctgacaacctagattcatctgaaggaggagtgccagttaagagactgttacaagaagtatcgagaacctgagttgatgacattgggaa

SEQ ID NO: 476981 - DNA, 682 bp, Homo sapiens
cccaggtccatctaaagtcttccaagacatcttagtgttcatgttcctccttcgtactcagatcttagagttcatgttcctcctttgtacagatcttagtgttcatgttcctccttcgtactcagatcttagagttcatgttcctccttcatactcagatcttagagttcatgttcctccttcgtactcagatcttagtgttcacgttcctccttcgtactcagatcttagagttcatgttcctccttcgtactcagatcttagagttcatgttcctccttcgtactcagatcttagtgttcatgttcctccttcgtactcagatcttagagttcatgttcctcctttgtactcagatcttagtgttcatgttcctccttcgtactcagatcttagagttcatgttcctccttcacactcagatcttagtgttcatgttcctccttcatactcagatcttagagttcatgttcctccttcttactcagatcttagtgttcacgttcctccttcatactcagatcttagagttcacattcctccttcatactcagatcttagagttcatgttcctccttcatactcaggtcttagagttcatgttcctccttcatactcaggtcttagcttgtatattcctccagcttagatcagattaggtctccatgaggtgttcctgaag

SEQ ID NO: 476982 - DNA, 665 bp, Homo sapiens
gactgggcggcttaaacaaaaatgtattttctcactcttccggaggccagaagtccaacatcaatttcctcttcagggttggtgtcttctgaggtttctccttggcttgcagagggcgccctcttgtggcctctgcatgcggtcatccctctctgcaagaggccctaatagctccttgcagggcttcaacatgagttttggggaagcacactgccacccatacaaggagtcttctcaaaatggacggtgtgtcagcatccaccagtcctctctgaaaccctttccttcggtgtgtgggaccaagctccctcataacctcacaccgctctccaagaggcagctgattctgtggacccaactgcctctccgaagagcagctgcgcccttggtaaaggagaaagtagaaaaggaaaaggagaagctcagggagaaggggcagcagagagggggccgcctgcctctgtctctgcgcgcggtgtcagagccccggcaccgggaagtggtcgactggggggttggtaaaaagaatttaccgacaacagtacagctttgaaaaaggaacgtttattagaaaggaagaacgctacaaaaggatggcctgtttggtggtcaccaggtggtctttgctcctttctgaattgttcagataattagtttttatctcc

SEQ ID NO: 476983 - DNA, 539 bp, Homo sapiens
gaccaatctgcttcaaccaagagttcccttcaaagagcaatttgcatcttattaatggactcctggagacagagaggccttcaggaaattagcagtgagagcaggcatttggggatggcaggctggctgtggtctccaatgctggccctaagaaggcaaggcggcagtgattcagggaagttagacacgctggatctcataaagaggtggtcctgttcatgctgtagcaaaagcacccagagcctgcctgattcagaagggagccctgactgtgagctaaacctcatcttgcacaaagggcctgctgctccccacagcaaagccctgccgggctgtgggccacaagaagcatcaagaagaaactataaagaaccacctgctgtgtttctaaccactaggtcctcatgtgcaaaaaccatattgctcatttcatgcaggggatccaaaatgactgtgggactgcatgtggctttgtggtctcctgagacctggccccgggctcactctcatgatttcccggtgcttctctcatgaaagtg

SEQ ID NO: 476984 - DNA, 1074 bp, Homo sapiens
cttgcccaaatgttcaggggacaatgtcagagtgtaattttgatcatggccatttcaaggcatttgaaacgggattcgttgccgggttgggccaccatgaacttgcacagtcacctcaggaggccgagccttcagagatgacagcattcagcctcaggaggagcctgcaattcacccacggtcttcccagtatatcccttccatggggatacaagacatttcacaacagtgatgctatctgtaggagtagttgggaaatttataaatcttgcaaccctgggttccatgactctggatcaggaagcaacttatggaaaaacaagctgaatgatgacgggtcactgtttaactctgccacctcttcttcagcaaaattcaacaccctaccagaattctaactttgtcttatgaatgtggcttcaacctccgaacaaggagatgggttagttttccttgcctcaaagttgagctataaacaaaattcctctcatagttatcttggcctctatactagattaagcaaaaaaccaatttagcctgtgaagttagaagcaagatggagttagtcacgttacatttctctccttacttacaattctgcaaatttcttttctctgcttacattgcccatctgttctttcatatgatccactttttccattagagcccttagcctattattcacagggagggattttgttaagacacaatgtcctggatgtatttcacaatggttactttttcccttccctgaggaaatcaggagagagcctttctctggtgttctctctgagcacctggtgggggctcccctggagttaggcttatgaaagtgtgggccccctataatgggaccttcctaatgtttatgtttcaagctcatgcacactgagcctccagcaatttggcaattgctatttaggttttctttccctggtcctggctccagtggcctctgctcctggctatggggcctgaggtttcatcatacatcattgggtttattaaagcttaaaagtgatctaataattaacatgccagctactagttatttgttgagtttttttccttttt

SEQ ID NO: 476985 - DNA, 711 bp, Homo sapiens
ggaatgtcccaggaaggtccttcttcgccattttgtttcttaatgtgcatgcctgagcctactcaccgaattcctgagctgccaattaccaatttcaagtattttttatatattgtgaaattgcctctccctgggcctgtgaccaattatcgctctagtgtgacagttgtgggccatcaggaaattgcctctccctggctccagctgccaattattatttttagagaggcactttcagctaaagacagggttctttgtcccatggccataaaaattcaggcttgcaaacaatttgaatggcagaagcttggaagcacaggtgacagtctggacttgcctctggcaactgaagtaggggagcattcctgtgggactgagcacttaacctgtggggtccgcaccaactctaagtagacagtatctgaagtcaattgagttgtaggacattccaaaaaacccacacatttgatggccagaagtattctgtcttttttgtatgtggatgtccagttgatccagtatcattagttgaaaagaccatctttgctccattgaattgtctttgtcctttgtcaaagacaagttgactctatttatgtggatctatttctgagatctcacttgtatgtcatagatctatttcactaatctttcatcaatattacactgtcttgattattgtaactttatagtaaatcttgaagttgtata

SEQ ID NO: 476986 - DNA, 675 bp, Homo sapiens
ggaggagaacaaaccagaaagagaatgagggaagaacattctatacagatgaaagaaatggaacaaagacatgaaataaactgggcatggtttattaggaaaaccccattaggaatggttaaaggaagcaacggtgttaaacctagaaaaaagatcatggacattttgcaaaatgctgagaagcagagcatggagattggccctttaaagacacaccttgcaatccagagtgggatggaatctacttctggtgaagatgctgtgaacattgttgaaatgacaatgaaggatttagaatactatgtcaacttagtttatgaagaagtggcagggcttgagaggatttactccaattttggaagaaattctactattggtaaaacgctatcaaatggcatctcacgttacaaagaaatctttcataaaaggaagagagagtccatcgatgcctcaatttccattgttgtcttactttaagaaattgcctcacagccacccaaacttcagcaacaattaccaccatcaacactgtggcaagaccctccactggcaaagcttacaatgtgtcaaaggctcagatgattgttagcattttttagcaatcaagcatttttaaattaaggtatgtgaattgttttcttagacataatgattttgcacacaataaactgtggt

SEQ ID NO: 476987 - DNA, 520 bp, Homo sapiens
aaagatacatgcatgcgtgatgggcgacctgtgcaggaaacaaccatggcacacgtttacctatgtaacaaaactgcacatcctgcacatgtacccctgaacttaaaagttgaagaaaataaagaagcagtgggtaatgttcgtccctgcagaatggttcactacatctgcaagggccccagtggctgccagagtccacctagagaccagaagaaggctccacatgagatggctgcagctcttgcaataccctgcagtgatctgcagagcagattcagtgccggacacagggacagtgtgtgcatttcttccatcttcctaggggagctttccacaagttttccaagggccctttcagctgtgatatttttcccctccaaaattggagaaaatgcatagcgttccttgcaggaatcttttcaaaagaaaaacaatgggtagtcatggagaagacatgtaagaggctgtccctccatcaacattagtggaaagatctccatgtttcacccaaacgctgagc

SEQ ID NO: 476988 - DNA, 582 bp, Homo sapiens
tgctttctcttctttgaagaaatcgcagtaatgcattgtaggggacatcaaaagggaacagatgagtgtgggaaggctccatcagaggaattaaacctcagtactcccctacagaagcagaatgggccacttcttgagggtatacatttcggccctcaggatggtgacagtcggaggatggcaagctccacttgccagcctctagccaatggaaagtatcttcaaaatgacaatggaccctcatttaaggcagctgtcacacaagggggtctcaaaagcactaggcatagaataccatctccactgtgcttgaagacccgcatcctcaggaaagatcaagaaacctctgagctagtcaagcaggtaacttctctggctcacttgcaacaggaattagcacaattagcaaagccccaaccccaggaaattggaccacctctatttaacccaggagatttggtactggtgaaggctctcccttctctctcttcctaagcccaagctgggaagggccttacaccattctttcaactccctcagcaataaaagttacaggaatcaacttttggatacatcacactc

SEQ ID NO: 476989 - DNA, 679 bp, Homo sapiens
ctacagtcttcttacagtatctgatttagagaaacctcatcttgaatcctccacagctaaaatgattttgctgccatgactctgacaagctggaagaatgaaatcgttgttgaggctatttattgcacacttgagcaaaaagtaaggccttccaggggttacaacaagtttagctacagcatcactgacccaaaactaggctctgcctctgagagatgtaagagaaggcgatggcggccgggaagcagtccagagatgctgagacggtggatggcagacgtgtgggtacggaccatcaccacagaggaagacacagatgcccagagagatagcatttgtcctggagactggaagcccatccatgggtccagcaaagccttgtcccttgcgaacgctccccacgaaggcttgcgggtggttaggccgccatgtcttctgtttcacattcttattcctgtacccgaacgtggaaaccccttcaccacgcacctcaaaaccaccaggccgccacttcgccgcccgcctcaccggcaccattgcagccaactaactgctcaccctgcttatggtagtttgttgtgacggtcctaggaaactaatacacccttcaagcccacaaacactttccctcagagctcttagttgtgataaccatttactcacagctaagcacattctc

SEQ ID NO: 476990 - DNA, 473 bp, Homo sapiens
tggttttgactgtatctgcagtcagttcacagagggcattcctgaatgaggcagttacagaaacatttcccccagaaagaagcctgggaagcacaggaagcggtagaggttcctcccctgacaggggtgatttccctgtctggctccttgctgtctctcggaggctgtctccagctctcagttcttcagagctccgacttcacagcaatcacccccctgcagtcctctgggctctgtgttttgctccatcacgacccctttcctctcccactcttctccatctgttacctccatgcccctcaaatctccccatccttcagagccctccccttgaaccttcctccagggcatctgcccaggccattccagtgccaggagccctcgttattctcagattgcttcaaagctgtcctttcagggcagaactggtccactctgctccacggcaccctgccaacagttttgctttgaac

SEQ ID NO: 476991 - DNA, 638 bp, Homo sapiens
ctactgcctttgccacaaacagatcatgaagagctattttgaaaacgactgggccaaaaaaattccctggagccgaatcaactcaaagagctcaaacagagaacaggaaaatcttcctccttctctcccaagagaccagaccatgaggcccccagagctaagcacccacagtgagggctgcctccttgcactggcgagagcacagtccctaatgccagacccaggacagtgttcgtggccttgggtgctgcagactgacaggtcttcccccaacagccactgcagcctgcaggtgggcagcttcccagaggagcctcccaagatccttcactccccggcccaggagccagggcccgcacgggattttctagcagcgcatccaggtgagctgctcacctggactatgcacatgggttcaggtctgacagccccggggctagccagggatctggcccacgaggattttctttccatgaaaaatgcacacatgcatgtatgtgtggaaaacggcctgaagggacccccattggtattatcagatgtcactgcaagatccctgaattttacaatggctacattctgtacaataattttttataaagatgactgaattttctgaataatgaatgttttccctc

SEQ ID NO: 476992 - DNA, 721 bp, Homo sapiens
ggctgggcgcgatggctcacgctttggtctgttgttgtgcagatgtggagaactgataagcgacgtggaaggagaaagaaacaggctgcccaacacagctgctggtgtcccttcagacccagggacgcatgtcagaaccagcaccaaccattaggtggcgccgttgtagcacaacaagcattgacctgggttggcgacaaatctgaccccgctcccggtggaactgccactggctctctcccctgtcatggggttcccacaagcctagcagctcggagccccaggccagtggctgcctctccctgggaacacacctcaggggcccgctgcccccaacggctctactggatgtccccctggcatcgcgctgctcccatgtacccactgctctctgtgttctctaaatccacgaatgccacagccatccacgtggccaccctcaccagtcgcgggcaacacccccgatgcccccccgtccactttctcaccaaacctcctggtcgttctgctctcacctgcccgtggctttgtccccaccgtgagttctcctgtgaaattccctctggattatgtaaattctttttgccccccaaactttctttaaaaaagtttttaaacatataaaagtgcagaaaatgtcataacatatacctatgcgtctactactcagattttataaatgctaccattagccattacatgctttgaatttttaaaagaa

SEQ ID NO: 476993 - DNA, 559 bp, Homo sapiens
ccggaagaccaaagtaccaggatggcacggatcttggtgtacatacggcaacattcacttggacactgtcagtgggtcacactgagccccctgaaagaaaatgatgacaacacaatgctcctaacacagggtgaccacaagcagttatctttctcagcattaattcagcccatcctggcattcttgggcttagaacactcgacagcatttccgcacaatgttgagggcattttaaatggcaaaatcaccaatacaaatgcaaaaaacatatccctaaatagactgcagaaaggacacttggttcacagtacaggagctgacacaagaggcagaccattcttcctcacttgtctcatagaattgaagagtgttagagccttcctctggattaagccttggcctacgggaatgttgtggctggtttgactttctatccaggtgattaaaactcttcatatcagcaataggctgcttcactttcttatcacttgtgttcactgaagtagcactattaatttcctttgagaacttttcctttgtattcacaacatggctgttc

SEQ ID NO: 476994 - DNA, 883 bp, Homo sapiens
aacggaagataaatgaggatttcacgtcttccttgcccttgtcctgcagtggggtggagagagaagccagacattctgtttctaacatacttggagccctatgctcagggctacaccagggtccaggggtcttgtggagccccaaggcactggagctggttctctctctggcctggttactgcagagatgcctatagtccatccctggcctctacccactcgatcagtggtcctcgatgcttttgtcgccagggaccagtttcatgaaaggcaatttttccatggacatggggcgaagggtgcggggagatccaaaaaagagaagaaactgaaagacaaagctgggcgagttgaccatgtggacagtctgccaagtggaccagaatgcttctgttcactggcgaggacaacttctctcccggacaaagacacagacacacgtacaaagacacagacacacggacaacctgtgactgcttgggatcccttgggctcctttttgcgagatttcacacagtttaaagtagagatatcatggggaaaagtgagaagtgacatgtataattatggtcacattgagggaggaagagacaccatctggaatgcaggcagaaagccatgtgaagctccctgtgagggaaggactgtggaactgtcaatcatgaccatgagccttatgcctgaacactctttcagatcacaagactcgtgtgtggaactgccatgggtccgtgggctgccacagaattatgcaggaaataattttcaaggaaacaagaaggaaaacatgattgggtccaaaattctatcattgttttattgaaaaagcaaatctcttctctagcttgaaatgctagagctacaatttatttcttcttaagtt

SEQ ID NO: 476995 - DNA, 1598 bp, Homo sapiens
aacagcttcaaccaactatttttgctaactagtctgaaatgttaagtatggaggcaaaagctgaagctggagcaacagtctcagaatatgacaacaaccatgagaatggaggccattcatagcagaactacgagacaagaggagcctaggtccctgagctgcagaactgcatactaacctgatgagaagactaatgctcagtgaggtgaactccttcagggccacaggctgtaaagatctaaacaccatctgatccagtttcaatatgactgcctggatgaagaaggatttgagactaagtttattcctccaaagcaaaccaactgagaatgcagagacagggtcttgctatgttgcccaggccagtctcaaactcctgggttcaagcaatccactcgccttggcctcttaaagcactgggattacaagcgtgaaccaccatgcctggctgaagattcaagtttttaaaacatctgatttccacttgaaaccttgaattgtatcattggcaacaaataatgtcagttattttccttgagatgacaacttcacttagttattttcaagaaaactgctgccatgtagccaactgtgaatgaccacagtttgcctgtcagtcattctgtcaagtaaaatggtgctcctcaaacaaagcagcacgtttagctcacaactcaacaaccacacagcagtcttcctcccacccaccatggcacttatattaatataagcagcagaggtgctttatgtatgagtattgtgtgaaaatactcaaaagacctgtaaccaagggtcaagattactacaattaatttctactgcttcctaagggcattcttaagtgacactagcatattttacaagccagagtgtaacaatgagcacaatgactgctaccacagcttgctgccagccattgccttgacttgtcctaaaacacagccattttcatccgcctccatggctactgcatcatcagtgcaaatgaaacacttaacgcactctctgattgtggctcttaactcgccagagtatcggagagcagggtttctggaccagggctccctacccagagcaacgggttactggcaaaggacagcgagaggatctacaaacgcttgggaaaacatgcttaacaggaagctcactgacctgattgtgaggatcagaaacagaaatttgagggtggagggggaaaactctgtgaacttacaggacagggaacaagacatgaggaaactgaggcttggagaagtaggctccaagcaggctttcatcctctacactaaactgcctccagagaaagtgccccagagcagaacaagccttggaatgctgtcgtacccctggcccatcctgagggatgctgctgtacttccctcacagcgacctgtgtggaaggagaatggatttaaggcacccaaaaagtgaaaaatgaccatgacacagagctcaaaatgcagaaatactttctaaagattaaagtggtccaggacattggagactacaaagggtgggagggtgagagggaggtgagggttgaaaaattacctattggggacagtgctcactatttgggagatgggcgcactaaaata

SEQ ID NO: 476996 - DNA, 1096 bp, Homo sapiens
ctcctccccttgggaactgcaacagcagcagaagagctgcactgcagccctcaggacttgctgaagaccccagatccttgggtgtaggccagcaaaagcaggaagcataagccgggcattctgccatccttttacgtgcttagtgatcaaagagagaaagcaagcaagcaaggttttcctccttcctttcttccccctcctcatcctcaccttcgaaaagttacctcttcagaggcagagttttgctctgttgcccaggctggagtgaagcgctgaaggagttgaacgagagtgtgcgtctttgcatggcaccattcctgatgtccaaattatatttgtcgatggaagccgaattaagtttaactgacttcctgccttttcctcaaggatgaaatctgtgagagaattgttgctgctgctactgatggtgggcatccaccttaaatggaattgcattcctattatgcatatcgttaaaaaatcttacaaagttttgagactaaaaaacaaaattccaagcggtccttattccatattcatgggcactgcctggaatgggcctgattgttgtgatgagtttgagtttgtggccatttttgctggtccttattccatattcatgggcactgcctggaatgggcctgattgttgtgatgagtttgagtttgtggccattcttgctggtccttcaaggaagagcaaagggatgtcttacatgggagaagacaagagagcatgtgcagggaaactcccctttatagacccatcagatcttgtgagacttatttactatcaggagaacagcacaagaaagacccactctcatgattcaattacgtcccatggggtcccacccatgacacatgggaattatgagagctacaattagagatttgggtggggacatagccaaaccatatcaatactgttatgattgtttccttagtatgcattctgagaagtggaattcctaagtcaaaggattctgtgcatgttttagctagtaagtttcttgttaaaaataaatgatgcttctactaatacattgaaaattattataataattacccccctccatctacttttctttcaaaga

SEQ ID NO: 476997 - DNA, 565 bp, Homo sapiens
ttaagtgctgtatttgtgtcatttcaaagaggcagtcactgaaatgtaaaggaatgagcacaatgtcctgctttgtttatctgagaaacaccagcagctcccagacgcttctgttttcttcaagaaagacagaaagagagaatctggctgtatttgctgtgaccaagggatggagccagaactgggctggagaggattttcagcattcctctccagcccagcaggtcaatggggactttgataaaaccataatgaagatgatgaggggtgcagggtcttcctgcttccctttcatcctctccaacttcccagctgcccttccttgtggtacccagggccaccttcagtgtgtggtccaggatggatccaggccttttctcatgagctcaataaacctcattccctgggagaagcatcatgattgggctttaggaggtcatctgattctggtgatatttactggtagaaatggctgatatatgggatcacttggcagtatttaataccttttaaaagagaagcccattaaccaagattatggtagaatgtggtacattttttagct

SEQ ID NO: 476998 - DNA, 570 bp, Homo sapiens
aggcgttcgtgcaaaataataccctttgactcctgcacccgacacagatgtttctggagttgtcgtccatgtgccagaagttcctaccatttactgagatccctccatttaaggatactccctggaaatttcaaatgacacttctgatcatagaccattggccacaagttggcatattcacaagtggcatattcacatgcccacacctagcttcagaggaggctgggaattggagttattccaatccagaatggtgctcgcatcaagcagccatgtggccagttaaagaatcagggcttcactttctagaagaagggaattgggtagtgggaacattggtggtctgtaacacaggcttgtaccaaattactctcctatcaacagaatacggcagctccttctcctccatgttttcatttaaatttgatgttctagaaaaaaaagggaaaatccagggtggtgcctatatcaagaaatctttcccagaatcctctgcttatgtctccctgagagtaaaagtcacatagccatgcccagatgcacagagtctggataggtatacttgggaat

SEQ ID NO: 476999 - DNA, 475 bp, Homo sapiens
agatcctgcatcaattgcgtgatgatttcaggggtaatttgtgaaaactccataagcctggaaattacagtggacccacatgcatgggaatttggcgagactcagtgtgagtacaagtcttctccagtgggtgaggaagtcaaggagccttggaatggaaagaagagaggaagcttgatgagcagatgccaagtaaatgagaagtggagtctgctctcagagttgacagcccaagttgaggatttgacgtgtaaaatgattgttggtgttcacagacctcccgagggcctcagctcggtatcctgtgttacacataccacgatgccaaggaaggttgaccgcattaaccaagtgttctcacaggtcttgcagccagatctgtgtggagaagtattttctttaattcaatcattaagtttccaggcctagcaaactcacttcttgaaaataacaatgaattttaagtacagtgggt

SEQ ID NO: 477000 - DNA, 638 bp, Homo sapiens
tctccagggttggaatagcgacaccttttgtcctcacttatatgaataggaaggatacaatttctgaggctccccatattctagcttcaggaataggttttgttaggcctgttagtctgaggagggatcctaaaattccaagtagtccccaggacaatggggctttgggcaaaaattatgtctttctgattggtgagcccaggtgcctaaagaaggctcagcccagaagtacaagaaaagtggaagctggttcgaggcacaccaacgctcccaactccaaagagtcgggggttgttagagagccctatcccagaaaacctgacacccatgtctttagtctggcggccacgctagtcgcttttaactggccgacagctgatagcttttctgtggtgcaaacccccacctacatgtaccccacatatgtgcgtgcctccactgtccttgcataccctcctgcactctttgcctccttctgacaatgtcccttccacttctatacttgcaccccccttttcatgtataacttatttcttgtttctccctaaaaacacactatttgcagatctaaaatattaccttaattcatagtcttcattaaaattagattctattgtaacttcagtacactgttcctg

SEQ ID NO: 477001 - DNA, 1101 bp, Homo sapiens
tgagagtctgagtggatcctccaacaaagtttgaggagagggaaaagctctcccgactcctaaccgatctaaaacttctccacaaaaaaaggagaacaacaaaaaatccaataacagctgcacataccaccagttccgatggaaaaccataaggattctcatctggtctcatactctcaggtagtgctgccacaactctgcgtagctcctccaggaccagccccaggtagggctgaggggtagcaccaggctcctccatagcgtcgaggctgctctggcggtcaccgcagtaacactggccacaacaagcggtggagaacacgcagccttgggtctggaacccgaatgcgcacgtgacaaccaaccggagcggaccactgtggagcgggctgcggggggagctggggaacgcgggcacccacaggcctcacaggcccatgttgtcccccaccacctcccctggccctcttgttacacttcacatcctgaggcagcgctggtctcccctcttcttagccaactgtcacatagctaaggagtcacagaaggaccaaaatggcatgtatacacccatttctaggttctttctctctcccatatggtacattgacccccaattcctaaccaatttagcagctttgaactctattcattgcttcttttggttcccaagaccactaacccctggttgggtcccattttcctgtaccaaggtcaggaagatgcctttctggaaaatcctggcaaatgtggtactaacctcatgtgcctcaccttccttaaagatctcatacctgacttgctacaacaatgttcttcaatgcctgctgatatggtttggctgtgtccttacgcagatcccatcttgaattgtagcttgcataattcccacatgtagccagcccacctgaaccatgctcagcagctggtgagagttgaaagccatcataaggtaaaatattattgcctaaaaatactctgcttctctggaaaataaaaaagacagaagtttcaaagaaatctttcaagagatataaaaatcatatgaaaatgaaataattaaagaataaatctgtaattatgcatgttgtaaaatacaaa

SEQ ID NO: 477002 - DNA, 527 bp, Homo sapiens
cacttccatctccacactgagctggaatccaaccaggatgaattctgtgacccgaacctctggaccctccagtcctcagttatggccgccagtcctcagttagggccattatggcataaagtgtcttcttccttcacagctcaggacaatcccttttccaatgacccgcctgcctgcagtgagaacagggttgggtgggctgccctgactgggatagttcttgctctaatgtcctggcttcccacacttaaagtagcagccattacctgcagacagcgtcctctgcagtgctctgtggagggcgcccttcacctgagcattcctcagactgtagatcagggggttcagaattgggttcaagacactgtgaaacagggacagcattttctcctgctcctctcgttgattagagtctgggactatgtaaaccaccatggctatgccaaagaagagtccaaccacacacaggtgggaggagcaggtcgagaaggcctttatgcggccttcctttgtctggatctttagga

SEQ ID NO: 477003 - DNA, 1868 bp, Homo sapiens
aagccctcgttagaattttctctcacagttgcaatgctgcttggccccaacattatttggaacctggggttcaatgtctactgggaaagtggaacagcattgcatgtatccaggcttttgtgctgtagttctaagcagggggcctggttaatgtatgacaccctcctttggtactgtttggccccagtgatctatggagtctggggaggtttggcctttaaaaatcaaactgccatggagactgttttacccaaaattttggttcacagtcttcattggattgtctgttggggcaaagtaaaaccggcaagctggtattgctatctcatggctaaggttccaagctattggaacaagacaagtctaactgtcccactatacacctccaatacaatgttgaatcaaagtggaagtcaatgccaaagtgatgcagactttccaggtcatgatggtagaatatcggagagggtggcagatggccacgtaccgatcataggacatcaccaccaggaggagacattctgtatgtgcaaaactcaaaaacagaaacatctgggtcatgcagccagcaaaggagatgggcttggctggatgcaggaggttcaccagcatctggggcaccgtgctgcaagcacaggcgatgtcgacgaccgccagtttgtgatgattacatcagatgcttgccttctgtattccttcattgcagggtacttatatccatgcatgtggaagtgtgctggtgtctatgtctatatataaggatagaaagagggatgatgaccatgtcaatgatcctgctatcaggtcttctcaccaattttctattttattagtattttttgaaaaaggaactaagattctattttaataatgtttatcattctttatttttccaataacgtttgctcttatataaattatatactatttttattttaatttttggtcattgtatatttctgagttgaatatttaacttattataaatcttacttttaaaataaatgtaattttagctgtaaatttattttcccccaccattttagccatacattttaagtctgacatttagaactttcattatggttgatttcatcttcaaaggacaaattatgaagaagtgcatttttaggtttccaaatatttttgttacatttctgttgttaattttacatttattatcacctgtggtaagagaatgaatccttgtgatactgattctttgaaaatatgaggggtttttttgttttgtatatattcactttttgcaattgttatattgactttaatgtatatgctttattttagggaatgtaggaatctttatatatctgtttgatcaagcatgtaaattttttgtagtttttatttccaatttttgtcaggattatctattattttctgagagcatttttctaattcccccactaagaagttgagttggtaatcttttcagtgtaattctattttttttcctatttctacattaaggttatattgttgtatatacatatttatgattgttacatattcttgatagagttttacctctattattatggagtactcttcataccaattagtgcatttgcctgatataaacatgagtgcaaacatccagcttgtatttatattgccgcatcaacttattaaatatttgcataggctgtgttcttcattctcatattcccagactttctttgtgattgtgttttagctagtcttacaaataatatataactgtattttatgggcttaaaaatatgaaatacaatacaatatgaaaatgggaaaatataatcaattttctctcagtgtaaatattgagatatttgggctttctattatttgtgttttgtgtttagcat

SEQ ID NO: 477004 - DNA, 714 bp, Homo sapiens
ctctccttacaacctcaggattccgagagcccagtgtgcaggcacacataaaggctctgctggctctcctctcttttgccatgctcttcatctcatatttcctgtcactggtgttcagtgctgcaggtatttttccacctctggactttaaattctgggtgtgggagtcagtgatttatctgtgtgcagcagttcaccccatcattctgctcttcagcaactgcaggctgagagctgtgctgaagagaaaaggcagggcagacatgctgaaaggtttaattggatcaattagtccaacactcaatatttatatagacgattttccagaagacagcagatcaaggcactggcagattcagtgtctggtgaggaactgctctatcgatggcatcctctcttggtgccattctcacctggcaaaagtgatggaagagcaaaaaggcaaaaggcaaaagggcaaaaggcatgtgggcactcccttcaatttcttttggaaatacatacaaggcaaaggatctaattgcttgggctcctcaacccacatgtcacctcctgagaaagctgctttcagccctcaggtgtatgggggcaacattttcttctccagccagtctccagaaatctaacccttctattgtcttcatagaattgattattatctgaaagtatcttgcttttgttgttgcttattgtcacttaccttctatcggactg

SEQ ID NO: 477005 - DNA, 928 bp, Homo sapiens
tagtgaccaaatcaggaatctgagacatctggaaacctagacctgaggttttcaggaaggcagccccagtattaagaagtccctgattgtgacattaatgggaaacacggtcatcattgtgattgtctgtgtggataaacgtctgcagtcccccatgtatttcttcctcagccacctctctaccctggagatcctggtcacaaccataattgtccccatgatgctttggggattgctcttcctgggatgcagacagtatctttctctacatgtatcgctcaacttttcctgtgggaccatggagtttgcattacttggagtgatggctgtggaccgttatgtggctgtgtgtaaccctttgaggtacaacatcattatgaacagcagtacctgtatttgggtggtaatagtgtcatgggtgtttggatttctttctgaaatctggcccatctatgccacatttcagtttaccttccgcaaatcaaattcattagaccatttttactgtgaccgagggcaattgctcaaactgtcctgcgataacactcttctcacagagtttatccttttcttaatggctgtttttattctcattggttctttgatccctacgattgtctcctacacctacattatctccaccatcctcaagatcccgtcagcctctggccggaggaaagccttctccacttttgcctcccacttcacctgtgttgtgattggctatggcagctgcttgtttctctacgtgaaacccaagcaaacacagggagttgagtacaataagatagtttccctgttggtttctgtgttaacccccttcctgaatcctttcatctttactcttcggaatgacaaagtcaaagaggccctccgagatgggatgaaacgctgctgtcaactcctgaaagattagctgttctattta

SEQ ID NO: 477006 - DNA, 987 bp, Homo sapiens
gggtcttggggcacaacctctggggccccatactgtggatcatggcaaatctgagccagccctccgaatttgtcctcttgggcttctcctcctttggtgagctgcaggcccttctgtatggccccttcctcatgctttatcttctcgccttcatgggaaacaccatcatcatagttatggtcatagctgacacccacctacatacacccatgtacttcttcctgggcaatttttccctgctggagatcttggtaaccatgactgcagtgcccaggatgctctcagacctgttggtcccccacaaagtcattaccttcactggctgcatggtccagttctacttccacttttccctggggtccacctccttcctcatcctgacagacatggcccttgatcgctttgtggccatctgccacccactgcgctatggcactctgatgagccgggctatgtgtgtccagctggctggggctgcctgggcagctcctttcctagccatggtacccactgtcctctcccgagctcatcttgattactgccatggcgacgtcatcaaccacttcttctgtgacaatgaacctctcctgcagttgtcatgctctgacactcgcctgttggaattctgggactttctgatggccttgacctttgtcctcagctccttcctggtgaccctcatctcctatggctacatagtgaccactgtgctgcggatcccctctgccagcagctgccagaaggctttctccacttgcgggtctcacctcacactggtcttcatcggctacagtagtaccatctttctgtatgtcaggcctggcaaagctcactctgtgcaagtcaggaaggtcgtggccttggtgacttcagttctcaccccctttctcaatccctttatccttaccttctgcaatcagacagttaaaacagtgctacaggggcagatgcagaggctgaaaggcctttgcaaggcacaatgatgag

SEQ ID NO: 477007 - DNA, 825 bp, Homo sapiens
tgcctcttcctgccaattgtccccattttccttgtcaaagatatccatcagtggtggactggataaagaaaatgtggtatgtatacaccatggaaacgtggcatatatgcagccgtggaaaagaatgagattatgtcctttgcagcaacatggatggagctggaagccattactcttagtcaattaatgcaggaacagaagaccaaatgttgtgtgttctctcttctatttaaaaaatgcctggcagcagccctatgtggcccctgccctgggagcagcccagtggagagggggcggctgtgtgctgaggagccgatcaggaccttggcaggggaatcaaagattccttttggggtatttttacagtctccaagctgtgtgcttgaatccagcaaaagggagaggagcagcattgaagaaaggcaagtagtatcctggcacagaggagctaagaacatagacaaagttgtcaatgccatttggtttcaagatatagctgacctggcatttgagaaaccagtgaggaagcctcacccattccctagtgtctgcaaaataattgctgacatgctctccaaccttttgctgcaggctcttttcctcaatcaaggagtgtttgtgggtctctttcccatccatattgttgttcagctgcggtgctagcaaaaatggctgttcaattgaaaaaaatacgagcatattgtcctgcctcacattatgtagaaattgaaatgtaacatagatagtagtttaaatattaaaaaataagaagtttggaagaaaacatagaaaaacatttttaaatatcttaaagaatatttgttt

SEQ ID NO: 477008 - DNA, 2185 bp, Homo sapiens
ggcatagagagatcaaattgaaaccattcaagtcaacctttcgatcttgcagcagctcgttagtgcccttcgtgccatttcctcctcctccacaatgtgggatggcacccagtgccctggagagcccagtcctcccctagatgagcaatttgttataggaaccatttacaatttcgtatcaaggagtttacaagttgtacatgctgaggaacttcctgcaggcttcccaagcagccaggtcatacaagctctggagcacagcgagaaacattgcgagaaattctgccgtatgcatatgctcaatactgaaggattagagaggaaggaggagccaatcttggtgataaagggacaaagaggaccagagaatttaagagcctgctcagccatgcttcttgccctgagcctggagcgcaggcattgccttactgaaggtcagtcttctgatgaccctggagagaggaccagaggggcctcagggatactgaagaggagcatctccttttgctagagctaggtaatacatctctgatgatgatttattctagtttattctgtataacttgtgctttgtataccacactcttacaaacatatatacatttgcacatagatgatgaatctttttgctatgttgatgagtgatgtctttcatataaccacaagaagatttttttttttaatgctattcactcattgcagtaggcagtagaataaaaatataactcctacagtgaatgctaagaggacaaacaaaacaaatacaaataggcaaagacttgaacacacttcacaaaataatacaaatgatcaacaagcatatggaaaagggcttagtaagttgtcaaaaaacatccataagaaggactaaagttactgaaaacacctagtgttgctgaggctgtggcatcgttttggtggaaatgggaaacggtactttggaaaacttagcaataaaaaggaacaaactactgacacatgcaataatgtaaagaaataatacaattatgctgagcaagagaaactaaaagcaaaggagttccaaatacatgatttaatttatatgaagttctagggcaggtaaaattcatttatggaaatagaaatcagaacagtggtttcctctggtaggagagatcaagtggaaaaggaccagagaaacatttctgagtaatggaactgtcccgtttcttgattgctgtgttggttgtatgagtacatatattcatcaaaactcaccaagctgcactctcaagatttatgctttttagcatatgtaaacattacttgataaaagtgtattacacaaagaacatgaataatttagacaatttttcccttataactatgaactgaacacatcgtagatacgcataaaatcttgtacagatgatcattttcaagtctgattcagttacggtattctagatttgttcttttctcctaaaatgaatttcattgcttattctttcgttatgttgctactttcatttatgattagattaactggttcccaataaaatctaaaaactgcatcttatttgtttaagacattaattttcattatttgaaatgcatcattttataatacatattaaatatgtatacatttcactatttttattaaaaatctgtatttgtaaagtgttttccaaatcatgtaaaaatgtgcagtacattttcagtattctgcaaatcattgaccaatatgcaattatataaaatttacagatctgatgttaaggaaagaaggtagctgaaatgaacgcattagttaaggactataatcttcaaatcaaagagtcactgaggggataaaaatgactaggaaaggatccctgctgttatttactttgaatactttcataatgtttaatctcatattgccaaacagaataccttatattcattttttaaccaaaatttcctgttttgatggtgataataaacatataaactaagaactagatatattctcatttaggattaaagcctttggccttttgaacagtatcttggtaacttttggtatagtcttgtggtgggtaattttatgtgtcaacatgactgagtaaagcaatgcccaggtacctgcaaaaacagtatttccgggtgtgtccgtgagggtgtttttataaattagcatttgaatcagcagactgaatatagaagatttaccctcacc

SEQ ID NO: 477009 - DNA, 795 bp, Homo sapiens
ttctccttcctcagcttccctgttttctatcattatgtcttcaagtttactgactcatctgttttctaacccatccatgcatttgtcatctcagacgctgcagtactggatcttagagtacaataactctcaggtggagactgagctagagaccctgagagagagttcaggacacacgtgcatccaagacccaccaggcctcccaggacaggcagtaactgagcttaaccctggaggtcaccgagaagatagccaggaagagaagtggggttgggatctgatctttgtagaccgtattttgatccaatacccgttagcacttctatgcacgggacatctgcctgggagattagtgtttgggaggaagcctgttggcaacagaggattacatgagaacagtgaactcattggtcaaagtggactgggagtggatggtacaggagcgtgagaagctcccaaatcaagagagatgagagaacagaggatgagatttctattcaaattgcacttaactaattgccagtatatctgtttatttattcatttatatttaatctgcttaattgggggacatatatatatataataaacttaccaattttaattttacagtagtatatcacttgtgaaatcacctagttcaccaccagtggtgcttaattgatacttcagcaaactgccatcttattaaaaactttgtgtataataaacttttgaatatttctcataaactggtttgtaaacctgtggattgacaatatttgttgtttcttcattcttttcattatgtaattt

SEQ ID NO: 477010 - DNA, 572 bp, Homo sapiens
aggccgaggaggcgcccagagcgagcgagggctgcctaaagccaggatggcactgggtcttgcccaaggcccacactgtaaccacaacttgggtattgcctgtatttattcagggttctgtggatctacaatcagctggtgtccttcccttaaggttgatgagtttccccaggccccaggcaaaggagcctcacctcatggccaccaccaccacagacccacagggagtactgccatgctactgtccatgttctcctcaggccccaggaacctccagtcagcttgtaaatgctacctcacttgggactctcctttcatagcagtaagcgtccctctgaatgtccaagacccaaggcctggaataaggaactccaagagcccacttggtgctatacctgtggccaagctggtacctaacgtgcaagaaaaagtcctcattgcttttccccctgcttttctcaagcagaaggaactcacctcatagccaccacagctgggaatatgctgagtctcacaagaagccagcgagtcttagagtctcacccaaggtccacagtttactacttaggtat

SEQ ID NO: 477011 - DNA, 605 bp, Homo sapiens
aaataacaaagaaaaatttacttattagaaacatcgttcttgatggagagggaaaatatcttgctgaaaacaaaacaaaaaaaaattaactgtaaacagacagaacctctttacctatgctctctatgcttctgctaccaagtggctctagaactgtggctcctgtttttagctatgattgtaggaaaatgggcaaaggacctgaatagactctcctcaaaagacgacacaaatggccatgggtacctggaaagatgttcaacatcactaatcatcagatctggaagtcaggctaattgggaaatcacaaataacatcacactgagggagcttgtacagaaagaattaaatgaagcagaaaccaagaaaagcaaatatgaaaaaacaataataacctacagagaaagtgaaagagtgggaatcagtcacttgcaggacttgcgtgaaaactgtgctctggtatcagttaaaaataagcagtgagaaataaacttaaagaactttctataagatttttgggaattttcccctttatattaacactttgatttcaatctaagtttccttaggagtgaatattttaagatttagaaaatattgccacc

SEQ ID NO: 477012 - DNA, 657 bp, Homo sapiens
aagtaggtttcagaagacggccacctaaaactgggggcagagtgacataaacacccctgtgtccaccaccaatatggctgtcctgggtcagacccgaagccagcacagcactgggtctcacctagagcctgctgtaatgactccctggctactgtctatgtttgctcaaggttctacagctctactatcagcaggtggcaaagccagccagaccctgtctttcccttcaggatggcaagctcccccaggccaaggtgatatgaagttaaaaccaggggatcgggggccacaggcacccccacctagatgctgccacagggcccacatggagtatgctcctgccagagcccaaaagcgctggttccagctcctgcatctactcaactgtgtgctccctcccacaaggggtgggacacagtgggtccgagtaagacagctcatgggtttcatgaccaggactgctggcagggtctatggacctggtgtctgggtccacagatgtggtgttggtgatgccccaccctcatcaactatcattgctattctgggggtgcttcacattgcatagttagttttgcttaacatgtttgtagattagttcattcataaagtgatcctcagttaccttgtttgagtgtatctggcttatctgtttca

SEQ ID NO: 477013 - DNA, 479 bp, Homo sapiens
cttcttcttatcacccatatcctactccatggtgagtcatcaccagcacagccatacccagtcacgggagtgcagcagccttcactcagatctaagccccgagaagaggaacaaagaggagaaggggtgttaccagagtctgggagttgtagcacgtgcagaagatggaccattctggaccttctcagcaagctgggatcttagaagaaagaactatttggtgggagatggagccactgtggacatatgcctgcccttggaggtgccccctgaggcagagagagaaaacaagaaacatcctggtttcatctctgcttccaccctcttccccttggctgaatctttgcagaagtcagaaagaaaagagcctggggaaacagttcctcgtgatacagagcagaacagaggaagccaggaaactgacctgcaaacaggcaaatgactggcacagagtatttgtaggagtatttgatttgtgc

SEQ ID NO: 477014 - DNA, 532 bp, Homo sapiens
tgctatttcttgtttttaaaaatgcatctgttggtgacactggtggagaaacatgtttacgagaaaacaactgactttttcttctgctgttactccaggagatttcctaggagctcatactgtcatttaaattccaggtgcaggtcttctgaacaaatgcctcctgaggatttctgtgcctggaaaatatctgttaacagactgcttttacacctacatgaggagactgaggcacagagagttaaagtgatttgtgcagggttgtgtgaggagctggtggcagagcttggcattctggctctggggtctgcatttggccatctcaccgtacagtgtcatagaaacaggaaactcgagaagataaactgccaggctgtattttggagtcagtattttaacactgtcaccatctcaagcatgatctgtgggactcatcgctgtgctctttgacttgaacttctttaaggtatggtaagattttgtggttatgtagaagagtgtcttcattttatagaacgacctcaaagtagtt

SEQ ID NO: 477015 - DNA, 477 bp, Homo sapiens
tggagtcaggagactcctgggtccctccagtttacctacacgggatggctgacttctctctccaaacttttgtctttgtccacaaaccagctgatactaatcaaggcacatctgcacacaggagtgtgtggccattggaaatgagcgtgcaaatggacacgttggaaacgtgtgcaaatgatcacgttggaaaggagcatgcaaatagacatggtggaaacgagcgtgcaaatgcacacgttggaaacgagtgtgcaaatgggcacattggaaatgagcatgcaaatggtcatgttggaaatgagcatgcaaatggtcacgtttctggaaggcaggttgttaagtgtgtccaaagcccatccttctacccaatgatctcacatgtaggaatttatcttacacacatcctgacaagacacatgcacgatgatgtatgagtgaggtggttcacctgtgtattatttctaacactaagac

SEQ ID NO: 477016 - DNA, 1487 bp, Homo sapiens
tggcacacctgaagctgagccccgcggagctgcgccaggtgctgatgagcatggagccccggcgcctggagcccgcacatctcgcgcagctgctgctcttcgcgcccgacgccgacgaggagcagcgctaccaggccttccgcgaggcgcccggccgcctcagcgagccggaccagttcgtcctgcaggtgccgcgaccacaaccccgccccgaggcctcggccggctccacaggggctgtcgctgtggccagggctgctggggtcccgcgcgccttcgggggccgccattgcgcccaagcctctgagtcccagtttaacacctttaatggccgggtcctatcaggggtccaagttcccgaatacaagacacgcctgcgcagcctccacttccaggccaccctccaggagaagacagaggagatccgaggcagccttgaatgcttgcgccaggcctccctggagctcaaaaacagtcggaagctcgccaagatcctggagtttgtgttggccatgggcaactatctcaacgatggacagcccaaaaccaacaagactacgggcttcaagatcaactttctgacagaggtgaggggacctgccggcagcaatcgactggtttgctctaccagcaaggcgctaacgccaggcctagctcagttgtggcagagggcagaagaggacatcctgaactccaccaagacagtggatgggaagtccaccttcctgcacatccttgccaaatcgctgagccagcacttccctgaactcctgggctttgctcaggacctgcccaccgtgcccctggctgccaaagtgaaccaacgggccctgaccagtgacctggctgacctccatggcactatcagcgagatacaggatgcctgccagagcatttccccctctagcgaggacaagtttgcaatggtcatgtcggcatcctctgagcagcctgttcctgcaccaggctggatcctggggtggttggaccctgggggcacaagcgggctggctgtttccttaactgaggcctgtcagtccttcctggagacggcccagccagcacttcgggcgctcgacgggctgcagcgcgaggccatggaggagctgggcaaggcgctggccttctttggggaggattccaaggccaccacctctgaggctttcttcggcatctttgcagagttcatgagcaaattcgagctccgggatggtttcacccctggcctggtgacagtggccacaccgcgtcctctgcggcctgagcagggagatggaggccgagagggcagcccagacactgccgaggtccggggccactgtgccccgggctctgagcacaccgccagcctctcctgcagctacctcagccgccgagctgtggtcgggccctcctctgccagcccttgttcctacccccaggcccagagccagatgctgtaggagcaggtgctgagtgtgcctgcacatggaggaccgtgctctgtc

SEQ ID NO: 477017 - DNA, 861 bp, Homo sapiens
gcacaccttgggcatagggatgctagatgggccagtgtagacagtcacgtgctcccctggtgcacatgagcatctacattgaacgcggaggcgatatgcatttgggcttgacaggtgctgctttcctctcctgccaagtgaccggccagtgcagggaggttgagtcagacatcacccctttctatgcaacaccaccccaagacctggcagaaggcaaccttcaagggtattgcaaccttcatgcaaggaacccgctaggtacctggatcaggagtgggggtgcccttcatatggtggtcttggcagcccctcctgactcctaccttctatacacccagaaattccagagcaaagggaatctctttttcaaacagtgccagccggaggcttggactgactctgagccacacagccagagtcacaagatcatctttatccaatcactccagctccaggccctgggaaatcagggctggccttgtcatttggatggacagcagattgtggcagaaggcacggtgtaccagctctgagcctcagcctcaagccatcttctgtgcctttggttgttcaccttctttgacccccagtcccctcatgaaaaaaatcctggctatttgggtgcaaaatgagagaccccacagggctatcccagcttttccagccaaaggccccagacatgagattgcttggtatgattaccaaagctgcctagctgactcatagctgactgaagatgcagagcctagctcagatcagaactgggacccagagacttgtgagcagtaagtgattgctgtttgaagccaccacatcccccttgcagtatatattttggttttgatgtttttgtatggtgct

SEQ ID NO: 477018 - DNA, 584 bp, Homo sapiens
cctcttaactgtctctcttccccactagaaagtagggatgagcaaactatggcaatggaccacatttgggctagtccctgttattacacactcagagaggatcaatgctcatctactcatcccttcttggcttattttgatgtacttcctaataatggcagtacttcactaaaacatgaaaaacctaaaccaatttaccaaacaggaggcagggacacagtcactaacagagactttcttggacaaactggaacctacagtcctcatatttttagtcttgcagacatgaagaacctaaaggagaaaaatgcacatttctcaaagattctgactgggagctcgatgtaccacaaaaaggaacaagatcatgtccattgcagagacatggatgaatctggaagtccttatcttcagccaactaatgcaggaacagaaaaccaaacactgcgtgttctcacttataagtgggagctgaacaatgagaacacatggacacagggaggggaacaacacttactggggcctgtcaggggagtctgggggtgaggtgagcattagagaaaatgctgggcttaatacctagg

SEQ ID NO: 477019 - DNA, 1084 bp, Homo sapiens
cactgttctcatggtagtgaataagtctcacgaggacagtgggtcacatctgcctctggtcaaagttcatgcagctcctcaaatttccagaaaaggaaagtgaatcggcctggctttctctgtcatgcaaccactgccctttccagttccccttgcctcaggcacccagcacccaaggagcccagagcccaccgctgtgaccatttccccgaactgactctcccggattcttcgctatagtcatcaaaaacacaatgcactccacctctgcattcacacttgcaggctgcagttctacagtatcactgacagccaaaatggagggccctgcgggctatgcaaaggctggggagcccttgaggaagttggggacccaggttaggaagctcatggtgcctgtgcctgctgcagggaacagggtggactgtaaagaagatacctgggtgtgggaccaactccacatctactgccgtggcccaggtggagcacaaagaggacctgaaggcaatggcagcaaaaatggaaagaaggttcacttactcaatggaataagagaaagagggagaaagggagggggagagagagagagagagagtgagagagaaaagaagaagaaaaagaagaagaagaagaggaagaaggaggaggaggaggagaggaggagaagaggaggagaaaaaggaggagaaggagagagagagagagagagaccccactgaaaggctattacaaaatatcaggcataaaacattgagggtctaaattagaggaaaatgagagttaggaatggagaaaagaagatttaaaaaattagtagacatattttttaatatctatatgcagggttcctgactacaggtctggatccctggttggggtatcaagatttatttgtggatcaccagcagatagaagcaactgaacacaccttagtagggcaagttgcacgtgaatgttattttcctgtgtttcgtttctctcctattcaaaacttcctgtagttgattcaaactcatcttaaaacactcagaaatctttataaatctttacttgattgttatttacagggaagagtccaaagttc

SEQ ID NO: 477020 - DNA, 611 bp, Homo sapiens
gaaagcagtggctctcaaagcagcagcagaagcacacagcaacagaagaccagcagcaacagaagcacacagtgtttgttaaaatgcaaattctcaggccccagccaagcctctggatcaggcactctagggatgggtccccaaagtgtgtttcaccaggccttcgaagtggttctgctacacacggggctttgggaatcactggtcctaaaaagcaggacctgtcatggaaacgcaatgttacagaaataatgaaggcagcccactacctaaaactcagtaagaaaactcatcttgctgaccagaggaattgggaaaatggtggcagtaatacttcagggagatatacaacctttatatccagtggctttgtgcttttggcatatgtcgtatcctcccttggataccatattccacctttgagaagcacagctaattctgacaaagtcctcatatttcaacaccaatgtcctacttttatcatttttcttctttggatccataaagtaagatgacatgtatacttgcagaatggaggtcttctgatcgctaatgggagcctagtgcctacttaatgcagacaagcatgtctaaaactaaggggtttgatc

SEQ ID NO: 477021 - DNA, 780 bp, Homo sapiens
gaaggaaaaaggactggctggggatggcgcagtccagttctagagctgcttctcttcctgagaattgctgtactgttgccacatacactgtctttcctcctgtttccttggccacccttcctacccttgctctggaagcctcctgtcctggcggccagaggtctccccatctgcgctgtgtccagctttgcattttccctcgggcttggctggaggaggccagatgttggagtcactgcacagcctcctccctggggaagcctcatggggtttcagtgggagaagggaacgtgggattcctcctgtgcatctcatcttggtactgtgatgtcgggcagtcaggggcttgcctgaggctacagggcacgctgagctgcctgggcctgctgaccacgccagtggggatccagctatgggttggtgaaatgagcctaaaagagggtcactgtgacccagaatgccagattggccctgatgactggggattaaagcctcatgtcaaagctagaacccacggctggagccacggctgcagcttccatctgctccttggcagcctctctgtatctcaggaggtggaaggcactagcacatttgaggctgcatcttcctcagctggctgctgagttcacgtgggcattggggtttgtgtttgttttattttgctactttaacaacattcccttccttacatgagggctgtgcaaggcctaggtttgagctcaagtgatgtcttaatggagggaaagtgcccattttcatccaggttggtatcaaaga

SEQ ID NO: 477022 - DNA, 700 bp, Homo sapiens
atcaaagtttactactctaagaagtacaataagcagttggtttagaatggttggaattgcagatggcatagcactgtgcaatagtgggaaaggatctagatccataaggcagagatacctgttctgttccacagctttaaagatagatttgtatgccaatgccattagttccttaattaaatacctttataataagcctcggaatcagcataatacgaatctaatgccaagtttatgtttacctaaactgatgatgttctggatggagatgcttaatctactctattacaagaagggggtgaagcagaaaagtagatgtgtggcctctcccttctttctcccctccttcttcctcaatgccctgcaagaagaagccagggatctcacatcatacagtcagcggcttcttaacctgtctcaggagaagatgataaccacagggcttaggggattggctttgcgtgtcaaatggcccttcacggtagacacagacctaagcttcgggcacataactgctccaacctcagtgctcttatctggaaaatatgggcaataatatctcatagggtttttatgaagattatgtgtatttaaatcactggttgctctagtttaacgtgcttaataagatttgcgaatgttaagtgtttttacgtaagatccatgtaaaggtcatcttatcttgacaattacttcttcc

SEQ ID NO: 477023 - DNA, 616 bp, Homo sapiens
ctcctcaagtgccatcaaagtgggagcccaggcagaggaggcacctagagcgagcgagggctggcagtcagatgggtggccttctctggaagcacagtcactggtcatctagcagcagacctgccgtggaactttctccaggtgtccactgggatgacactgatattaaaaggaaacacaaaacaatcattttagcaatgctttttaattcttttctcccttctccttctccttctccttctcctcctcctcctcctcgtcctcctcctccttcttcttcttcttcctcctctacttcttcctcttcttcctctacttcttcctcttcttcttctttcttcttctttttggtgcatgctgttccctcttatcatccccacggtggaaccctggcagcaggtgacttcccccgccctccgctcctgcacttggtgttgctgtcagaggctgctgctcctctggggatgcgtcgccgcagcgctgccagctccttccttagctcctcagacagagctgagcatggagggtgtcaggctggggtcctcatcaccgcgctccgccccccagggacccgtgttgtatggatttatatttgaaggggaaatcactcaattcc

SEQ ID NO: 477024 - DNA, 771 bp, Homo sapiens
aaccagtggaacctcaaggtgagccagcaattcacttacatccagcacctttatgagatgcggcataatgctacatactcatacagccattggctcacttaccacagctggtggggaactctttctgaagagaccttatcagttatctctactggggggagttggagatttgaaaccagaagccaggaacaattcagcagaaagctcacctgtgagcacctcctgccacactcagcatgcagggttacctgctgtcattcagaacaagagtactagcttggggcattccaagagacgttctggtcccagacctagatatccatcaatcaggagccctgaactgagtgttcctaggaattacccacactacacttataaaagtattcagcttgtacttgttagtaatgaagctggagatgtcacaggactcccaagcttcttacaaacactcaacacactagaaaagcagacacataaggggcaggaaacaaagactatgctcagattgaatgtgttaataaatcttgtctataaagataaaggatcatatggttgtgattgataagcaggcagctgtcactcatattagccaggaaaggggaggggttgggggtgcatatgaaggtttgttacctagataaacacatgtcacagagatttgttgtccattttattagatcacccaggtattaactcagtacccaatggttatctttaaaaattatatagtctggtttatttatttatttttatgttttatttttaatcaag

SEQ ID NO: 477025 - DNA, 788 bp, Homo sapiens
cagccatgattgtgaggcctcatcagccatgtggaactgccacagcttcagagaatatggcaacagtgcgaattgtccttcattccacttttcatccacttgggtcgagccccctaagggcatgcaatgggggtgtggcacgcttctttggtgccctgctgctcatatccctaggaggagcatgcagacaggcgggtcgtggggagcaccgaccccacggcaacatccaggctgtacagctgctgctgcagctagctgggatgtttctccggaagccacaatacctgtttgcttcccaccagcctctgcatgagtcagacaatttggctgcagtagtgtgttttaaaagggaaacagagcacaaaagtttgaaaagtttgcagcctgacaatgtgatagaaaagaagatctcattttctgagaagaaatttaagccgtatgcagaaatttgcataagtaatgatgaatcaatgttaatccccaagacaatgaggaaaatgtctccagggcatgtccaaggtcttcagggcagcccgtaccatcacaggactggaggcccagggtccccatgctgtgtgcagcctaggaacttggtgccctgcatcccagccactctagcactggctgaaaggggccaacatggagctcagtccatggcttcagatggtgcaagccccaagccttggcagcttccatgtggtgttgagcctgtgaatgcacagtaagttaagaattgaagtttgggaacctctgcctagatttcagaagatgtatggaaatacctggac

SEQ ID NO: 477026 - DNA, 1482 bp, Homo sapiens
ttgggtctggaaaccagggtggagtctacaccatattactggtgtccttaaaagaagaggaaaatgccatgtggccgatggaggcagacactggagcaatgaagctgccaggcaaggatggctggccactaccagcacaaaggagaggcaaggaagggttctacacagagcctcaaggaggctgctctgcccgcttggatgctctctcggagaacctcacaaggctggccctcgcttcccgcggccttgcacccccatggcatcttggagaggcttccctgactccgacgtggttctggcacatcgacatcactttttcaaaatccagattctcggactccctccagacctactggatcagaccctctaagggtggagctcaaccgtctgtgcttcaaggagcactgcagggagtggaaggaacccatggtgcccacgtcgagtgtggaaagaagcctgagatgtttaggccacggaatggacatcatttcagttgaaactttgggcaatgcactaccagggtcacagccttttcctatagtgtttctgggacctgtccgctctgaaatcagtgtgcttcttctcccccactgtccttttgtgactactgtggggaatttgtgggaaggggtctccacaactggggcttgttgagggactcccacccaatgacaatttggcacaggtatgcagagtaataatgggctctcccagctcccctccatgctgcacctactcccagctctgagctggagctcccgtgcatcttcagccaggaagaggaagagggaggtggggaggtgggaaggtagcaacaagcaccaggcaaccatgagtaatctaggccagtgccagtgccaggggaggtgtgatgggaggcacctgggcctcctcccctgactcctgctgctgctgacagccccactgggagctgcaatggtgctcttaattgtgcctgctcctcagctgctggagggacacggccactgtggggtgcaatccaggaggtgtctgggtttggaggggtgcttctaccagagggcagggctgccaaaagatgagaggcaaggcttggggcaccccaagagacagtcctgagaaagagacatcattccccttcagtgaggaaaatcagctccgggccccacttcccaagggtcctgtggggataagacacttccaaagctttgtcataggccttgtcttataaacactgccagcaacgcttttgagcgggagggactcattccaaccaccagccctgctgattttttctctctcttctttctacacaggaaaacttaccttcctctccggggtcctggaagacctacttctccatgtttataaggtcctttgaacaaagcagcattttgtacacatatttagctgctgttgttatgcttattaaatgtgtttaataattgtgatgattttataacatctgtaacttctttgttttacattatatgtaatctcctt

SEQ ID NO: 477027 - DNA, 504 bp, Homo sapiens
ccactccatgtgcttcttctctgggatctcctttccactcttcttgtgccccctgacctctgcctctgcccaccagcatggccatccatatgtggccaacactaattcaggtgctcatgccaaccaggcatcagctctccctgcctgccataggcatacgtgcatcctcactggggaccctcagggcaaaagtgagtcgtcgactcctgggacgtggctccatggcagttccttctgtatctccctccttccctgccacctcactcccgagtgtgtatcctttttgagggtggaaaatcaagactcagaaagcacagggtctattaccctaaagacagaccctcttggtcctggaagtgaggaaagaactgaggctctcacctctggctcctgcacaatgtttttggagctctgaatgtactgtgtgtgtttcaggaggagccctggatttgcacttcacttctcccctctgcctcatgtaaaaatgccttccttttcttttcc

SEQ ID NO: 477028 - DNA, 3660 bp, Homo sapiens
tgcccctcttcctcctcctcctccttctcctcctctttctccttcttctcctcctcttcctcctcttcctcctcctcctcttcctctccctccttcttgtcctcctcctcctcttcctcctcctcctcttcctcctcctcctcttcctcctcctcctcttcctccccctccttcttgtcctcctccttcttgtcctcctcctccttcttctcctcctcctttctcctcccccacctcctcctcctccttctcctcctcctccttctcctcctccttctcctcctccttctcctcctcctttcccctcctcctcttcctccttctcttcctcctccttctcttcctcctcctcctcttcctcctcctccttctcctcctcttcctccttttcctcatcctcctccttctcctcctccttcacctcctcctactcttcctcctcctccttctcctcctcttcctcctcctcctccttcttctcctcctcctccttctcctccttctccccctcgtccttaacctcctcctccttatcctcctctttctcctccttcttctcctccgcctccttctcctcctcctccttatcctcctctttctcctcctccttctcctctgccttctccttctccttctcctccttatcctcctcctcatcctcctcctccttaccctcctctttctcctcctcctccttatcctcctccttatcctcctcttctttctctgcctcctcctcctactcctcctcctcctccttctcctcctcttcctcctcctctccctcctccttctcctcctcttcctcctcctctccctcctcctttctcctcctcctccttctctccttctcctcctccttctctccttctcctcctccttctctccttctcctcctcctctttctcctcctcctccttctcctcctcctccttctcctcctccttctcttcctctttctcctactcctccttctcctcctcctcctcttctttctctgcctccttctcctcctcctccttctcctccttctcctcttcctcctcttcctcctcctctctctcctcctccttcttctccttcctcctcctcctctgcctcctcctccttctcctcctccttctgctgctcctcctccttctcctccttctcctactccttttcctcttcatcctcctcctccttctcctcctcctcctttctcctcctccttctcttcctctttctcctcctcctccttctcctcctcttcctcctccttctcctctttctcctcctcctccttctcttcctcctttctcctcctccttgtcttcctctttctcctcctcctcctccttctcctcctcttcctcctccttctcctcctctttctcctcctcctcctccttctcttcctcctcctcctcctctcctccttttcctcctcctccttcacctcctcctccttttcctcgtcctcctccttctcctcctccttctcctcctcctccttctccttttcctccccctcttctttctccacctcctccttctcctcctccttctcctcctccttctcctcctccttctcttcctttctcctcctcctccttctcctcctcctcttctttctctgcctccttctccccctcctcctcctcttcctcctcctcctctccctcctcctctccctcctcctcctctccctcctcctcctctccctcctcctccttctcctcctcctcctccttctcctcctctttctcttcctctttctcctcctccttctcttctttctctgcctccttctcctcctcctcctccttctcctcctcctcttcttcctcctcctcctctccctcctcctccttctcctcctcctccttctcctcttcctccttctcctcctcctccttctcctcctccttctccttcctcctcctcctcttcctcctcctcctcctccttctcctcctctttctcctcctcctccttctcctactccttctcctcttcatcctcctcctccttctcctcctcctttctcttcctcctccttctcttcctccttctcctcctcctccttctcctcctctttctcctccttctcctcctcctcctccttctcctcctcctcctctttctcctcctcctcctctccctcctcctccttctccttcctcctcctcttcctcctcctcctccttctcctcctcctccttctgctgctcctcctcctccttctcctcctcctcctcctcctgctgctcctcctcctctttctcctcctcctccttctcctactccttctcctcttcatcctcctcctccttctcctcatcctttctcctcctccttctcttcctcctccttctcttcctccttctcctcctccttctcctcttcctcctccttctcctcctctttctcctcctcctcctccttctcctcctcctccttctcctcctcctcttcctcttcctcctcctctccctcctccttctcctccttttcctcttcctcctcctcttcctcctccttctcctcctccttctcctcctccttctcctcctccttctcctcctcctccttctgctgctcctcctcctcctctcctcttcctcctcctccttctgctgctcctcctcctccttctcctcctccttctcctccttttcctcgtcctcctcctcctccttttcctccccattctttctcctcctcctccttctcctcctcctccttctcctcctccttctcctcctccttctcctcctccttctcctccttttcctccccctctttctcctcctccttctcctcctcctccttctcttcctcctcctcctcctccttctcctcctcctcttctttctcctcctccttctcctcctcctccttctcctcctccttctcctcttcctcctgcccctcctctccctcctcttctcctcctccttctcctttctcctcctcctcctcttcctcctcctccttctgcttctcctcctcctctccttttcctcctcctcctccttctgctgctcctcctcctctccttttcctcctccttctccttctgctgctcctcctccttctcctctttctcctcctcctccttctcctcctcctcctcctccccctcttcttgctcctccccctccttctccaggagcccttcttcatgtcctgcttttcataactggatgggtgcccgcctctggactcctgcactgaccatcccctgccactgtctcctgccatccctgctgcattctcctttccgacctgccatccctgctgcattctcctttccgacctgccatccctgctgcattctcctttccgaccctctgcatgtggtttttatcccttacacctcctcaccagatcagcaaacacacgggagccggcaaggagacatcaataggcttaaatactcccacacaaacggatccccatggcccaataacctgaaaagcagtgggcaaagaataaataggtttcccaacaacaggtcttcttcacctttaattcgcccttatgcatctcctgaagaggacaaaagagaggatgcttgcaaaacttacttggtcacagaatgctctttccatggaggattttatagactagtctttggaatgttctgctaaattcagcttggtctcccccccaccc

SEQ ID NO: 477029 - DNA, 467 bp, Homo sapiens
agttcttgtaaaaacaatggaatggaagatgataattaatgatgatgagtattttcattatgaagtatgaggagagaagcagtggaggaagaggtcgctggaaatttaggacaggaaaaccatggcagttgaaaggctttcctggtcttcgctcaagatcagttccttatctgacatactcactgaactcttctcgaatgagcacagctggatttcccttttgtcaagtaagtttgcaaaaccctgggtgtaaagcaaagctaaagatactccttgctgcaggacttctcagagcctttaatacactcacatggattgtgaaatcacaaaagtatataaactgtgtagtggacctggaatccactgagaaacactggactaagacaagcactttgctatgactactgtcaaatgtgaataaaggggtggcttctacagtgaaaatttccactgaacctttgcattac

SEQ ID NO: 477030 - DNA, 700 bp, Homo sapiens
gtccccttctccagacatgcaggtgcactggggtgggaaagggggctgggagaagaaggatggggacccagagccccagggtcatcaacccaaatgagatcatgcctgtgaaagcactctgtaaactctttttattactcattccctcctggggggagagccccccactgccttctgcagccacttgatggcccagaggccaacaagtgtaacaactggcataccgctgtctctcgggaattctaaagagaactgctacatcagctacttcaggaaaacgcatttacctgggaccatggagcgtcaagtcctcggagtagagtcaagactcaagggagaaaccaacaagctgaggaactctaagtcgtgtgtaaatcagtattggattggtgcaaaagtaattgcggtttttgccatgaaggataattgggaatctatgcagcaagatgctggctcagcagagaccccatatataaaaattattcttgatggcttcaatagattttgcactgtccaggccaaaatgaaatatgaagatggggtagtggaggatgacttggatgacacccggaagtggtgattgaatacaacccatgagttacattcaatacttattgaagaataaaggtgaggttatttctctttggatcttcctgatattgtctccggcatcacattatacgattcccttcttctctgc

SEQ ID NO: 477031 - DNA, 635 bp, Homo sapiens
ttatttgcccagagggtgatctatagttgcctgggctcccctggggaaaggcaataaacctcttcttcacctgtccccgctgtgccatgacaatgacatttctcttcgccaaagccgagcttgatcagaactctgagctcctatctcttatctctgtgcctgtgtctgtgactcagcttctcaaaagctcctgctttggcctggacctgtccattctgctgtctgtggctcccgcacccatgcgcctggatcctgaggacaagacaggcccccaccccacctcatctcagggagcctccgtagagatgccctctctgcactgcacaggcctccatcaccctcacaaaaagcacccaggaatttcctccaggctctataatcacccctctgtaaatggcacacttgttcacaaaagccgctgctgccttgaactattttgcttgcctctttgcagctcctctgccaggggcagagaagtgctcatcgctgaagatttccagaaggtcccattggtcaagattataaatgccaggaatggtgtccctggattttaggcgcttcctcctctcctagtgcttaattgtctcagagtaattcccaaaatagtggctgcattttttcactttgactctgac

SEQ ID NO: 477032 - DNA, 576 bp, Homo sapiens
agcttctgtctttatgtacctattctaggtgccccacaaagcccctgattgattaaatgtctccctgcatattgccattaatcctgtgctcttctcccccaaccccctctccagcacccaggcattctaatttcattgtgcagggagctggcttgaaccaaaacaaagcggcacacgaacacagtaccaagcaatatggcacagaagtgccagctccaaaggatttgccagctcaggagagaagaggggatggaggcggggaggccatgggtcagaatgaccctgcctgcccctcagaagggagccaagaggaaggacagatggccatggggacccccccagtccatggaccactgaccatcaagaatgttgctatgggtttctctaggaagaactgggaccaccaggccctgataaaaggagtctatacaagatgtgaggatggtagatctgtcccagggaatatcagttttccaaactagatgtgattgtcagttgaaaaaaaaaaaaaagagtcctagaagcctcagtttcctcttttgtaaagtggagataataatggtccctacctccgta

SEQ ID NO: 477033 - DNA, 577 bp, Homo sapiens
cactccgctgccacggagctgtcaatgcaagcagctgttgggccagggtatttgtacacatctcaattagaccctctacctgttgcaaggacagagggctttctgtatcctgggttcttaccttggtgtaccggaaggatcgaatcacatgtgggcttggagaatgagtgcaaagttttatcgagtggaagtagctctccgccgatgggggagccagaagggagatggtttttccctggagttcctccgattgccccagccaaactctgccttgtcctgcgggttgtgagaccagccagagtgcgggtgtccctctgttggtgtgttcttctgccagcatgctcccctcgatgtcccctcgatatccagctgcttgtcttcttccgccaacgtgttcctctcaccaattccattgtacatatgttcaatactttaactagttcccatacagatgacaatttggctgtttccattcttttactgctataagcaatgccaaaatgtataaggttgtatttatatcattttgcttgctgctaagtgtgtcagtaagataattcctagaagcggagtttct

SEQ ID NO: 477034 - DNA, 746 bp, Homo sapiens
ctaagaacctttctaccctttatgtcttcatcaggccttaggtttttaacactgactggaaaacagcctacgtcccgggcgctgttctgggcgtctcacctgcatgcccgcagcattcagggtactactcttggcgctgctccacagtcccctggctgcacattctcaacagccccaactctgctggcctcccgcttccagggaggagggtggaggcagcaaggagaggatggagagtcatcaggaaagatgaccagaccacggcacctgtgcgcagacatgctcttctccaccaggactgcccaaggggtgctcaagtgtgtgtcgggggcaagtgggggctctctgggtgtgtgtcttcctttctggcccctgcttcctcctggcgcccctgtgtctccctcttgcccaggtggccctcatgctgtgagcatccaccatgctccagttcttcagggaggcccaccgatcctcactgattatctgagcaagtcctctcaatcagctgcaggttatcgaagccaagtgatgtatttgcattttggtttatcaggcttcaaggctttcacttggaaggaaccaatggcctctggggcctgctcccctgtagccctttagatctgtcaggagagccagatgctgggttcacatccagttcagcctcttactagctctgtgaagttggggttgttgtgtggattaaatgagttgctcttgaagctcattgaacggtgcacatggtaagg

SEQ ID NO: 477035 - DNA, 496 bp, Homo sapiens
tacacgagagaaagccgacgaaaatgatggggcttttattccttcattcaactcaacatttattgaaggcttgtcctggacaaatgcactgtaccggacaccgtggggatggggggaacttggaggtttataacaagggttgtcctaaagatctagtgtcaagtttggaccattcctttgttactcagtgggttaaatctgcccaagttggggccagtgatagccccttcaagatggcactgccctttcgagccacccttctttccccagccaacacaaccaccctcctcccatcactcaggttctcgcaccacgaatggacacccttctcttcctgctcaggctcaggcatcccagtcttggccgccacccccctcatcccctgcgtgggggactaccttgcttggctctacctaagggcttttggactgagttattcaggaaggaagaaaggcagtgagaaaaggaaggcactcagctacttttaattattgct

SEQ ID NO: 477036 - DNA, 1185 bp, Homo sapiens
tgtatgagatacaatcattcagaccctcgtagcagtgttctggaatcctaagtgtgggacaaatattcagacaatagtagtagtgtcctggaaatctatgtgagggacacacattcagaccctcttaggagtgttctggaatcttatatgagagacaaacattcagacaatcgtagcagtgttctggaatcctcggaatcctatgtgagggacaaacattcagacaatcgtagcattgttctggagtcttatgtgagggacaaacattcagaccccagcagcattgttctggaatcctatgtggggttcaaacattcaaacaacagcgggattgttctggaatcctatgttacggacaaacattcagaccatcgtagcagtgttctgcagtgttatggaagcctatctgtgggacaaacattcagaccacagcaggagtgttctggaacactaagtgttctcaaatcctatgtgaggaacaaacattcagaccctcgcagcaatgttctggaatcctatgtgacggacaaacatttggactgcagcagcaatgttctggaatcctatgtgagggacaaactttcagaaaatcgttgcagtgatcctcgtcgcagtcttcttgaattacatgtgagggagaaacactcagaacccaccagcagtgttctggaatccttagcgacagacatacatgcagacatcagtagcagtgctctgggatcctatgtgagggacaaactttcagacggcagcagcagtgttctggaatcctgtgtgagggacaatcactcagaccctcgtagctgtgttctggaattccgtgtgatggacaaacattcagaccctcatagcagtgttctggaaacctatgtgagggacaaacattcagaccacagcaggcatgttctggaatcctctgtgaggaagaaacattcagaccctcgtagcagtgttctggaatcctatatgacagacaaacatttagaccccagcagcagtgttctggaatcctgtgtgagggacaaacattcacaccctcggagcagtgttctagaatcctataaagggacaaacactcagaacccagcagccgtgttctggaaccatatgtgagggacaaacactgagaacacagcaggattgttttggaatgctatgtgatggagaaacattcaggcactcgta

SEQ ID NO: 477037 - DNA, 928 bp, Homo sapiens
gtttgtcaattttggctttgttgccattgcttttggtgttttagtcatgaaggctttgtccaagcctatggtattgcctaggttttctttcagctggggcttggatccggtaaaaacccaaatcctatctcaaggatgggaagttaaccctagtaaaattcaaggacctgcacaaactgtaaagttccttggcatcctatggaatgcagggaaacagtccattttaccaaaggctaaggctaaaatactagaatttgcagccctaccactgaaaaggaggtccaaaattgtattggtttgtttggattctggagacatcatattccccacttgggtaacattttacaacctctgcatgcggtcactagaaaacgctatgactttcactgaagacagaaaacccagaagctgtcagaggctagcaaagcttatactctttgagaagcagctgttgacctgctactgggctttacaggaaacagaacacctttgtcttaatcatgatgtttttatgaggccccaaattcctaatatgacttgggtcatgagctccctcaaacctcattggatagggtacactcaagaaagtaaatggaaatggcacatacaagaccaggctaagccggaaccaaaacaggtatcatttttaaatgaggatgtgcaaaacttgccagctcagcaaaccactgagcaagtcctgcagatagggaaggaaacctcccctgcccaatggggcaaatcctttaaagaaccaagcccagacgatcagagacatgcttggtttgctgatgattccaccaaatatattgatgggacccgatgctgggaggccgtgtcttataatcctgttaaaaacataagcatttctgaggaagggaggggtgttagcagccagctggctgaactagaatctgttctctgaactatt

SEQ ID NO: 477038 - DNA, 684 bp, Homo sapiens
acaaagacaggattgcacatgaccatgatggacaaccattgctttttcctgaagagacttagtaccctgtggctgagcttaagcgggactctaggaattattgattgcattttcttcttcttctgtgaactgcgatttctccttctgtttttctactacctagagattaatctgtatttgtcaatatttagtttttgttgcgatggcctgaatgtttatgtcccctttgcaaattcctatgtggataattttaggcgtgtggcctttggggaagtggtgaggccaagagttcttcatcctcatgaatggaatcagtgctttttcaaagggaaaaggttctccccgaagaatgatgctcacccaggccagcgcacacagcacagtgacccatgcacaggatgcactgagcacacgcggcactgggtgaaccaggaacagagcgagcagcactgcctggcatgaccgacatgaaagtagaatgtcatcatgtcaggctgtaccagcgtcggaagactaaacaccgtggggaagaacctcccttatggaatattatcaacaggtgagagaccagctcctgccctgatgggctacagaaatgagttcctgagataacacattgcagaaacatgcatagagtagtttaaccttttttgtgtgtaccctttctccattttcctgtgaaat

SEQ ID NO: 477039 - DNA, 572 bp, Homo sapiens
agaatcgcttaaaccgacaaaaaggaaaaataactaaaatggatgaaggacttgaacagacatttttccaaagaaaatatacaaacgggaaataagatgcaaagatattcaatattattaggaaactcaagtcaaaaccacaactttgtacttactaggatggctactgaaaaaccaaaaacagaatataagttgtggcaaggtggtgaaactggaacacatacattgctggcggggaacaaacagaagcctatcactccagagactgctgaaaagctggcccatgacctgaagattgtcaagtatgtggagtgttctgcactcacacagaaaggcctaaagaatgtatttgacgaagcaacattggctgcgctggagcctccagaatcgaagaagagccacaggtgtgtgctgctatgaacatctctccagagccctttctgcatagctggtgtcagcatcacactaaaagcaatgtttaaatcaaactgaagattaaaaattaaaattcatttttgcaataatgacaaatgccctgcacctacgcaaatgcactcatgcccacagagctg

SEQ ID NO: 477040 - DNA, 1184 bp, Homo sapiens
gatcgttgttctccgacttgactccttggttgggcttttcgtcggccatggcgagcgccggtctcctcagctgccacttcacaaaagaggtaccaggccttcctggccagtgcaccaggaggaggcctggagctgctcagcgtggggtgctgttctcagtgggtgggaagggggactcacagcctcgtctgggagtttatgtggacaatctcctgcttcctggggcatcatgccctggctttgaggtgagggaagggcaggaccgattggctctttcaggacaggctttctgcctcatcggcaccaggtggtgtggggaaggggtgcaggcagcagctgctgccttagtcctgatgaatggggcccagcccacacggggctctagctgggaccagataggcaggtgctggccaagctttccattagcccactattctgaagctcacaccaggaagacaccagcagggacgccagccgctactcttctgctgcagatttacatgtaatacagaggctctcagagtacaaaatgcacttcctgataaggagctctggctcatgtggctcctcagtgctctgccaggatgttatgagtcctccaaacacaagcaagaggcagggagactgactctccccgccccacgtgagaagcagatcctggagcctctgagaaggaattctttgttcattccccaccccacttcccctttcttcagcctcaggatcagcggacaggaatatgaacatcagcaggagcagtgacagcagccacggaccttacagacccttctaacctcatggaccattttcactcttaggagctcacttgatccacaaaagcactacaagccatgccccttccctgctgccctgcctcccgctagcttccaatagtcagtggttgggatttctttgcaaggtctgttgtaagccaggtccctgtacatctgggccctggaagcctagcacatatttcactgattctaaaatgcttattttttcacagtttaacctttgtataattaggatacattttatgaccgacagtatgtcatcaattagcgtttttacttggtcagagatacatgaaatgtttccatcacgccctttagagttgttgaaatacattaaatgcattagcatacaggatcccataccgagagggagagctctgaagagtatat

SEQ ID NO: 477041 - DNA, 822 bp, Homo sapiens
tgtgtgagtgtgggggagtgagtatggggaggagtgagagttgtgtgattgtgtgtacacacacgtgtgcacacagggcgggccgcgcttggcatttgaggaggggctcggaggtcctcctgggctggccgctgtcctgggagcagggcaccagggcaccctgcgagttttcaccttgccaaggtatgccagaagctggactccagcttccttgccaacgtgtgcgggaagcaggaccccagctgcggtccagggaggaaaaggggggtgctcacagctggagcgagtccctggagcccacaggcagtgacttgccccagaatgagcttgagagagtctggggatggagaacactggggatgcttggtgtggtgcagagcaagccccacccctaagagccacacccccaacagcccacccccctgccagccttgccctcagtcctgccccctgccggccttgcctctgccagccagagccagtcccccagcaagccccgccccctgctggctctggcccttctaagccccaccctcaggcagtcccgccccctgccagccccaccactgatcatccccgccctcagacagttttgccccttgccagccccacctcctccagccagagtgaatctcttagtaagccccaccctcttccagccccaccctcaggcagccccacctgctccagccagagtgaatctcttagtaagccccaccctcttccagccccaccctcaggcagccccacctcctccagccagagtgaatctcttagtaagccccaccctcttccagccccaccctcaggcagccccacctg

SEQ ID NO: 477042 - DNA, 830 bp, Homo sapiens
gacctacgtctgcacattgtttatagacatggtatggtgaaaggcatcttggcttttccacgcagccagtgccgcttgccattgatggcagaagtgagggtggacttggggacctccaaaccctgcagtcaggaaagaggtgtttgttccagcatcacaactgataagaggggagacagctattactatttccttggtcctggaacttcaaactctaacaggctcctatctaaacgctttggcaaatgcgctggcactttcctcctaatggacagacacaccatgtgtggacacacaaagaccccaaacgttgctacccagagggtcatccatggaccaacatcaactgcatggcctgggagccccttccccacagatgagtgtgaccatcagctgaagtgggaattcaagggccacaaaatcaaaagcctgagtggctcatttacaaagaaggagtcatacagctgctctgccctgccttcggggagtggagaggagactgaagtccagaaagagggtgtgtacaccaacgtgcacgcagaagtacaccagaagtacacggttgcctctggcgctctgctctttacactgctgagaatgtatgtttgctccattgttgaaaattcctttctcttcatgttcatctcagatgtctggagcggtctcagtccgttcgtaaagacaggaacatctgctctttgtcaaactgccctgatgcttgcccgccccaaagaggaatcatatcacgctcatcttttccgtgctctcacaggaccttattcccacagtgacataactggccacactccagtgtgacaattgtttacctg

SEQ ID NO: 477043 - DNA, 662 bp, Homo sapiens
gcatgcattcatctcacagtgatgcctgcatccatctcacagagtggaagctttattttgatcgagcagtttggaaacaatccttttcttaaatctaaacatcacacaactaagagaaactgtccgaataaactttgccaaaactctggaaaatggtcaaaagattacaacaaccaagtgaaagcagactcaaggaaaagacaactggaaaactttacgacatttttagcttgcctttgcctcagcaaattggcagttctgaagtgtcagaagcccacgttcccagtgaggaagcctggtccatcgtccaaaggaacaagagaagatcttacccgcaaattattatgtgtctgttctgactgggagtttaaaattactaaactaacatttttgaaagaatgtatttgggcatttaacaaatatgttaatccttaaactgttattgggcatacagcaataaaaataacataatttttatgtgtacaatatttatggaatacgttactggaacaaatgaataatttagataataacatgacaaagaacagaaattgtatacactatagagcatagtaatagaataatgaatgattaaaattattaatatcaggtagaaaatgaaaggtatctttgagagcagaactcaaggaagaaagcaattc

SEQ ID NO: 477044 - DNA, 1313 bp, Homo sapiens
gcggctttttgcccccgccgcggctttttgcgcccgccgccgcgggttttgctgacgcggctttttaaccccccgccgcggctttttgcgcctacccccgcgggtttttgctccctgccgccgtggctttttgcccctgccgctgcggctttttcccccggtcgtggctttttgcccccgccgctgaggctttttgccgctgcggctttttgcccccgccgccgctgctttttgcggctttttccccccgccgccgcggctttttgcggctttttgacctcgccaccgcggctttttgcccctccaccgtagctttttcccccgacgccgtggctttttgccccggcctcggcggttttttgccccctacgccgaggctttttccccgccgtggctttttccccccgccgccgcggctttttgtgggtttgtttttttttgccgccgcggctttttgccccgccgccgccgctttttgccgccgcggctttttacccccgccgccgaggatttttgcccccgccgccgcggctctgagggcgggagcggcacactcggctgccagctccactggcgttctggcaagggcagcgcggaggggcgctcctggtccagctctccctgctcgggagtgtatgaatgctttgtgttctgacaaagagactgtagctcccatgtcctacctgcttggttgcattgccagtgcccacgcaggactggatgctgcacagagtgtaaagggggcagaaggatccaggacacctaggcctggagataacgccaatgctgggaggggctggaggtctagtgagagacacaatttgcggcaagatggggacgaagtaggatgcacagagaagattttcagaggtgatggtgatgataaggatggtgatggtaaggtgataatgatggtgatgatgaggaaggtgatggtgaaggtggtgataatgatagtgatagttatgctgaggatgatgatgagaatggtgagaatggtgaaggatggtgatggtgaaagtggtggtggtgataatgatggagatggtgagggtggtgatagtgaagttggtgatgatactgatagttatggtgaggatgctgctgctgatgctggtgagaatggtgagggtgagactgacgataatgacgatggtgatgatcctaagctccatggaggcaaggagtatactatgttcattgttgtgtcctccatgccaagttaagttcctggaacacagtacactctcaataatttgttgttaaatgaatgactgaatctatattcttagtatggaaagatgtttgaaata

SEQ ID NO: 477045 - DNA, 534 bp, Homo sapiens
ggctccaggtgtatatcaggccccaggtgtacatcaggctcacaggtggacacccaggccccatatggacaccagcctacagtcggatatcaggccccaggagaacatcagtcccccggtggatatcagcttccaagttgacatcaggccacaagtggacactggacttgaggtgtacatcaggcctcagatggacatttggagtctaaaggccccaggtgtacagcaggctcaggtgcaaatcaaggcacaggtaacaccatgccctaggtggttacctaggcttcaggtagacatcagaccccaggtggacacctggacctcaggtggtcatcaggccctaggtggaaactcaggtcccaggtgcccatcacgttccaagtggacacccaggccccatggtgatacccaggttccaggtgggcactgggccccagatgaacaccaggctccatgtggataccagaacctgggtggacacccagctctgaggtggatatcgggctccaggtggacatcaagcctcaggtaggt

SEQ ID NO: 477046 - DNA, 766 bp, Homo sapiens
atagaagacacttctctgcaccccaaaagctccatgctgattgcgagaaggaaatgctggatggaggggttcctggaactactgtgagggaaatggtaacagaactttggatgtggaacgtgcagtaggagttacacgaagtgcgggtctgcacttggggtggtcagcacggcggatgcccagcaaaggcactgcctggtccacatcccggagtggtctctacgccccagtcggcatcgcagctgatggtgaaacttttggtgtggcagaagagtgtccacaaactttggaagttgctagagaaaaatgaaacgactagttttgaaagccttacttctgccaatggaagcacattccagcatgtcgccaacgcaatccattttccaccactttcacaagaaaagttacggcacaattatactatcctacccttatatactttttgtgcatgtgtacttgtgaaaactccaggctctaagtggacaaccaggccccaagctgatgtttactggggccagatgtctacgaggccccaggtgaaaagtccaggctccaaatggacagcatggccccacgttccaggtagacattggaatccaaatcaacaccaggcccaagatggacacgcaggcctgtggtggacatcagactccagaaggtcatctggcttgaggtggacatcaagccccaggtggatacctagtccccaggtggatatcaggccccactttgacaccagtccctgggtagatacctaggcctcagg

SEQ ID NO: 477047 - DNA, 669 bp, Homo sapiens
aagtccaagatcaaggtgccagcaggattggtgtctgtggagctgtgaggagagggccactctcctccagaccccagaatggtagattcactaacatcttgcaccatgagcctggaaaagctgcggacactcaacatcagcccaactcaacatcagcccatgaaaacagccacgaggtgggctataccctgcaaagccacagggacagaactacccaaggctgctgttactgccataggtcatgattcctttgatggatctgggcaaagtcaattggaaaccttctggaaaggattcactatgatagatgccactatgaacattcatgattcaccagaggaggtgaaaatagcagcattaataggagtttggaagaagttgattccaaccctcataaatgactttgaggggttcaagaccttagcagaggaagtaaccacagttgtggtgaagatagcaagagaactagaattacaagtggagcctgaagatgaccttccgagaggctccggaaagttatccagaactgtccacctgaaacatgagcctgcagcatttgtccacctgtcccacactggttgaggtcttcccctgaggctgttaacctgcaagtgcttctgggctgtatttgtgctcaggcaaaatcctacaataatggagatgccctag

SEQ ID NO: 477048 - DNA, 1431 bp, Homo sapiens
gtgcggctgggaagagctggcaggtggcacccgacccgcagcctgtgaatatgtctcatgagatctgatggttttaaaaatgggagttttcctgctcaagttctttttgcctgccaccatgcatgtaagacatgacttgctcctccttgccttccgccatgattgtgaggcatccccagccatgtggaacttgagaacatgtgatatttgtctttctgtgcttggcttatttaagataacggccttcagttccatccacgttgctgcaaatgacatgatgtcattcttccttatggccaagcaggattccattgcgtataagtaccgcattttctttatccattcatctgtggatggacacgtaggtggcttccacatctttgctgttgggactagtgctatgataaacatgtcagcctgcttcattaataccctcccgccttttgaaatcgaggcccagctgaccagcattaacatcaacacagaccttaagactgatggactctttaaaataaatctcttcaagtgtttgacagactttctcttcatcgacacatctatgcctttccatgtaaagggttgcaagatttaccatctgctgtatcaggcaccttgggccaccacctcccatccccaggcccggcctctgagtccatccctggtggtggaaaacggctgtggcaaacaggttttcctgctttgttctgacaatgcctcacctgaagtgtcaactgtggccctggcttcctgcccagggaccttcccccgacattgtggtgctgccgaaagcactcatatctgtgcaactggcctaggggagctcactccccagggccatggagagtgtcagggaagttatggctacctctccctccaccactactgctactgccactattaccattactgccactaccactaccattgctgctacatactaaaatcactactaccattactaccaccccataacaactcttaccaccaccattcctactatcattactcctaccatttctatcactactactacaactgttaccaccaccactaccactgtcgccactattaccatcctcatgactactaccactaccatgctgccactactccctctactactgccattacctttgccactactactaccgttgttaccatgatcactcctcacaccagcacaaccaccacgagtgtttgccgtgagtcagacactctgctgaacatttacagtatctgatcacatttactcctcatggcaactctacagtaatttatcatttccaggttaaagtgaggggtcactgagactcagagtctattttctccatctttatgtccatgtgtaccttttgttgagctcccacttagaggtgagaaacttgtgatatttgattttctgtttctgtgatagttcactttttacaataa

SEQ ID NO: 477049 - DNA, 903 bp, Homo sapiens
gggtttggcgttgatgctccttttgggcaatctcacagcatggagctctaggcctctgtgcgtctctggtgtttggatcctaggacctgaaggtccaggggagaagtcgtctggggggttgggaggctcagggaagaggctgcttcctgctgtggacttgattagcagccccatggacagtcactggactgaacaggaccacctctcacttcccctagacccaaagggtgaccaagagactggctccagggcttgtgtgggaaagtcttctgttcgagtgagcctgggagtaaacactcctgctcgagtgggaaagtcttctgttcgagtgagcctgggagtaaacactcctgctcgagtgggaaagtcttctgttcgagtgagcctgggagtaaacactcctgctcgagtgggaaagtcttctgttcgagtgagcctgggagtaaacactcctgctcgagtgggaaagtcttctgttcgagtgagcctgggagtaaacactcctgctcgagtgggaaagtcttctgttcgagtgagcctgggagtaaacactcctgctcgagtgggaaagtcttctgttcgagtgagcctgggagtgaacactcctgctcgagtgggaaagtcttctgttcgagtgagcctgggagtaaacactcctgctcgagtgggaaggtcttctgttcgagtgatcctgggagtaaacactcctgctcgagtgggaaggtcttctgtttgagtgagcctgggagtaaacactcctgctcgagtggctagctcatgggtttctgcaaggaacgtctttgaaatatttggtagatctaaggctgaatacagaccattcaccaaaacgctttccaaaaccatctactccagattttgtgaataaatttaaaatgctgttgc

SEQ ID NO: 477050 - DNA, 1298 bp, Homo sapiens
caggttacactgagcagggaacagtcacactgtctccaaatccaagacactgtcagtccctgcggggcccccagctgagcctgtcttgcaggccccaccctggccctttgagtctcacatcctggaacagagtggcctggaaagaggtggattgggctgcattctgcggagaagctgttctcttagcagcagctgtgtttcccctgctgggtccaggtaactcctgtgtccggagcctcccaggatggtgcccctgccatgtcgctggatgtgctggggcggctcctccgtcgtcggggacagcgctgagagctgagactggggcggctcctccgtcgtgggggacagtgctgagagtgagactggggtggctcctccgtcgtgggggacagcgctgagagtgagactggggtggctcctccgtcgtgggggacagcgctgagagctgagagtggggcggctcctccgtcgtgggggacagcgctgagagctgagactgggacggctcctccgttgtcggggacagcgctgagagctgagactggggtagctcctctgtcggggggacagcgctgagagtgagactggggcagctcctccgtcgtcggggacagcgctgagagctgagactgggacggctcctccgttgtcggggacagcgctgagagtgagactggggcagctcctctgtcggggggacagcgcttagagctgtgctggggcggctcctccgtcgcggggacagtgctgagagctgagaagtgtggccgcggtgccatggagacagaccgtccccttcctgccttcctttcctgatgagatgccaccctctcctccacaatcctcactgctcaccaagggggaagacctcttgttttcagtaggagaaatctttgtgctcagtgacgaaggtggctctgttgacactttatggggggaggacaaagggggctctcgggttcctcttgccctctccctgggactcctgccacatttccctgagtcctggctgctcccaacccttccacctacccagacgttcatcccgtctgctttgcgcacctgctgggtgcacatcaggagaaaaaacctgggaaatgccattgtgaacataggccctggcaaagatttcatgacaaagatgccaaaagcaggtgcagctatccatggagtaataggcaacctacagaatgggagaaatatttgcaagctgtgcatccaacaaaggtctaatattcagcatctgtaggaaacttaaacaaattaacatcaaaaaacccaaacgactccattaaaaa

SEQ ID NO: 477051 - DNA, 1032 bp, Homo sapiens
gaacgcttcgtgctgtttctgcaatgctcacttgcgggtggtgttacaatcaaaagaatgaacacatcaagagtgatttcaagtccaaccccttccctgtgttttctgcacagcttggaggccgtgcccaggtcctggatgttcctggtgacctttcctctttgccctttgctctcccacttggagctccatgctactccctcctgttgtactgaacctggccctcgttgccccttacgagggaagtccttgtcctctcatggcttccttcttgtccccttccctcagactcttcgtaataattatacaatactaattccaaatggaaactggaggcatggagcctatgccggcgtctccagcttctccagaggtaggaatggacactcaggtctccactgcatgctggtggatttgggagagtgtgatccatccaagccatgcgaaaatctgcacgactgagtcatgggacagtggagctttgtgatatcgcgtgcttttaaatccgaaaggacagtcatgatttaaggatttgaaagtcacacatttaacatctggattcacagtcataggtcttaaaccatgatagcttgtgcttctgaggtgcactgaattcatgcgtggctttcctagactttatcccatggaaccttcacgtgtcaggctatgtagagccctgaatctcaaagggagagcttggtcccagcaggtctcattattttgtattatattttaatagtttattttccctcttgcttcttcagttccaggtactgaatagaagctttacaaaagatcccggtaccggtaatagccctggggcgcccacttcacggggcctgcaggaagtcctgggaagggactgtttccacaagtggaacaagtgggccccccactgccctcgctgcctgcccctctctcctcattaaaccttcagagaacacaaaggagccgagagccccttttctctccatcttccaaagaagacttttcagtataaaaggtgccctaaatcctttgtgatgccgccca

SEQ ID NO: 477052 - DNA, 1596 bp, Homo sapiens
gcatgggtcggaggacggagtgggacagatctgctctcactgtgggctggcactgcccaatcggctggggcccagaggaaacaaaaaggtagagggaaggagaattctctcccttccagagccgggacactgcttctcctgcctgtggactttggagctccaggctcctcggcttttggaccccaggacttggggatttaccttggcagaccccggactcgcaagccctcagcccaggactgagaattacaccatgggacccctggacggagaattacaccatgggacccctggacggagaattacaccatgggacccctggacggagaatttcaccatgggacccctggacggagaattacaccatgggacccctggacggagaattacaccatgggaccgctcgatggagaattataccatgggacccctggacggagaattacaccatgggacccctggacggagaattacaccatgggacccctggacggagaattacaccatgggacccctggacggagaattacaccatgggacccctggacggagaattacaccatgggacccctggacggagaattacaccatgggacccctggacggagaattacaccatgggacccctggacggagaatttcaccatgggacccctggacggagaattacaccatgggaaccctggacggagaattacaccatgggaaccctggacggagaatttcaccttgggacccctggacggagaattacaccatgggaccgctcgatggagaattataccatgggacccctggacggagaattacaccatgggaccgctggacggagaatttcaccatgggacccctggacggagaattacaccatgggacccctggacggagaatttcaccatgggacccctggacggagaattacaccatgggaccgctcgatggagaattataccatgggacccctggacggagaattacaccatgggacccctggacggagaatttcaccatgggacccctggacggagaattacaccatgggaccgctggatggagaattacaccatgggaccccaggacggagaattacaccatgggacccctggacggagaattacaccatgggacccctggctctcgggcctttggactgaattgcaccaccagcctccctggtgctccagcttgcagagggcacatcaccggacatcacagtctccgtaattctgtgagccgtgataaatgcatgaccgatgcctaccgatgatgaccagggaggctcagctgacagctttctccctcctcccaccaggccccacccgggcctcatctctcaaaaaggaaagtcctggtttaccaattcacccacaaatgttagcgatttagcacctcttgcttctcctttgaaagggaatcagagaggagagcataacccagaaagtgaggacgccctggcgaggggaagggtctggagggcagccccactgacctgctccctgcctgtggagccgaagcgtgggctctgggctgggcttgagggcgagtgctcagggtggggccctgctgtcctggcagccgctggctgaaccctccaga

SEQ ID NO: 477053 - DNA, 1348 bp, Homo sapiens
gccaaacagttttccaaagggattgcacatatgtatgccctgatcaacaatgtgagtgctattactccatatcattgccaagacttggaggtcgagctccacaacttgcaccctgagctctccgactccatgggagcagtttttattccagagctcagcctgggtctgacagggactgcactggaacctggactgggatccagagtgaaactgggtgttctacaggaactggcctggatccagtcggaggcctcagagataccgaaatctttaaaatgcaggcatctgggaaatgacgcatcagaagggagaaaaaatgggaacactgtagaaaaaaactggcaaatggaaaatcgtaaagtcctttccatatgtattaacaaaagactttggccatccgaacaggtaactttatctgccaagaacacaatttggaccgaccagtgagttttatattatcgttcctggcacagggctacaatttgagaacagaagccaggaacctctgcatctgtttggttatgtacgtctatatgtatgtatgttatttatatgttatatcagtctacctctggatggtattattagaaataatattaaaagagctctattttactggcctaaagaaaatggcctgtggtcttaagtgttttaagccatttgacatttttaacggcatcccaaaatcaaattctatattaagtctttttcacctcaaattaactttggtagttttcaggagggaccctggggaatacatcaaaagaacattttctctccttataaaaagagagatgctaaactaatgagcttattgaatatgttaaattgcatgagaagcactgtcaaatacagaatcttaggttacacatacatggatatgtattagtcatagaagtgcttaaaaattacatgaaatttctaaaaatctgatatgttctggtataacatcatcagtcatactctaactatgttcttaaaatgtggcatgtcaccaaatcaaccaaatttcttgtcagttgcttgatacaaaattgcaagagattcatgagaaaaactgtaacaagtacttgtgtctgataactttaagatcatactattaaggatttccagaactgtaacgaaaaactgatggattcataaaaccgctaagcaaagactgaacaaaacaaaattcagtaccattaattatatggtactgaattaactattagaataattgtaacttttatgactttttgtttgaaacattactggctccttaatatcttatttttcagatttaaagaaccctttttttttctattaagctgtctataacttgcagccatttgataaaataagcttt

SEQ ID NO: 477054 - DNA, 949 bp, Homo sapiens
cgccaccgagaagccaggctgaccaaggctgaccctcgcaattggacaacccggagtccacagtggaccttgtccacacggttttcgtggcatgtcaaagagaggagagcaacttggacaacccctacgcacagaatgcaacttaggaggagaaatgtcagaagatgatgagttcattgccaaagagatgccttgggtggtctcacccttccagcgacatcttcattgcctgcagcatggaaaaattggagacattcagcagggcgtggaggagttggagctggatgcaggaatcctgctgtgtcagaaggagaacccacaggaaattcggcagcccagaaggagaacccacaggaaattcagcagcccaggagaacccacaggaaatccggcagcccagaaggagaacccacaggaaattcggcagcccaggagaacccacaggaaatctggcagcccaggagaacccataggaaatccggcagcccagaaggagaacccacaggaaattcagcagcccaggagaacccacaggaaatccggcagcccagaaggagaacccacaggaaattcggcagcccaggagaacccacaggaaatctggcagcccaggagaacccataggaaatccggcagcccagaaggagaacccacaggaaattcagcagcccaggagaacccacaggaaattcggcagcccagaagaacccacaggagatttggcagcccagaaggagaacccacaggaaatccggcagcccagaaggagaacccacaggaaattcggcagcccaggagaacccacaggaaatccggcagcccaggagaacccacaggaaattcggcagcccagaaggagaacccacaggcctcccagcttttggaagaagatgccacctaagaccttcatagctagagaggagaagccaatgcctggcttcaaagcttc

SEQ ID NO: 477055 - DNA, 1396 bp, Homo sapiens
gatggtcttttttttggatgctaacatgtacaacgctctctgtaagaccctgcagcgtggctgtttggtgctgcagatctttgagataatggactatagcctcttgatgtttgttaagaagctggagcattcttggaaagccctggtatgtgatggggacactgtctcagtgcatcgcccaggcttctacactgaacggttccagtgcttcatgtgcaacacagcatttaagaagatcccggccaggtgccccctgcacatttctcagctgcctttcacctcgcctccaacatgtgcaccggttcttgggaatggactactgcagagtggtctgtgcttctcccaggcctgcgccatgaaaacctccatgcagggggctccacattccatcctaaaggctgcatgtggtttcctgggtgacgctggaaaccgggagctgaagatagaggaatccatgtcagtctgggttcctggactgatgaacggcatggaaaagactccactcttctgatgaccaggaacacactcaactatctgtgaattgagttaaaaataaagtttcattgtgttaagcttcctgcatttgggggtatttgttacattatgtggcattgccctaactaatacatactaggcattttggatctaaagattaacaaaccacagatctgtactcaaagaacaaggcctagtgaggagagcagctacataatcaggcaggtttcacaacatatcaagagcagtgaaaggacatgcagaggacagtatcagatgactggagaggggcccctgatcaacccagaagctgcaggcccaggaggagtcagggaagacttcttggaggagactgaaggagtgagagggaattggcaaggctaaggagcgagaaggtggcccagtgtccgaggaactaggacggcatgaatgagtcacacctggcatgaggggtgggggtgctgctgtgccaccagagcttagaacaggagcttctggcagtgcagaggctcccacactcctctagcgacttggactctggggaatctggatgtgttttcaggaaggcagactaaggttagatttgcagatttttgtttttcaactatttacttttatatataaagagaacatgcatctgtttcttctgtctccactcttaaaagattaactgctgtggtaatgccctcctgccatcaagagctagaaaactgaacaaaatgtatggagtgagtggtgtgctgaactgaaacacctacgagaggctagcaagggcagcgacctgagatcccccctacccagaggcagccttccagactcagtgcagagacggcggctctcacagagcccagtgtctcactgaactctggaaacacaaatcagatgtgggaggctgaggcgg

SEQ ID NO: 477056 - DNA, 720 bp, Homo sapiens
ttcaatgtctctttcaaacactcagacaaaaactgaccaggaaagggaggagagaaaatgtgtccttctactgctacaaagtggaaagatggaactagtgcatatagcccaatctctcaggccaaagaccagaaagcagagctctgctttggatcctatggaaaacgtgtaacagatgaagtactcaggcagtgtggcacagaaaataaaacagtatacaatgatgggattgtgaaacattgcactttaaagagcccgaccctcagctgccagtctgttggagtttcccctccagacctgtttgcctgggtatcagcagtggaggctacagaacagcgaatattggtgaacagcaaatgttgctgcctgatcgttcctctggaagcttcatctcagaggggtacccagccgtgtgaggcgatgcctcgccctgctttggctcatgctcggtgggctgcatccactgtcctgcccccactgtccgaggagccccagccctattcatctgattcgctcccatgcctggagatgtcactcaaggaggctggagagcagcaaagatggatgcctgctccttcttctgtgacatctgacctcaagggccaccaacctgatgccataggattgctcctgtatagggtgtgtgactacccatgttggagggtcttacccagttgggtggcatgacgaacaggacctgtttaatgaagcactttgtcc

SEQ ID NO: 477057 - DNA, 663 bp, Homo sapiens
gtagtgtttggttttgtttctgtgtttgctgaggataatggcttccagctccatctgtgtccctgcaaaggacatgatcgcttttccttctaacagtgaggaccctcagctgcaggtctcttggagtttgctggaggtccactccagaccgtttgcctgggtgtcagcagcagaggctgcagaacagcgaatattggtgaacagcaaatgttgctgcctgatcgctcctctggaagttttgtctcagaggggtacccagccatatctccggctgcgtgttggaagtaacagtactctcttccaagctgtcaaacagggacatgaaagggaattccctgatcccttgcacttcctgggtgaggtgatgcctcgccttgcttcagctcatgcttggtgtgctgcacccactgtcctgcacccactgtccgacaatccccacaagacagtcttaaagctctgagattctttcctccacttggtctattctgctattgatacttgtgattgcattgtgaatttctcgtgttgtgttttttagatttatcaggtcatttatgttcctctctaaactggttattctggttatcagctcctgtaatgtttttatcatggtttttagcttctttgcattgggttagaacatgctcctttagttcagcaaag

SEQ ID NO: 477058 - DNA, 1466 bp, Homo sapiens
aaccatcacaaataacaagtgttggtaaggatggtaaagaaaagaagacccttgtaccctgttgatgggaatgtaaatcagtacagccgttgtggaaaaccaatatggagggtcctaagaaaggtagccggacctacctgctacctgctgccacctggagtgagagccgccccttggttcctggagggaacccaccaagggacacaggactggaagcccaggatggctagcgcagctcgggatgaaggccagggagaagcgggtgctctgcagtggccaggaaaggtccagcccctgaggccgaggggcttcctgtttcgtcgttgtaggtgctctgggagccctgggcgccggtggcttcatcgcctgcacatagcccatggaaggctgtccaaagttgttaaacagcggtctgaaaggggcaacggcacctgacactgagcccgacggagatgagacgcttcgtgactatgcccacttcacgggccagcaaactgaggctcagggaggggagaaagcagaattccttaaagtacatttcatagatcactagtagaggtgcctgagggaagatgtgtcatggcgatatattcagaaattcttgtataatatatccacagtcttcttagagattcccagataactttaatattttaaaggctctgagaagtcctgatgaatgaaatatcttcactgttcagtatacttatttggtcacagaattctcttttcatatgataagcgttatcctgtagaactgaggttgcatatagcatattttgataagataaatgctattctagaaactttatattaattggattaagctggaaaacttaactagtctctaggttcttctacttgactggcacaagtgtaggaaaaaggctgtgagttgtacatcaataaaattactcataatgctactcaatgcttactgttataattttcaaaatttaaaaagaccacgtggattccatttcagccaaacagaatgataattgaaaaattaaatttactggagattaaattgattctgggaaatcttggtttgatacttccatcctagagcacttacaggatgtacatagaaacccgcatagttgcaagtagagtgcaccgaccagtcgacggcctccagccattcaggtgagaaacaggcctgtgtacccttggtgttccacttcagctgttattatgattctcttaggctggtggttatcaggtcaaagaagcaatacggctgtaagtcatactcaaataagttgaaagattatagacagaaataaattttagctcacagggaaaaatttgatgaagcattaggaaaataaagctcgtaactactgagtgatttggtttttctcctccccctttattaatctatagttttcctctgagttaaatcctgtgatactttaacaaatattattgattcttattgctagtttagcatgtttatttat

SEQ ID NO: 477059 - DNA, 1110 bp, Homo sapiens
attagttttgtctgttctaacatggagtcacacagcaggcactcttttgtgtatttaatgtcttggtgttatgttgaagaatcacttatcgtaagccttaaagtcagctttttaattctcagcttcctggaccatacgttcaatgtcttccttgctcaaatggcccttattattagtgatagtaattttattctcttttcctgtacttttgtccacagcagagacactgaggataccattggcatcaatgtcaaaagtgacttcaatctgaggaacaccttggggttcaggaggtatgcccgtgaattcaaacttgccaagcaggttgttatccttggacatggcacgctcaccttcataaacctgaataagcacaccaggctggttgtcagaataggtaatgaaggtctgtgtctgcttggtaggaatggtggtattacagttgatgaggatggtcatgactccactagcagtttcaataccaagggaaagaggagtgacaacaatagaggatacctcctctggatagaagcttttggtctctcccttgtattctacttggacctggggcctgtcagcatcattcactaccatgaagggccaatgcttcatatcagactggacaacagcatcatcaaatctgcgtccaatcagacgtttggcatcaaaaactgtgttggtggggttcattgcaacttgatgctttgcggcatcaccaatcaactgtttagtgtccataaaggcgacatagcttggagtggttcagtttccctgatcattggcaattatctctacttttccgtgctggaaaacacccacgtaagagtaggtggtgctaagatcaataccaactgcaggtcccttggacatggttgctggcatgtagccctggctccgataaagaagaaagccacaggaacccgagagctgcaggcgagtggcagggagcacagaagcatctcccacttttggggttctgtgacagtgatggctgctggttatctcagtgatgaaagctcttgatgtcctctgaggaggaggctgctagcatctttgttgctgaacactaaggggatctttactgtgaaagctatgaggagtgcatggctg

SEQ ID NO: 477060 - DNA, 678 bp, Homo sapiens
ttttttttttttttccttctgagcgctgatcataagcgtcctgatgcagggacaatgtcttttattgctgacggaactaccttatttcatttttatcctgaggggcttgttggatggctttgacaaaaatactgttagtgatatggtcaatgaaatccaggctgaggtggtctcagatggaaatgaggaatgtgttggaaactggagtatggtttgggaacctccacctagatttcatgaaatgtatggaaatacctggatgtccaggcagaagtttgctgcaggagtggagacctcatggagaacctctgctaaggcaatatggaaggcaaatgtggggttggagccgccacacggagtccccactggggcactgcctagtggtgctgtgagccactcttctccagaccccaaaatggtagatccactgacagcttgcaccatgcacctggaaaaaggaggctcttagatagcagacttcagagagcaggttgtaaaatgtttcttattggacttaaaagggtgcctggctcttagttgattatctcacaacagactttgcagggcaactccaagctatggcaaggaaatatattttggggtaaaacactttgattttttcgcttgctatgtcagagtcatattggaaagccttatgagatttatgctttagggagg

SEQ ID NO: 477061 - DNA, 851 bp, Homo sapiens
agcatgactaagtcctgctgaatttcatggatagaggaggtcatggtagcattcatggatagaggatgctcccacttcatggatagaggtcatgctagcattcatggcatagacaagacagtaagggaagggtcccggagagcctctgacccaccccacaggtgcttgtaccagatgttttgtgcagataagggaacttgcaaagggggcttgattaaacatgccagcagccgactaagggcccacatgcacactgggggaatagggtggaggcaccaggaattttcaccttatacaaataaagaagtcagccccatcagtccgaacaaaaagacatattattttctgcctgttccttgtgggaaaaaattcaaattttctaaattttataagggctgcaatttccgaaatattcttccattcattcaggaagtacttgaatatctactaaatgccaaccactcttttctggatgtttagcaaacaccttctttctccgttcccttcccttcccttcccttcccttcccttcccttcccttcccttcccttcccttcccttcccttcccttcccttcccttcctttcccttccctttctccctttctctctctctttctctctttctctttctttctttgctgtctttctctctttctttcttagacggaaaatagactggtaaaagttttaataaatgtatggaacatgggttaataacaggtgattgatggtagaactgttgctgtagggcattataggcaacttttgtaacatcataaggaagtcaactgctaactgtcattggagccattataagtctcagaataaggaatagaaagtacaactttt

SEQ ID NO: 477062 - DNA, 515 bp, Homo sapiens
gacctaacaaatgatgcttatttagaagaattgcttttggcattatggtcacattgacaatattgagtctaccaatccatgagcataacatgtgtttctataatttctttcagcagtcttttgtagttttctttgcagatatctttcactttcttgctgccttcaagcatctgtttaacaaagcacatcttgcaccgcccttaattcatttaaccctgagtggacacagcacatgtttcagagagcacagggttgggggtaaggtcacagatcaacaggatcccaaggcagaagaatttttcttagtacagaacaaaatgaaaagtctcccaagtctacttctttctacacagacacggcaaccatccaatttctcaatcccttccccacatttcccccctttctactccacaaaaccgccacggtcatcatggcccgttctcaatgagctgttgggcacacctcccagacggggtggtggccgggcagaggggctcctcacttcccagtagggg

SEQ ID NO: 477063 - DNA, 3699 bp, Homo sapiens
gataacattaggagaaatacctaatgatctatgtttgcttaaagccatggggctctacaatcagcaggagacaaaaccagccaggtttgtttccttccctgcagggcgctgcgaatgtgctgagtctacgttcaagccaacaagtctcagtcccactcaaggccctcaacatagtaccagggtgttgccactggtaaggcagggcccatgggctcttcagttagcagaagcttacaatccattgagagaaatagataagaaaatttatggtgataacagtgtgataaatattgtgagagagatgcaatatgagaaggacttgactccccctcaccttcttgctaactttgaagatggaagaagggggtcacaaatgccggtagccgctagaagctgggaagagccttcagcttacatgcagcaaaaaatggtaaccttggtcctacagctgcaagatcttctaaaagaaaatgcagccctgcaaacaccttgatattaacccagcccttttggacttatgaccttcagaactataaaataacaaatcattgttgtcataacctgctacatttatgctaatttcatatggcagtaatgggaaactgctatactatctgtatcaataatttaaaaccatgagatcgcactgcttcctccaatttcaatccagcaacacagaattcattcttttcttctgtcttatttgtaacctctttcttcaacaatgagaaggctagctatcattatctacagcatatttatatgttcaatttaatatacatataacttagttccataatttctaacccatacctgtgtaagaagcacatttgctaattacagtacagacttgatgtgtagtacattttatattttagctttataacctggagtcaaatactgcaaagaaatttccctttacattgaaaatttggctgtttgacacaagaggcctagctttcagtcagtctcatctttccttcctcaataagtttaatcatttttagcttttgattgaaagtgagggatgtgtgactcttcctttcatatgaacacttagaggtcatggtagttttattaattggccttatttcaatatttttgtggctcagggacacagagacacaaagtaagcacatgtggttttaagaatgatgccaatagactttcttgatcagggttgtcagaaatcttcaattttgttttaaaaaagaaatatctgccaaatacaataaattaacataaaataaagcaaaatatagcctatacagtttgtactgtgggttacggctgcaacatatgaattctgggcaggatacaattctgttcataaacatatctctgtgaacctgggcgtctcaatggttaaatgacagcagagctcccttcaaatccatgttgaacttgatgatgggcaaaaaacaaactcttatgttagaagtatttttaaaacatctcatacactggacagttgataaagttgctgataaacaatttaaatgctattcttgtagagtttgcatgtcatttgataaacacttataatacagcccagcaaagaacactaagcaatgacaaaatttataatggaaatgcacatttcacagtaaaaaccaggtaatatctggaaataaactgtttgctcactaatgaagtgaagccttaaaaattaaagaaaattcagaagaaagacggtaaggatggttgacacttcattgtcactgattacagatgtaatggtgaagttgagatgatgatcagagtcttacttcagacaaatcatgagtctcagaggaagtgatgacagagatgtctgtggaaactattgaagaggaaggctttgctaaatcttcatggagtaatatatcagtgaatatatttgaggggagattttcctataatttgaagtatttgtttaatatttcactagaatggaattattgtgctttgttaaaaagcattcttagtgttttttttttttttcaaataagtttaaatttctttcctgaagcttgtataatgagacatcccgtaaggcctagcaggaaaaactgccaatttcaaaatcataagcattttataccatccaaaaaatgtttggaatttaccttttggagctaagggcttctttatactgggaaaatcactttatcaggttgtttaatgaaacagatttaaagtaagtaccctgtattgtccttggaaaagttagaggggtttgaaggacttcagacaagtcagattctcaaggaaaatgcaatgtgatgggaaatcatttccatttccaatatgtaactttcgcagttttgaatgaagttttagaaaatgattaactgtctgctatatactaggcatctattttaagttttattatgtttatttaacatcatttgcacaaaaatatatgataatgtgataattgaacacttccacctattgaaagaaaaatattgagaatcagatattttaaataaattccttaagtggagcatggttatagtgaatgagggaataaagttaaattaaaatggaccatttcttgatttttttttcttatacaaactcaaatttgttgtacaatttttcttctcgtttttataattctggctatatgccatgtgttacatactgaatgtttgtgtccctacaaatttatatgttgaaatccaaacccctaagtgatggcaataggaggtgagggtaattaggttgtgagggtggagctttcatgaatgagattagcactcttacaagaagagacactagtgctttcttcctttctctgttttctgacatgtgaagacacaatgagaatacagccttctgtaaaccagatgagctctaaccaaacactgaatctgacagcaccttgacctgaaattttctaggctacagaactatgaaaaataaatttgttttctttaaaccacctagcccaggatatatttgttataagagccagaactaactaagacatcatgtcaagggacattaattattttttttcttcttcagtagtttctaagatgtttttgtatttttttcaaacatttctataaagtatttgacattggctgacatactggccatttcttctgcttattagtttccacagttttttatatatatgtgatatatatatgattatatatattttatacatgtataaacatatagatgcctatatatctatatattaatataaatatatagatgcctatatattttatatgtaaatgtaaacatataaatattatatgtataacatgtatatacacacacatttgttttcttggatcatttgattactgagcaagtgatgaaaataaaagtaagcatactcaggtctccctaaacaacttcaccttcattttaaaaaaaaaaagaatttttgctgttctatatagtgccacctttggaatgcttaaggcaaaaagccatcaaaatggagctcactcatgtcattccctttttatgggtatcaacccttcttctagaattgacctactttagcttttactacccaatgccctcaatttattgttattccactctttttctagttaacatttgttacctgcagaagagatgactctggtaggagcttatttagctacattggaaggtgctccctttgaccattttagattcttgtttaagttctttaatgtttgttttagtttgctttagttatgtttg

SEQ ID NO: 477064 - DNA, 1505 bp, Homo sapiens
tagtgtgttgctattatctgtgggctctgaattcctcaaatcccagttccctagttatcatcatgtttagaagtccttcaattgggaaaggaggtgttccagaagaaggaattgttatcatagatgacagctccatgtgtgttattgcccctgatgaccttgtagtgggacaagatgcggaggtggataacagtgatattgatgatcctgaccctggggtctgcatggaaattgtgaggaagggagattctcattgtggtgggggactgagtgcagcagggagctccccggcagctgaaggcctctctcttcctcttgcactctcgttggggttggtggtctggggggtcttacttcttggaggccatgtgggtcatgaggttcaccaccctgttgctgtagccaaattcattgtcatatcaggaaatgagcttgacaaagtggtcgttgagggcaatgccagccctagaatcgaaggtggaagaatggcaagtcaggtccacgaccgacacgttggcagtgggaacatggaaggccatgccagtgagcttcccattcagctcagggatgaccttgcctacacctttggtagctccagtagatgcagggatgatgttctgattagcccacagccatcataccacagtttcccagaggggccatctacagtcttctggatggcagtgacggcaaggactgtggtcatgacagttggtggtacaggatgcattgctgacaacctcgaggctcttatcctacttctcatggttcataaccacaacgaacatgggggcatcagcagagggggcagagatgatgacccttttggctctctcctgcaggtgagcccgagccttctccatggtggtgaagaaactggtggcgtccactatgtactcagtaccagcatcacctcatttgattttggtgggatctctatcctggaagatgatgatggtaattccattgatgacaagcttcccgttctcagccttgatgctgccatggcatttgccacgggtagaatcatactggaacatgtacaccatgtagtagaggtcaatgagggagtcattgatggcgacagtattcactttaccagagttaaaagcagtgctgatgaccaggtgcccaatatggccaaatccattgacttgggcctttacttccaccatagtgtgtcagggatgccaatggcgctgcacgagaagatgcagctgtctgtcaaactggaggagcagagagcctataattttcatgttgaactattttatgttaattttattgttacgctagtataaaatgttaatttaaaaaatacatatttttctaggctttggaatgcttaagtataataaaagttatttggttctttgacttttgaaagaaaacacatttttttggaggctgtactctgatgcagttttcaaggtcttctgcatttatgagggtattcaggtatttcaattcataggggaaatgcctccagcttttatccattcagt

SEQ ID NO: 477065 - DNA, 580 bp, Homo sapiens
tttgatgtacagactattttgtcacccagcaactttcctgtctcacccctatgagcacatttacatgtgtgatgacagttgctgtatcaatcacgggatttgcagttggttctcatgatccacctacgcttgaagatccatatacaaactatgaaattctcatgaagaatcagactactcctccaactgacactgtttttccaatttgttggcatgaagtcttcatgtatgtatgctttgatgaattgcctgctttccaaggtgtagggcactgtgtggacttgggtgctggtgccatgactgcaacaccaggcccagcttttgctgtgacactgcagccatctgagtggatgtggcttaatatctaccatttaaaactaaaatactgctcacaaataaagttcagccctactggttatcaatacacttccctgattatttcctttatacgtcttttgtctgctgacctcttaaatgacatgtaatatagggatccattttcttctatattaccagatagtacatatctaaacatctctaccacctatatttcatgaagatctctgggaatagtgctaga

SEQ ID NO: 477066 - DNA, 820 bp, Homo sapiens
ctcagatgaggcaccatactaagatatgattcttttctggatagtgaagaggcctggtggaactgccatcaataagccaagtgcaatcagggtgagaaacagggaagaaggaaatgtggggaaatggggtgaacgtcaggtggatcagagagatgcagtcatgagggtcaggtgtggcatctggaataatgtgggaggccggattgaagtccaggccaggaacaatggtaactgtgggagactcaacaaagagcttccgaggcaatcaggaattgtcagtcttcagctgctaagccaagaagatctgggaaggagtcagtcagagtcttgggccagagttccaggggctctgggagtggctgccagccctcaccctgacattcctctgcccaatacaaacacattctctcttctttcctcctttcaaaaaatgcctaaaatagcagaaggcattatatactgagaaactacatgaaccacaacttacaggacaatgaaatgaaacgatgtgattgatgcacactgactacttatgacactgagatgtattttctgcattctttaatgacagtgaaatgtttgacgatgaacagtaagtactgacaaaactgtcaatatattagtatcgattcactttttaatagcagtaaaataattgtgcatgcagagatatattggaagtctaatttcaaaccaaatgctcttagagatacaattttctttctttacatcctggtttttcttcagaggctagaaataaaaggaataagtgaaataaatagcattagtgataagcaaaatatattctcagctgttctag

SEQ ID NO: 477067 - DNA, 6553 bp, Homo sapiens
cctctctctctctctctctctctctctctctctctctgtgtgtgtgtgtgtgtgtctctgtctcttcaccacccctcctctggctgctgcagtttgctgggtgttcacttaaggccctattcatctggttcactcctgtacctggagatgtcactcgaggaggctggagaacagcaaagatgggtgactgctccttcctctgggatctctggcctcgagggcaccgacctgatgccagtaggaacacacctgaataggcgtctgacaacccctgttggatggtctcacccagttgggtggcacagggaggaggacacatttaaccaagcacttcgactgtcccttggtggaggtgagactgtggccgcccctccctctagggctcaggcccagggagatcagcattctgtttctgagcccctggttggagttgttggagttcctgcagggaaaccccatccagtgaggagggatgggtcaggatcaggactgaagaggcactccagccacagtctgccacagctggtgtgttgggctgtggggaagacctcttgggaccaagccgtcagcctctctggctccagcaggggaaaagcatagcctggagcaacagggatggctatttgacaaatgcctgagaaatgacaacaaacaattatctaataaaaccattataagtttaagcagtatatattgtattatatgggaagcatattaataatatatacgatatgtattaaacaccaatgatatgcattaaaattttcttttttactctttaatgaaagattttcaagataaaatatttttgttcttgtttcttttgaatcagaaatattatataactagcataacaaattgtttacaacaattttaattcaattgaagcagtatatttggaggactgattttgtgccaagtatcctgaatctctacccttctctgttagtattaaaatacacttcctgtaatcctaacttaaaactactgttatggactgcatgtttatgtccccccagaattcatacattgaaaccctaatccccagtaggatgtactaggaggtagggggtttgggagataatttaggttagattagctcatgagggtgggtcccttaatgatgggattgatgtctttataaaaagaagggaaaacaaaacatcactctatttttgtgcgcaatcaagaaagaccacatgaggacacaaccatgaaaaaagccctcatcaagagcctgactgtcaagctgacaccctgatcttggacttccagcctccatcactgtcagaaacaaatttctgttttttaaagccacccaacctcaggtattttgttatagcagcctgagctgaatgagacaactctcatttattgctcattttctctatcccttcacagagaaggctcacaatacagttctgacatcctttcttcatgcgcttgcttcctatttattctttcacaaaattaccttatgtgtttttttaaatttaatgtttcttatgaataatttcagaaactaataggtgtacaaagaacaaccatcattccaccacctaaagatacccttcaaatttagtgaatttaatttcaaataactcataatacagacttgcagattgaaaatacgcaagttttatatgtaccttgtcagtttgacaacatgagttcatttgacacattgtctcctttttctccaggcttttttgacatataattgataaaaattatataaatgaatatccctatttttctgtgaactgcctattacttttttcactgttctaataaaaaaaaaaacactttggataggttttccaatattatggcaagtatttttaaagaaatctatttcgtggtgaaactccaagaaggtatgtatcagctttctgttttctcccttattttgattcatatttcaaaatatttgtctaggaagcttcattgctggagaaatttctaactaaagaaaatatcttcatcttttctttaggtttcaacctgagtacctggtgattaagctaacagaaacaacactttacaattgctcctactgacaccaataaggaaatgtggcagttctcttagtttggttcaaaactgataataccatacttataaaccaaatatcagtatttttaaaataattcatgattagaacatctgtattttaagatgttttctgtttatattcaaaaattagatgcatagagttttatgtgaaatgtcagaattgagagatgcaccatttatcaaatggaaaaagtaaagaagtaacactctggactttcctgactctctttttatagttcttctattgactcacttgtgaccttcagcaaatggagctcaggtgagctgactgtaaaacgagtatagtcatactgacctgtctacccgtggtgttataagactcaataaatcagagcctacacagttctttaaggttctcagatgaattgtgttagacaagggtgaaatgtcagagtagaaaaactgcttgtgccttttatacgtcagttattaccaaatggccactacaaaatagtatcacctcacacctttataaaattattcccattttctgaaacaaactagttcagccacataaaaattcgatgcttaatagattgtgttaacctcaaaaagctgtttcattatctcaagtattcaataaaatatgtagccctgttatctctgatgacataaataaagctttttaaaacaaattacggattaataaatgcattttatgcatttgcatgtttcagcatctttgcttgcttttcagatatgctgtcgggtgttaatagctatgttgtctttgccaacccaatatataagaagttggtagtatattttaaatcatctatattcagagttcaaattaattttactttgatttttttaaacactcactgattaaacttaaggagctaaacatcttaggcatttaacttcagtgttgtgtcctcccttatcagagcaaaattgggcattttcctatgcacaatagaggaaaaaaagcaattactatcaatcagtgactaagcaacagattggagtatttagaaagactcattcatacacagatttgcagcagcgttcagctcttctgattagattccatagattttaaattgtagctaattaggctgtcataggttcattaatggctctcctgattcagcactccctcacctgcatgcatattaaaactcattagctcccttgtctaaaataccacctgcattaattgctgccaatgcaccaggactcttcagaaggcttttctgacaacgatgctacctgcttgtagtgccccgtgccccgatagctcttcaggagagctcacacataaagttcatggtgctgcacacgtggtgagactgcagctgttgtaagggcagtcaagcctgttttacgcttaacagcaggatataaataattagtgatgcctgtgctgtagggcttaacacaaggccagtgtatccctttctaagcttctactaaaccatccctctctacaaaataagctcccaaatcgtctttcttttgattcctgattctgtaagcagctcccacaaaatgctaagactaagccagaagagaaggaacactgtagctttcttttagttcatgtcctcggtctcttgtgtatgtgagatgagcccctgggtagggcttttgaaatgatctcagttcatagctgcctgaatcagttgccagcatcaattaactaattatgacctcacatgttttaaaatatcttttatccctaaagtcaaaatagcctttcatttatttgtttatttatttatttacttggatattcattccctcagagaagcatctttgtagcaaaagaatgtggaattcggagttatcaacataatctgatggaaaatattactgcttatgttaagaaagaaattctactaagaatgagctggtaaaaatggtaatagttgtgaagttgactaatgataaaagtaagccttactttccagcccttttgtgttctttaattctttcttcttggtgctaaatcttttaatagtaggctgctaccaactgctagttatgatttctgggtatttctgtgtcttccaaatttattattgtagtgactcttatttgagggtttcaagatttgagcatgtcaaattacaagaaaattctatatttttatatttatatataattgagaagtattccactatttgtcgaatttaaatcaacaaacaataatgggtaatcaaattccatacttcatataaatatatcttaattattactcttctatatgcattgtattttcagtgatcagtaacttaatctaacttatccctgagaaataaaaaagaattatgagaaaatgggaaaataaagcaaaaatatatccagaaaatgtgctttgggtcataataatgtaagttatttttagattatagataattttagatatttattttttaccatttattttatgtatcatttcagtttcattccatgggatttaaaaataagataattttaataaaaatattaaagcaataaaattataagtttcattgtatagggagacatgaactttattatgtttaaatgtatcatatatctccaggaaaagaaatctttactacactctaatgtcctccagggagagggatatctccctgtttactctcagagaatgtaaataaatttgctccagagaaaaactctgtctctccttttccaaggatgccttaacatatattattgaaaatataattctggagtatgtgctgttaatgccaagatgtgtaaataggtgagaaatttttcaataatggtttcccaatacccaataaggcattagaaataacacatattattgtggttgttactgcacattatccaatgttctgaaacatactagaaggtatttttttaatatcgccaaatatacatccaaatagctagtcttcttaaggaaacaaatgctactagctcatattaactcagaagttaccattatcttgcccatgctcattctatcaatttgagatgtacttttccgtttattctgtgtatcattttttaaaagcatcttaatctgaacacaattcatgaattaatataaaatatttttataatataaatattgaactataaatattcacattaatttcactttataagatttggcatgcagtattttgactgtcaatcaaatctaaatttaatttccattataatttcttcttcaacccattagttatttaggagtatgttttaaattttctaaacaaatagaaatttgaaggagttttatatgtttacttactttttaaaatctattttctttacctactatgtcaatgtcaatgtattttaataactagaggcctatgcaataaattttattcacatttttgtggctttgaagaggtaaaaagactttttagatttttttttcatttcctgagatttagatatacaatcaaaattgtttaggtcatgatctacagcctttgcagtacttatgacatcatattttaggatacagaggcctcattaatttttttaattttttaatatgataagcaaactgttgtcttgttcaatttatatttctaatcaaattgaggctgaaaattgagcaaatgaacagtgtactgtttatttgctttatgttgtaacatcattacaacgttcttctttatttcttctttttacatgtttgctaaaatccccagtaaaggtatttgagcgtgggtgtttcttcatggaaagatttatttttttattattactaattcagtctttttagttgttgttggtatatccaggttttatttattcttgagtaaactgttttctatttataaatttcatatttcatttatttgatttttgacataaagttgtgcataatattttcttctaattattttatttagagactttagtaatgtcccttctctgatttttaattttggtaatatgttgtcgtattttttgtttttcttaacatcagattagataaatgtctattgctattttgatctttccaaagaatcaacttttgatttcaatttctggatatttttctactttttaattacatgattttcactcttaccttcattatttctttagccctacatactttgcttgatttgcgtttcttctgcattctttaggtggatgctaagattattgactttagatcctgttttccttttattataagcacttaatggtaaaaatatcccttttagcaccactttatctgtattttaccaatgttgatgtaatatatattgatgttaaggtattatccctctgtgttcctagaaacctgtgaattaacatgcttatttattggctctgaatatattttcaaattaattcgagaattatttatattctggcaatatgtttctcatttggatacagaatatcctttcaacaaaaacttaaatgatagacattttaagtcccaatttcacctttgatgtaaaagaagttcttaaggtggtcttatttaaaagggaatatt

SEQ ID NO: 477068 - DNA, 810 bp, Homo sapiens
gaatgtaatagaatggaatcattctatgaaatcgaatggaattatcatcgaatggaatcgaatggaaacctcgaatggaatcgaatggaatcatcatcaaatggaatcgaatggaaccatcaaatggaattgaatggaatcatcatcgaatggaatcgaatggaatcatcatcaaatggaatcgagtggaatcatcaaatggaatccaaaggaatcatcatcgtatggaatcgaatggaatcatcaaatggaaaccaatggactcttcatcaaatggaatcaaatggaatcatcgaatggtatcaaatagaatcatcatcaaatggaatcgaatggaatcatcgaatggaatcaaatggaatcatcatcgaatggaatcgaatggaatcatcaaatggaatggaatggaatcatcatcgaatggaatcgaatggaatcatcatcgaatggaatcgaatggaatcatcgaatggaatcgaatggaatcatcattgaatggaattgaatggaatcattgaatgaaatctaatggaatcatcgaatggaatcgaatggaatcatcatcgaatggaatcgaatggaatcatcatcgaatggaatcaaatggaatcatcatcgaatggaatcaaatggaatcatcatcaaatggaattgaatgaaatcattgaatggaatcgaatggaatcatcatcgaatggaatcgaatagagtcttcaaatggaataatctaatggaatcgaacggaatcatcgaatggaactgaatagaatcatcattgaatggaatagaatggaatcatcaaatggaatc

SEQ ID NO: 477069 - DNA, 986 bp, Homo sapiens
tcatcattgaatgcaattgaatggaatcatcatcgaattgaatcgaatggaatcatcatcaaatggaatcgaatggaatcatcaacgaatggaatcgactggaatcaaaatcgaatggaatcgaatggaatcatcgaatggaattgaatggaatcttcgaatcgaatcaaatggaatcatcatcgaatgcaatagaatggaatcatcgaatggcattcaaaggaatcatttccgaatggaatcgataggaatcatcgaacagaatcgaatggaatcatcatcgaatggaatcgaatggaatcatagaatcgaaatgaatggaatcatcatcacttggaatcgaatggaatcatcaaatggaatccaatggaatcatcaaatggaatccaatggaatcatcatcaaatggaatcgaatggaatcatcaaatgaatcgaacggaatcatcgaatgaaatcaaatggaatcatcatcgaatggactccaacagaatcatcaacgaattgactcgaatggaatcttcttcgagaggactctaatggaatcacaatcgaatggactcgaatggaatcatcaacgaatggaatcaaatggaatcatcatcgaatagaatcgaatggaatcatcgaatggaattgaatggaatcgaatggaatcatcatcgaatggaatcaaatggaatcaccatcaaatggaatcgaatggaatcattatcgaatggaatcaaatggaatcatcaacgaatggaatcgaatggaatcatcatcgaatggaatcgaagggaataatcaaatggaattgaatggaatcgaatagaatcattgaatggaatcaaatggaatcatcatcgaatgcaattgaatggaatcatcgaatggaaacaaaaggaatcatcattgaatggaattgataggaatcattgaatggaattgattgtaaacatcatcaaccgcatcgaatggaatcatcaaatgaaatcaaatgga

SEQ ID NO: 477070 - DNA, 442 bp, Homo sapiens
agctgcctagcatgggctttttttcacagagatggcagcattgtgaaagaaaaacagaagcattcaagactgctaagccccaaactggcacgctatcatggtcacatgtttttactgccttgagcaaacaaggccagccagatctaggtttcggaaaacagattctggatctcaatgggaacagctgtaaaaatccctggcaacgggccacaactttaataagaaagtttaaagtctatcgtgtaaccatagcctttacagtaaaatctgctacagacccaattataggggataaatttctaaccattgcctcatttactctaaaccatgggaaaaaagacctaaaaattatgcccattcagaggagtaatggcttcctggcaatgctccctaaccaattctgaataagttctctttaacttatgaattgttttatttactt

SEQ ID NO: 477071 - DNA, 667 bp, Homo sapiens
tgaggagaactgggcacacaggatcacgatgagcagggaagacggtggagaacgatcaggcccctctgctgccagtctgctggagtttgctggaggtccactccccatcctgcttgcctgggtatcatcagcggaggctgcaaagcagcaaagattgctgactgttctttcctctggaagcttcaacccagaggggcacctgcccaatgccagccagagctctcctgtacgaggggtctcccagttagtatacacgggggaaatcttttggaggaaaaatgatctaattgttcaaattcttagtgttaagaaaatggctgttatgcaggagagagcccatcaccaaactgatctaaagcctttgggaaaaaaaattatttttactctcctctttgagagatgcatatggaatgagataggtcattttagaaccagtgggttaccagcctcctgttaactaaaagacatatgaggtggagatattcctccttttcttgtgaaattctgccttttattcttttcagctctaaaaactgatcacctatcctgcttcttcttgcatcattttccataggaaatccttttctaacatgcaaactgttcaaaaaacaaaattttgtgttgaaaaagctttgtcttagacctactccaaaagggctttgccaag

SEQ ID NO: 477072 - DNA, 445 bp, Homo sapiens
tttaatatatgcaaatcacagtcattgtgttgaaaacaactggaaagagaagggactgggagttggtgagagaaaagggtaaaagctgtaggcagagtgctatcagaaacatttttcagagaggtgtgggaacaataaaagcaggtgctgggctacagcagccagcaggagtaacctttttttctgatttgcacaaaggtactgtgtggaccagcagcagccctgtccgttcctgcgtcggtcactatgggggcagctgtgtcctacagacagagaaacccagcagtgactgggtgctgctcaccagcacatttcagggatgcaccattgagcacgtgagattccgctgggctaaatgattggttagatcaagaatgttcccagcctccacaagccaaatatgtaattaaaaatgtcctactaggcatattaacgcaataaaagt

SEQ ID NO: 477073 - DNA, 576 bp, Homo sapiens
ggctctctgtaaaatggaccaatcagcaggaagtgggtctgcagcttcactcctgaagccagcgagaccactaacccaccagaaagaagaaactgggaacacaactgaacatcagaaggaacaaactctggacgcgctgccttttagaactgtgacactcaccgcgaggggtccccgtggtcctgagggagtaccaggagagaggggcttacccggagaaggatttccaggaccaaagggtgaaaaaggttctgaaggaccaactggcccacagggattacaaggcctgtcaatcaaaggggagaaggtactgtataatagggtgtacactggaaacaatgccaataaaattgtcattgttctttatgttatttgggaacaggtggtgataggttacatgatcctcaaagtcctctgtgtctttcttatgcctttgcgtcctcataacttagctcccacatatgagtgagaacatacaatgttttgttttctatttctgagttacttcacttagaatgatagtctccaatctcattcaggtcactgcaaatgccattaattcattcctttttatga

SEQ ID NO: 477074 - DNA, 837 bp, Homo sapiens
cacttcttgtggtttgagggcaaacatgccatacgtctcatttctcttcgaggagctgcagataactctgttcctgtgttttcacccccaaagctttgtaagggagctggatcatcacagaaaaagctatgacccgctccaaagccttggagtggttgaacttagcctaatctttgcacagaggagatctaacctggatttggggttaggacctcttaaccatcaagttgttggcataagtctgttggcagaaaagacttgttggattgttgttgttattacagagggtgtgactggcgatgtagggaaaggacttttacagtttcacagccaaacagccgaggtctttgcattaaatgacagctggaagaaagtctatggaaaaggagagcctggggtcagaggccctccaggtccttctgggcctcggggcgtaggaacccaagggccaaagggtgatactgggcagaaaggcttgcctggccctcctggcccccctggctatggatcacagggaattaaaatggtatttaaagtcttgagactggatgaggacgtgtggagagtgagagtatacatagaagagaagaaatccaaggactgggccctgggtcctccagcatttggaagtttgtatgatgaagaggacctggcaaagaaggctgagatggagtggccagtggggtagacagaatgaaaagaaagaggtgtcctggaagccacgtgaggaaatatttcacagagagctaattttggtgctgctgattagatgagaactgaaacatgatcattagatttgacaacctggaagtcattggtgactttcacaagagctgt

SEQ ID NO: 477075 - DNA, 568 bp, Homo sapiens
ctctctcctctctcgctccccgcttggtggttgagctccctgttgcctccagacttctgtggcctgccatcgggacccctaacctctctgggatatgtttgactggggcgggaggatccacatccaaaatggcctgcttgacttggctgttggcaggagacctcaggtccttgccatgtgggcctatcttaggcctacttgggtgttctcacaacatggcagctggtctccccccaaatcttataatcaaggacaagtccttagccacaacttgtggaaaagtgggattgggaccaagtaaaacaccaaaggatcagatcttcattgaaaaagtgaaaaagcaacacccacatgtatctttatttctattggtacattcatttatgaattttccattcacatattgtcctgaacactcccaacacaaagttgacataggtagaggagagaaagtcacatgggagagagccgtcttacaaattaagacatatctagtcattgggaaggaagtccctcctccactccattcccaccaccatcccaagcctcaccacggagtaacctagta

SEQ ID NO: 477076 - DNA, 1409 bp, Homo sapiens
caggatctacaggtctttgatctggaaactaagactagagaagtcttaagagatgacttctcaggaaattcctgtacctggagagtttaggcaaataacaatcagcaaagaagccttcaccagtgagaagaacaatgaatgtaataaacctgaaaaaagcttcagtctggactctactattgatgcagatcagaaagttcttagaatacagaacactgatgataatgataagaacgacatgagcttcagccagaattcagcctctggtaaacatgaacacataaatctaacacaggattttcagagtagtatatgtaaggaaagcttaatggatctctccctccttaataaatgggacagcatccctaacactgaggaatcctataaatgtgatgtatgtgagaaagttttccatcagagctcagcccttactagacatcagagaatccatactagagagaagccctacaaatgtaaagaatgtgaaaagcgtttcagtcagagctcgagtcttagtcgacataaaagaatacacactagagaaaaaccttacaaatgtgaagcatctgataaatcctgtagtccaagctcaggcataattcaacacaagaaaattcacaccagagccaaagcttacacatgtagcagttgtgaaagaatcttcagtcatagtgtccaccttactcaacatcagaaaattcacaaagagatgccctgtaagtgtactatatctggcagtgacttctgccatccttcatatctgcttgaacatcagagggtccaccatgaagagaaatcctatgaatatgatgaatatgggttggcctatattaaacaaggaattcatttcagagaaaagccctatacatgtaatgaatgtagaaaagacttcagattgaattcacatcttattcagcatcaaaaaattcacacaggaatgaaactgcatgagtgtaatgaatatggaaaagctttcagtcaaacctcatgccttattcaccatcaaataatgtataggaaagagaaatcatataaatgtaacgagtatgagggcagtttcagtcatagctcagaccttatcctgcaacaagatgtcctcaccagacagaaagtctttgattgtgatgtacggaaaaagaactccagtcagagagcacacctggttcaatatcggagcattcataccaaagagaactcatgaatataacgagggtgagaagacatttagtctagtcaaattcaggcttcattcaacatccgggagttcacaccagggagaaatcatgtacgtactgcatgtggtaaagccttcagtcatagctcaaccgttactcagcatcagataattcaattttcatgctattaataatttcataccttagtcacatttggagaattcgtatgggaat

SEQ ID NO: 477077 - DNA, 478 bp, Homo sapiens
atgtacagacaagaatcacaaccagcagagctgccataagaaaaatcctggccatggctgcctccaaattggcacagagagcagcacagagatctgtccacggatcaagacagccatacagccagaaaagcagtgctgtcctggccaggctgcagggaggggagggtctcagagcacaggatcaacacagaacagcaggagctgtcaccaggctggcactgagagagctgcctggtggtgcagagagaccagaggcctcagtgctggtgaacagttggcaaaggctgtcaagatggaagagaggagaaagggcaggaactgcgccaggagacccagctgtggatgagtctccaggtcatactgagggaaagagtttgaaagaggaggccaatcagtggatgactcctggagctcctttatcattttttctatctcattggctcttacaaccaataactactcctttctaagtgagcct

SEQ ID NO: 477078 - DNA, 676 bp, Homo sapiens
gtttaggctctttttcatcaaatataaaaacccagcccagttcatggctcgttcggcagcaaccctgagacgctttacagccctagaccctaaaagttccggccctcaaaccccacaacaggatttaattaacctcgccttcaaggtgtacagtaatagaaaaaagttgcaattccttgcctccactgtgagacaaaccccagccgcatctctagcacacaagaacttccaaacgcctgaacctcagcggccaggcattcctccagaacctcctcccccaggaacttgttacaagtgccagaaatctgaccaccaggccaaggaatgcctgcggcccaggattcctcctaagccatgtcccatctgtgcgggaccccactggaaatcggactgttcaactcacctggcagccactcccagagcccctggaactctggcccaaggctctctgactgactccttctccgcttagcggctgaagactgacgctgcccgatcaccttggaagccccatagaccatcatggacgccgagctttgggtaactctcacagtggaagatctcaaacatgtttctttactattcctttgcacccttaatcccagcctctcttcgctttcacttggactgaccctgacacccatcaagctcagcaaattacctgggctgtactgcc

SEQ ID NO: 477079 - DNA, 545 bp, Homo sapiens
aactggcatatgaccatctaggaacatttggactgtttaagggaagagcgcctctagtaagcatgcatacaactccattaaacacactgtgcatgctgccccttccaaatgccgataaaaggcacagacacaagtggcgggacgtcaagagagctgaagaacacagcaacagacaccagcagacaacatcaggccatcgatggctgcatgatgtggaatttggctgggggcagttggaggagagtctggctattgggcgacctgactccaggggaagactaccttcccactccatcccccttggggctcctcatgcatctcacgagagctacctccaccactcaataaaaccttgcacgcatcctccaagcccacgtgtgatccgacttcttggaaggatggctaagtaccaaaaagagccacttactttcactgtatcttatcaagaagttaattgggactgtggactgtccaaacaagatggcaaaatagaagccaataccatttattaccacccacctcactagaacaacaccaaactttga

SEQ ID NO: 477080 - DNA, 646 bp, Homo sapiens
gtaacacaggtcaggtctgctgtggagatggccatgctccctctgctagaattggcagtggtggaggaagcaactgcagatgtggtggaaatagcaagagaaacagaagtggaaactgaagatatgactgaattgctgcaatgttataataaaactttaatgaatgaggaattacttcttatggttgaacaaagaaagtggtttcttgagagggaaacttctcctgatgaagatactgtgaaaattattgaagttacagcaaaagatttagaattttccataaacttagctgataaagcagtggcagaatttgagaggattgactgcaattttgaaagaagtttcactggagagcctgactccgcagataaagggtgtggttcaggaacctgtgtcattcaaaagcccctagttcattcggatgctcatggaccatagattaaaatttgagaaatattgatttagaggagtaattggcagttttccatatatgtgactcatcacaattgaggcttatttacaccaatcagacatagatttggtcttttcacatagtcccatatttcttggaggctttgtttgcttctttttactcttttttctctaaacttctcttcttgcttcatttcattaatttgattttcaa

SEQ ID NO: 477081 - DNA, 684 bp, Homo sapiens
ccgagcatgcagccgcgcttccatggtgtatgattcagaatatttgtcctgcactctgcaggtcatcataacacaagctcattcatcagcgagtgtcttaagagtgaagaaaccactggtgtccagagaaagctcagaaaaagaacttaagcatcccaactcagcccaatttcacttctatgagaaaccgctggacagatcatttaatgcaggggtccccaacccccgggccatggggctggtactgggccatggcctgttgggaactgggcctcacagcaggaggctggcaccattgatactggtgggctggggtcggtccccaaataccagtaggacctggactcaagccgatgtccagacttttgacaccattgtgagaaggaacttgaggatgaatccaaaaatcatgaaagttgggagatttatttgcaaaacaaaattacatactcaagaaaaggaagtgcaggcatattaaagagagagtttgccccatggatttgggctgctacctttatggatttctttaaccaaggggtggaatactcatgaaaattcctggaagaaggtagaaatttctcagaactgtggtgccacccatttttacaccaaatataggtattcccagaactgtcacggggtggtgggtgtgtgattgaggatgttaatgagcgtataatgagg

SEQ ID NO: 477082 - DNA, 1134 bp, Homo sapiens
agctctccgttcaactcacgagaacgcggcagctgatctgccacggagtcaagaggatcttccgggaggctctgtcatttctgtaaatcaaggggttaggaagacaggggagaggagagggaaatggaatgcgaagcttctagtatcctctgctctacttttaacctctatgagatcaacatttttagtttccaggcaattctgatccctcttaacctctttggagccaccgtttcccagggctggtggtcagtgctgtttctttccaccgaagcaacaagccagccctccaaggtgtctggcttccagcatggaaccggagaagaatgtggagaagagtggacatatctgaatgctggcaggaaggagctgaagcaaaatgagaggcgggcattccagaagagtgaagggagcattaatagagcaaatcacaagatgggccgggcattggcgttcaccccgaggtcatctgccgtgcccagtcccacagcatctctacttaagcgaaggtgggacagagttgagagaaacttaaaatctactgctcttgatggttttaagtcaacagccggggactggcagtttcctggcctgagcggacccagcccccaatccagagcagcaatgggcgcctcactggatcaggagcacagcagacaccctgccagatccagaggggtggaagtcagtagtgggtctgcaatggcggtaaatatcaatggtggacggcgagcgaaagctcaggtccagccgtgacaaacacggaccagaagagtgtgcacttgcaagatttaatagagtgaaaacagagctcccatacaaaaggaggggacccaaagagggtagccgatgccggctggaatgcctgggtttgtatcccggtcattgtattgtccctcctgcagtgctctcaggcgatagatgattggctatttctttacctcctatttttgcctaattagcattttaaatcactgattgcaaggaagtgaaacctacctgagctaatttcaaatgaccgtaaaagggggaagaggacagaaggatcagtgtaataagattatacaacagacagctttacttgcaaaatgatgaggggcttaggcatcactcctcttctctttctgaactgta

SEQ ID NO: 477083 - DNA, 572 bp, Homo sapiens
attggtggatttttttttatgagcgataaggcattatgtgttcctaaaataatgtgtctgactggcattttaacaaagcccctacacccgcccctgtcccacaacatccctcatacacagcagttcccaagcagaggtacaaatgggaccagcagggcccagcagcaagtagagctctggataaagctgccctggcctgtctccaaaccctccaacccaggccatccccacttctcctgtactgcctcagggattcccggtgcttctgctggtcctgcatccggacacctgacccatcccagtgcagtccaggaaccaggaactcaattcgagcaattctgggcaccaagcctagtgcttacaagaattcctgagctcaaggagcagagccccatgtccaggtgcaccccagcccacacgatagcaaaagctgcaggcatcttcttgatcaaagtaaaatctgctcatggactaaaaaagtattacgttctttcttccaactaagtaatgccagtttctataacctcatcttatatactttaatgaagcttccttcaagggctgtgtatttc

SEQ ID NO: 477084 - DNA, 541 bp, Homo sapiens
tttgtgtatgtatatgtgtatgcatgtgtgtacgtgtgtacatgtatgtgtgccagggtcagctctgtggagggagcccagcctgcggggaggggaggcagtgctgtgcgggaggagggaggccaggacagtcctggcccggcacggtcccagagagggaatgaatgtccacgccctggccggcctctctcccagggatggaagtgtggacacacacggatactcacagagaggcctgaaccaagtctgggaggcaacagggacagggagctctgggactaggagccgggacacctgggtccccgttgttgctcccacgtgcaaagctggcctgtgtctccagccttgcagccctaaagcccagtctggacagagggtggaatggacaagccgcagtgagagggccgagggtgacacctgctggtaaatgggaggcatcacaggcaagacttggctggtgggtctcttgccgcccaggggtgcgtggtgtcacccaccctccagcctcccctcctgttcttcaccccaggaccccacaaaa

SEQ ID NO: 477085 - DNA, 671 bp, Homo sapiens
tcttggaacctagggtgccctggggagccatgccagggcgttctgcccagcacagtcacacctaaaagggtcctcagccgaaccccatccccttgaataccagctcgtgacggctttgagcagaacatgtcacgggaacggcattgtgcagaactttttattaaatggcatttaaaatattccccaggactgtgtagttggggaaacaccacaaaatccattggccgggaacataatggctcaatggttcgaaacaaatgcattgttaaaaaggaaaaacagcaactgttgcggggtaatgacttgcagatgactcagcaggccaaacatcaaaggaattcggatggcagcagcgatgtcaccatttctacctgccacgcatcggtgaaggttgggactcgactggtgtttgatcacgatgggaaaatcatccagaaaaccccctacccccaccccagagggaccacagtcagcgtgaagcagttattttctacactacctgtgcgccataaggaatttcaaaggaatgttaagaagggattagggatggaggtcatgcttctgcttcgacttcatgctgagcagggcactgagtcccctaaagtgaaaggaatgaaactcttgggcttctgagttcaaatgagttctggggtcacccggagtagcttgaa

SEQ ID NO: 477086 - DNA, 468 bp, Homo sapiens
gaggctgcagagagccgccggagccctcatgacttcagtgacctgcttctgcccctctaggtctatcagccacagtctctgcaagtttccaagagcagcagaaaatgaacacattgcagtgatccggatagaataccaagccagccacaacattctcctaagccaaagcctaatccagagcaaagccctaactgtcttcaattctgtgaaggttgagagaggtgaggaagcttcggaagaaaagtttgaagctagcagtggttggctcataaggtttaagaaaagaagctgtatctgtaatataaaagtgcaaggtgaaacagcaagtgctagtgtagaagcaggagtgagttatccagaagatctagctaagataactgatgaagatggctacattaagcaacagattttcaatgtagacaaaacaacctatattgaaagaagatatcatctaggactttcatagta

SEQ ID NO: 477087 - DNA, 1212 bp, Homo sapiens
tctgagggtgtactctagcaaaatgaaggagaagaccaagaaatacaaaaacacaaggacaaagaagcagagcaatacaggggaatctcaggatgacagtggtccatccggctttaaggtggtcgttttagagtgccataggagaatgctgggctctgggagggagaccaatgaagagaaaagaagatgtcatgcaggggactctgtgattgaggggatggcacaaagtggagagttgccaatgcatatcaataacagaaatatagtaatttcaataaatagtgctgaaacaactgggtattactatggaaaagaaatgggccttcacccttacctcaggccgtacacaaaaactgactcagaatggatcacaggactaaatgaggcagaaaaatggccccacaaagatttccacctctttgcctggaaaggcctaatctccagaaactatgaatatattacctttcttcgcaaaagggactttgcaggtgtgattacgttaaagatcttgggtagagagattatcctagatgacctggatctggatgaattctcagagagtaaggagcctgagaaattcatatgggacattaaatattctagtaattgtgatctctatttgatccagagacaaagaaccaaacccaagatgtgttaaaaagaataaaatttccctgtgctagtaaatttaaaaaggagttacaaatgtaaatactgtagatgcattttctccaataatgccttcagggcttccttatttcctgaggtgcaacaatattgaaattaggacaattaataaccgtacaatggtctctaagtgttcaaatgaaaggagtagttacacgtctttcacttttaatcaaaagatataaatgattaagcttagtgagagaggtattattagtaatttagagatgatttgaggtatacaagagaaaatgtgtaggttatatgcaataatacacttgttatataaaggaattaagcatctgtgaattgtggtatcccagggggtcctggagacaatttcccatggatattgagggacaactgtagttttatctggtatcatttccattcaacttgaggaacctgtagcatttcttggagcgcaaatccatatgcaacacattctcaagattttgatttttctgcaaatgtatttatttggctttcatctcttaaggacaatttcccagtttatatcatctt

SEQ ID NO: 477088 - DNA, 1168 bp, Homo sapiens
tgagccctgatttccgctggcctccaacctccaaccctttttctcttctgtaaaatggatataatgatacttgcctccagatgatactagaagtgactcaggtcctgggttggaaagcaccccggagccagggccagcggcccaggccagcggctccagggccagccacgatgtcctccaccgtgaacaacggggcggccagcatgcagtccacacccgacgccgcgaacggcttcccgcagcccagctcctcctcggggacctggccgcgggcggaagaggagctgcgcgccgcggagccgggcctggtgaagcgcgcgcaccgcgagatcctggaccacgagcgcaagcggcgggtggagctcaagtgcatggagctgcaggagatgatggaggagcaggggtattcggaggaggagattcggcagaaagtggggacattccggcagatgctgatggagaaggagggagtgctcaccagggaggaccggcctgggggccacatagtaagcacacactctgggatgtaagagcccacacaccaaatcccactgctaccatgaccaatggcttggtggctaaagagggtgtaagactgggcatggtggctcacacctgtaatcctagtactttgggaggccaaggtgggaggattgcttgagctcaggagttcgagaccaccctgagcaacatggtgaaactcaatctctacaaaatacacaaaaattagccaggcatgtagctgggattgcaggcgcccaccatgacgccccgctaatttttttgtatttttagtagagatggggtttcgccacattggccaggctggtctcgaactcgtgacctcaggtgacccacccgcctcggcctcccaaagtgctgggattacaggcatgagccaccacacccagtcttagtcatcgtaaaggctggcagcactgtaggaacagacagacctcaataggaaacggggaaacccttcttgcagactttctgtattgctgggtagtgaggggtaaagtatttcccaccttaccccacttaatcctcatctctctggccagagtaggagcaaaacaggaacagagacaggctccagcctgggtgacgaagaaagactccatcaaataaataaataaataagactaatacatgtaaagtgctcatc

SEQ ID NO: 477089 - DNA, 687 bp, Homo sapiens
ccttcatcatggctccggcgttggggaccctgctcaagtacatccaaaaggacccttcccacaccagtctttatagcggtcaagtgcagcagccacttagcacccaaggcatgtgccacagctggcatttcatcacaatcaacaataagtgtctgtcaggaaatcctgttgactgtcttcaacatgtactgaagatccccacccagcaactccctggcctcctccccaacttctctcctctgactatctctcaccaccaccacgaccctggtcaagaccactatcatctcccacctcgatgttgccacaacttggcccccatgcttctatccaaatcttcccacagtctttctcaactcagcagccagagaatgcttttaaatcggcagacagatcatgtcgcctctctgctcagaaccctcctgaatttcccatctagcccagcaataacctcccagggcttacacagtctactggtggtggagggaatgacttcaggatgattcaagtgcattacatatattgtgcactttatttctattattattgcattgtaatatacaatgaaataattctacaactcatgataatgtacaatcagtgggatctctgaacttattttcctgcaactagactgtccatctggggcgaagggagaaacaggcattagattctcataaggagcac

SEQ ID NO: 477090 - DNA, 4650 bp, Homo sapiens
tcttctggatcccagcagtgtccagaagaagaccaaggacagaacagagactaggtttggtgagatgggacagattttgggaaagatcatgatgagccatcaaccgcagccccaggaagagcggagcccccagcggagcacctcagggtaccccctccaggaggtggtggatgatgaagtgtcgggaccatcagagaaggagctcgcccctgagcctgaggagacctgggtggcggagacgctgtgtggcctcaagatgaaggcgaagcgacggcgagtgtcgctcgtgctccctgagtactacgaggccttcaacaggctgcttggtaggaggacaccccagagagcacctccaatcctgttctttctaaagaggaaacttccaataaccacacttttccaatgggaaaaatatgccccagtggaggatcctgtcattaaaagactcctggcctgggacaaagatctgagggtgtcggacaagtatctcctggctatggtcatagcgtatttcagccgggccggcctcccctcctggcaataccaacgcattcatttcttcctggctctgggagaagaaaaggagcggaggagcggacatgacacttcccccagcaagcagacgtttccggttgttctctctccttcccacatcaaccgcaaaagccatcagcctcctccgggttcccgtgacagagaagctgacctcagccggaggtctctcctggtggtgcccctgagcagcaacctgatttctgtcctcagctatctggccaatgacatggaggaggacgacgaggcccccaaacaaaacatcttctacttcctgtacgaggagacccgctctcatatacccttgctcagtgagctttggttccagttatgccgttacatgaacccgagggccaggaagaactgctctcagatagccttgttccggaagtatcggttccacttcttttgttccatgcgctgcagggcttgggtttccctggaggagttggaagagcccctgggggtagatcccagccccccacgtaggtcccttggctggaaaaggaagagggaatgtttggatgaatctgatgatgagccagagaaggagctcgcccctgagcctgaggagacctgggtggcggagacgctgtgtggcctcaagatgaaggcgaagcgacggcgagtgtcgctcgtgctccctgagtactacgaggccttcaacaggctgcttggtaggaggacaccccagagagcacctccaatcctgttctttctaaagaggaaacttccaataaccacacttttccaatgggaaaaatatgccccagtggaggatcctgtcattaaaagactcctggcctgggacaaagatctgagggtgtcggacaagtatctcctggctatggtcatagcgtatttcagccgggccggcctcccctcctggcaataccaacgcattcatttcttcctggctctgggagaagaaaaggagcggaggagcggacatgacacttcccccagcaagcagacgtttccggttgttctctctccttcccacatcaaccgcaaaagccatcagcctcctccgggttcccgtgacagagaagctgacctcagccggaggtctctcctggtggtgcccctgagcagcaacctgatttctgtcctcagctatctggccaatgacatggaggaggacgacgaggcccccaaacaaaacatcttctacttcctgtacgaggagacccgctctcatatacccttgctcagtgagctttggttccagttatgccgttacatgaacccgagggccaggaagaactgctctcagatagccttgttccggaagtatcggttccacttcttttgttccatgcgctgcagggcttgggtttccctggaggagttggaagagaacaccggacccaggggagatgtggattttcagcaggaactttattccaatgctaatggcagacatcaggaaggaggagaggaaccatttgtgcagatcatctagaagaacctggaccattcttgacagagctgaatacagtgatcacgttgtcctccaaggagcaggggtggggtggggtacttctaggagtccttggagaaaagtaagaaaccaggagtgtttccagttccaccctttcctgcggcaccacctccctttttatattgctgaatgccaacctccctggggcggaacctggaggtcctgtttcttatggacttggttgccacagtccaggagcatttgaaggcacagtgcaggggctcagattggcacagaattctttgtgaaatatgagtgccacagactgtaacagatagcttcatgcacactatgcattttattggtttgtttggaaaatgttggccattgaattattaataggtttatttcaaatagtttggaaattgttgtacttttgaaaacatgctgttcctgtagagttttttgatgagagttatagttgttatatatacctaaagataattttcttttcatttttaagtgagaattctttttatcctaaatcttttattatctttaaatttttttctgtattattatatgtgctcctgaagcgagcactctttttatctatgatacttccataataatctcttctatttatagctattggtagttccccaccagaaaaaaacataattctggtgatagaaatttttatttgctgtttaggtttgtgactgacttgtgagaattcagttgtgatttttaacatgtctcagatatatatactaacacgtctaatatatactatctattttattggtttattttgaaaaacatgggtatagaattatttaaatattattttatttactgaaatatttattaaatatatttatttatttaaatattattattactttaaatattattttaaatattttggaaatactggtatttttgaatagatgctgtttctataaagctgtgtgatgggtattataactgttgtatacacatacatataattttgttttcctttttaagagaggattcttttcatcctaaatcttttacctttcaatctttgtatctattattacacgtgctgctgaagggagcatggtttttatctatgatacttagttaacatatatattacatttatagctatgtggtagttcccctaaattcttgtaaaaataaatttttatttgatatttagtgtatgtttgaaatgtgagaattcagatggaattttttatcttgttttggcatgtttgtatgttactttaaagaggatgtgtgttctaaaggaggacatgagctgtgtgttttcaagagaacagtgcagtgcatctcttggggaaacataataaagatgaacttttctcaccttcacatcctaataaacattatgtgataaaaagaaaaaagtaaatcatcctgaagttaagtctttaatgagaaatgcaaataaagcatttctcaataaattatgggaagagaatcaactgaagaataaacatctttagtaaatcttttgctcatgtgcattaaccaatactcttgaaaaccaggattaatttactgtaccttcttaatattcctttgaaattccttatggcgcacagagtgcgactctgtctaaaaaaaaaaaaaaaaaaaatatatatatatatatatgtatatatatgtatatatatatgtatatatatgtatatatgtatatatgtatatatgtatatatatgtatatatttatgtatatatgtatatatatgtatatatatatgtatatatgtatatatatgtatatatatgtatatatatgtgtgtgtgcatgtaattatttataaaaatttagtatctgtgctgtaattaaatagtgctttggtgaaatgtttccctaaaaattgataatgaaaaccaatggtaactatcatttattatctatatgttatgttcaaattgagaagttactgttttaataagggtaaccaattttttaaacaatactatttgcttcatttcattcatttattgctcacatttcagaagtactaggacttagattggcagtgagacaaaacagaattcagaagctagaagctgagatattgagatagaaaattgtaaataataatgattccaattaattttcagagaggtttttctaaggggtcaagtgaatggataaaaatattttctcacctcagtgcacaaagtgagctcagagctttcccccgaaagccaaaagtttcaacccgagttaggtcggcaaactcttgaatcttagatgtgtgatgtttcagagctgaaagagactgtaaagtaaggactaagatatctcaagtgctataacaacaaatatacatgatatctagtaactggctttaaaaaactgtttttgtgtttcccaagacagtgttactcaaaattctaagacatgtggcccaattattttgtaataggattagaaagttaacttacttaagccttcgaagttttcttcttctaccccacatccattgcctgaaacttcaatgagatccattccatagtccttaagctttagatctagaaagtttaaaatatttatatatttattaaaaatggacccacgctatcagtttttatattgatattatttataacgtgcaaatttaa

SEQ ID NO: 477091 - DNA, 1588 bp, Homo sapiens
tgcaaacaaagcatgtctgtgtccaaagaatataacctaagacgccactatcaaaccaatcacagcaagcattatgaccagtatatggaaagaatgcgtgacgagaagcttcacgagctgaaaaaagggctcaggaagtatctcttaggcttgtcagacaccgagtgtcccgagcaaaaacaagtgtttgcacacccaagtccaacccagaaatcccccgtgcagcctgtagaggacctagctgggaacttatgggagaagttacgtgaaaaaatcaggtcttttgtggcatattctatcgcaatcgatgagatcacggatataaataataccacccagttggccatattcatccgtggtgtcgatgagaatttcgatgtgtccgaagaacttctggacacggtgcccatgacgggtacaaaatctggcaacgagatcttttcgcgtgttgagaagagcctgaaaaagttctgtatcgactggtcgaaattagtaagcgtggcctccactggcaccccagcgatggtggatgccaataacgggcttgtcacaaaactgaagtccagggtggcgacgttctgcaagggtgcggaactgaagtccatctgttgtataattcatccggaatcactctgtgctcagaagttgaagatggaccacgtcatggacgtggtagtgaagtccgtgaactggatatgctcccggggactgaaccacagtgagttcacaaccttgctctatgagctggacagccagtatggtagcctcctgtactacacggagattaagtggctcagtcgcgggctcgtgctaaagagatttttcgaatccttggaagaaatcgactccttcatgtcatccagagggaaacccctgcctcaactgagctccatagattggatccgagacctggccttcttggttgacatgacgatgcatctgaacgctttgaacatctctctccaaggacactcccaaatcgtcacgcagatgtatgacctgatccgggcgttcctagcaaaactgtgcctctgggagactcatttgacgaggaataatctggcccactttcccaccctgaaattggcttccagaaatgaaagcgatggcctgaactacattcccaaaatcgcggaactcaagaccgaattccagaaaaggctgtctgatttcaaactctacgaaagcgaactgactctgttcagctccccgttctccacgaagatcgacagtgtgcacgaggagctccagatggaggttatcgacctgcaatgcaacacggtcctgaagacgaaatacgacaagtggttttctgaaagcttctgccagtccttcgatggtcagcctattctcttgacaaccatctgctccccttacgattttctctgatatctccccttatgattgtctcatctctaagggacccgcctcccccgtcctcacatagccacttccgcaaatgtgggacagctctccctgccactcgtggccttcgtgacaagttacatcttttgcaagactggcagcttcactttgcaccttcgtgtctgcattttggggaaagacctgccctcaaagcaaaggcttt

SEQ ID NO: 477092 - DNA, 1203 bp, Homo sapiens
cagcctgagtccagggatccatgtgcgtgtctgtgtgggtgcatctgatgtgtgcgtgtctgtgtgggtgcatctgatgtgtgcgtgtctgtgtgggtgcatctgatgtgtgcgtgtctgtgtgtgtgcatcttatgtgtgtctgtgtgtgtgcatctgatgtgtgcgtgtctgtgtgggtgcatctgatgtgtgcgtgtctgtgtgggtgcatctgatgtgtgtgtctgtgtgtgtgcatctgatgtgtgtgtctgtgtgtgtgcatctgatgtgtgcgtgtctgtgtgggtgcatctgatgtgtgtgtgtctgtgtgtgtgcatctgatgtgtgtgtctgtgtgtgtgcatctgatgtgtgcatgtctgtatgggtgcatctgatgtgtgtgtgtctgtgtgtgtgcatctgatgtgggtgtctgtgtgtgtgcatctgatgtgtgcgtgtctgtgtgggtgcatctgatgtgtgcgtgtctgtgtgggtgcatgtgtgcgtgtctgtgtgtgtgcatctgatgtgggtgtctgtgtgtgtgcatctgatgtgtgcgtgtctgtgtgggtgcatctgatgtgtgcgtgtctgtgtgggtgcatgtgtgcgtgtctgtgtgggtgcatctgatgtgtgcgtgtctgtgtgggtgcatctgatgtgtgcgtgtgtgtgtgtgtgcatctgatgtgtgtgtctgtgtgggtgcatctgatgtgtgcgtgtctgtcccccgccctccctcacccccgatgccggcagcccgcctgggtcctgggagcccagcccactcaggtccccctcagccctcctaccatgcggcccagaccccaggactctcgctgcagaaggaagggaagcattcgctgagctgggacccatccgtgggagctgactatccgcagctctgcccggctccgtgctcggccaccccagttcggcagctggacatcggctgggagggacgtggagcggccgacgggccagtgctgcccagtggttcttgtgccctggaccccaacggcggcatcctggggcggcaggaaggcgtctccgcagccccagcctcacagcctccaggaggtgcggaactggctgagcttttccaagctgtggacgggtcccccttgggccggcgaggaccccaggctgtaaacacacggctggaatcagcgctctgggcactgggctgaggctaaa

SEQ ID NO: 477093 - DNA, 1281 bp, Homo sapiens
agaaaggggctcccacagtgcagcggcgggctgaagggctcctcaagtgccgccaaagtgggagcccaggcagaggaggcgcagagagctagcgagggctgtgaggactgccagcacgctgtcacctctcagtgtccaggaaggaaataatctcccagagcaccgaaatggccaatgatagagactggctgatgtcaaatggcagagtccagtccactctatattgggacacaacacaactaacgcatgatggagcatgctggctgcatggacgtttgatgtatcaggtgtcagtgccctcaacattacattttatcaaagtcttccctaaggtggacagattcaggaaacaaaccatcaggatccctgatagtatcaaggaactgaaactcaccagattactgcatgcggacaatgagacaccagaaccctcatctggcatgtcaggaccctcagctgcaggtctgttggagtttgctggaggtccactccagaccctgtttgcctgggtatcagcagcagaggctgaagaacagcagatattggtgaacagcaaattttgctgcctgatcattcctccggaagttttgtctcagaagagtaccctgccatgtgaggtgtcagtctgcccctactggggggtgcctcccagttaggctactcagggaatatttttattcctttttgcacataatatcctaagttaatgacttttcttctctatgttctgtgaaaagaaataaaataacagcaattggttaggtttgccttatgaatgtaataaatgttgatttgctgttaatgtggaaatgctgttgtaagtaatttttaaaagttcattagacattttataatggaatgtagtgattttgcataaaaatgtaaaacacaactaatttcaataatatttaaactaattgcaaaatgagtttagaatgcaaaatgttataattatacagtagatctgttttatctttaaatctgaaatccatttaatattatttttcaacatttgaaggacaagaaaatagcactgaaggaaatgaataaaatggtagaaagggaaaagaacaaaaaaggaggaaagaacaaaattaaagtaagagagactaccatagaaaaaactaagtcagattggtttttatattcatcatcaatataaaaatatgtttaaaaaccccttgaagaaacatatatcttttcataattcactaatttattttcaatagcacttagctcatctaaacatatttacttaccaaagttgctcaccagtatcct

SEQ ID NO: 477094 - DNA, 682 bp, Homo sapiens
cgggatccactaggggaagatgatcctttcccaaatgaccagcatgtcacgtttattacaaaaacggggaccatatagcaggaggaaaaacctaggaatcctggaagaagcccatggaagatgtggccagcacagtgctggggcacacctgaagtcaggggccattgaggcctgcctcctgctaagggctttctggagcctggcgctgcttacaatggcccggaagtgggtggatatagaagctcagaaagcagataccagctgcttaaatcatatgaggcatggaaatattcctggtgctggtgggcccagtggtagggtaccaggtaaagtcctgtgctcacttgccttttgttcctccaagtcgacagtatctccctgcactgtgcttcctgggcttggggtaaaggtgacacagaactacctagaaggactgcagaacaaaactgaacgacattcactcaatttcaagacttggtgactgtgacacttttattgaatcttctgctcagctggaggacttgactttgagagaagaggatagtagtacttcattctagattcaatttttaattccatggggaataattatgttgaacgtcttttcatatgtatatttgccacttaaatatgtattattttaaggcctctgtttcaggattttgtgtgtctttttcatagt

SEQ ID NO: 477095 - DNA, 765 bp, Homo sapiens
accacgctgcagcagctagtgtgcccggctgtgtgcaaatgatatggtttggctgtgtcccaacccaaatctcatcttgcaatgtaactcccacagttcccatatgttgtgggaggaaactggtggaagccatgctccctctcagtgctctgaaagtgtgggctcctcccctgctgaagtgctgactgcagatctcaacttggcactcccaggctgcacaccacagtccttgggtgaactcaggctttgtttcttcctcagtgagatttctggtgctggtccaatatataacatagataaaagcagagctgctcaggataaaacaggtcctggtctcttgggtctgcttcatgcacctgaggccacacaccaaatggaatctttttctgaattagatagagacacaaaaggcttattctgcctcaacagagcttttcaattaacccttattacttgtacaaataataacaattactttggttatgactgtacacttgttaaagtggaaatgctcttgaaggggtaattaaatcagtctattattttattaacactagaataaattgtttttacattattttccttaaggcaagaaagccaataataaaacaaatattatcaagatgtaaagaaaaaaatatatagtaggaaaatttgaggatattgaaataaaaattttggctacttcataatttctataagattcagattatctgttatattaatataattttaattaaattttataatatgaatatgatatat

SEQ ID NO: 477096 - DNA, 2016 bp, Homo sapiens
gggtcctgctgcaaaccacataaatattcctgagaggaaaggggcaggtctctgctgatactccaccttcaaccaaataacagtctgaagtctgggtgccagtctgccagttttgtagataagagtgagaatttattgtgccttttttggactttcctatggctgcccgtgggccagtcagcatgcacttcctccactctgaagcccataaaaaccccagactcagactcgggcagataataggacagcatgcctatgaagaggatctacccactgtgggtctcctcgctgctgagagctgtacactcattgcagcaacctgcttgcggaaaagagctacacactccaggagctccctgagccagggctgtgacaccctctttggggctctgcagttcctggtatctacaagcttctggccgccaccatgttccccagtgcctacagtggaagctgcttgtggttggcctgatccagctgcagcagggaactggtacttgtgccagtgcctggagctgactgccccaccacaggcagtgtgcctggctgtgcgcagtgacctgagcctgcgttcactcactcatgtacccctcactgttctgtgccttgcttccccttggcgatcatgggatctgggctggtagtgacagctgagtgcagcctgtcaggccaagtgggtgggagaagtatagcaggcccaagcaaaactcaggcaaaggtgtcacccaccgcagaggtatctggctggtgaagcaacaccctaaaggtcctgtggcataactaaatgagaagaacaaaataaattttaaaaaatatctaaataacctaactgaaagtactctagaggtaccaatgggtaaaatctgatgagctagatttccagatttagttctattctatttaatttgaaggaaataatatgtttatgatttcttatgtataaacagtatggtttggttattggaagaatttaaaatataatcctgaaaatctatcattctaagaataccttagtttcattgttttttttttcaaaaagataatattcaaattgtattttagaactcatttttgactgtcagactgtttaccaaggtagacttttatgccttatcaatagctattattatattgcttccaaatattaatttggtatttccaactatatttacagatgagcaaaatcataatgtattacttacaattattaatgattaactaataatacatagaaatgagaattaaaccattacaagagctcagaaataaattttagaccattgctaatttaactttattctttcagaaacaatctcagccaaaaatgcctgccagtgatgacctactctaaactaccttaaacagaaactttggctaaaagccagaaataagcactagcatttatttgtgtctctgtcttagcccaagtgatcaaaaagaaaaaaaaaaaggttttgttctattcagaaggtaaagctatggttgcactatttttatacttttggagccaacatatatatggaaataatagagtgcatccagatgggcagagattagtttttccatcggcagttgaacatcaagtggtttgatgataggaggttaaaattagcagttaaaattagtgggagaggaagtactttgttaaataagttgaccttaaattctttatatgtcatggcatggttctagaattatcaaaagaaatggtagtattaagctgtatcagcctccctctcccacatctcctattgaaataaaaagggtcccagaatattactttaaagttatttaaaatctattagatttgctttatatgagaaagggaatgtgttaagagaaaagcttttcagacaattctagagctttagaattcagggatatttgcatgatttaactaatgttttcagagccttggatctttaaaatgtttgaaaatgtagcctttttccacagaaaataaataattataggtgaatatgaatgatcccatactctaattgacatctatgtatt

SEQ ID NO: 477097 - DNA, 882 bp, Homo sapiens
cattggttcctgctgggacgtgttagactcaaccagtagacaggactatggctggatgttggagagaagcggcttgacttcagaaggacagcttgatggcgtaacttcagagaagaatccgtccagagatggccagacttcaggggaagattacctacctgccccgtcccctttttacttccccttcccactgaaagccacattcattggtaataaaatgccccgcatttaccatccttcaattcgttcatgcgacctcatttttcctggaagccagacaagaactcaggtgccacaaatgtggatacaaaagactgtcacactggccctgtgccctcgctggtggaaggggtggaacccagcaggtctgagtgagtggagtttgatccctcccgcacaaagcggccaggcagttccagtgctccttcactccagttcccgcacttgttcgctcacgtgttttctcctgggaggagttgagaacggcgggctgagtaaaagaggcacccctgtcacaatttgatgagatttggacccagctctgtaatgacaggagatcttttttacatactgttcctgtaagaaaaaaaataaaattgcccataagcatagctctcttcccagatgtgttgcacaagaggaatatttattctactgtgtacctcaattacctgcgtatgcaaatataaatgtacagtcagttaagaattaactactctacatcataaaacgaagagtgtggagagaaaagatttaagggagcaacacaggtaggtttcgtaaggatagtttaggctttgtgctacacaatataactgcattcaaaactccaaaatagttcagtaaatctattataaataaatgttgtctgtgaatagcttt

SEQ ID NO: 477098 - DNA, 1018 bp, Homo sapiens
acctctgggagttttgccccagaggaatgcagagctatgacagctacaattttgtattggtggtgggctgctgtgctgggagctcaaactgggtagctgtgcactggggaaagggaaatgatcagacatttcagggactactggacactggctctgagctgacggtgattccaggggacccaaaacgtcattatggtcctccagttaaagtaggggcttacggaggtcagaaggctgtgtatgctctgaatcagtatccaatgtatgctactgtttctcccatagccagatttcactggtccatgaatcaaggagttaaagtggaagtggcaccactcaccatcacccctagtgatccattagtaaaatttttgtttcctgttcctgtgacattatgtgggaatcacctaatcagctgccggtacagccagaataaaaagcaggcagaggaacatggagagattagaatggctcagcctcgcagcctacatctttcacccatggtgaatgcttctggccctcaaacatcagactccaggttcttcggctttgagactcagactggctcccttgctcctcagcttacagatggcctattgtgggactctgtgatcattttgtctaatgctcagtgctaaattaataaaatattgttttcaatatttaactataaattttataacaaaaaaaccaaaatcaatacatttctccaatcaagaattcttcatcaaacattatttaaaacttaattaaatttatccaaaataatgatcacaatatatttaaactcttggctatttaaaacacctgaaaaaaactaattataaaagtttgattaaagttactacagctgctactgttattacatcctgtggatttatttgttcattatcctatagtcatttaaatcttattgacatgtagaaatacttaggtttctatatcaggctcaagaaataggaacactaactcagagattctgagttgggaaagtccaagtgattttcaacttaatttt

SEQ ID NO: 477099 - DNA, 514 bp, Homo sapiens
aataagttatggtgttctgtggcatggactgctttcttctgtttagcacagcagattccctgctagcccagggtgcatctagaaatgctgtccaggacctatggcctgaaatcaggggcttcagggatcttctctgtgctttagtttattgcagccaaactggtgcccaagttgcaagacaaagcaacaatatcttgggctttaacactgacaactttgtcatagacatcagtagactcaccagcatcaacaaaacagttactttgacagttatgcagaatgatgcagattgtcctcagtggtcaatagtgaaagagtctccatgttttgaaaggagcaaaagactctgcgttcccacagagaccattgagtataagtggactgcccagataagagagccatgggaaaaaacaagaggccagcagtacagtagagttatttacttactgtagagtgcagtagtatctgtcccagcaaaaggaaatcaaagttcaaaacattactaatctaatac

SEQ ID NO: 477100 - DNA, 595 bp, Homo sapiens
tttgttagaactaaatttactgacttgtttatgaaataacaattgagtggccgaatagtattccattatgtctaggacttccaactccatcttgaataacaatggagaaagtggacatcctgcttgtcctcctgatcttggagaaaaggctttcagttttttcccattcagtgtgatactagtttataagctgctggtggatctacaattctggggtctggaggatggtggccctcttcccacagctccactaggcagtgccccagcagggactctgtatgggggctccaaccccacttttctcttccacactgccctagcagaggttctgtgtgaaggccccactcccacagcaaacttttgcctggacatccagaaagacatgtctgtcacaagcccattctcgttcctaaacactgtcaagaaatgtgaaggatctggaattttccctatttacaaaatgggaaaacagcattcaaactgccaaaatacttatgcagtttctctgaccaccaatttccccaggaccacatgaagggtcagatgatacctgtgcatactgtaggttgttttggggggccaaagacctagtaca

SEQ ID NO: 477101 - DNA, 1462 bp, Homo sapiens
agcagcgtgacctggatgtgagacctggagtcaaaggagatcattttggagctggtcaagatggctctagagcaagcaaacaacgtgaactgcaagaagagccaacagtgcgtcaactgcaccgcagttgataaccaagtctcggaaaatggaaccatcacctgcaatgtttcctacagcccatacagcttgttcactgatgaccgccagttcagaattaggctctataatggtggcaagaggttacatctaggccctgttactccatcttttccagaagcagaaatcagcataagaatttctaatatttgttctgtaactatttatgtgcattttgtaagtgaacttccatacagaagtgtggacataagaactactattttaattgaggtggaagttgggctctatatactctctcccttgacaaatattcttctcatttttataaactttgaggcttctttgtgtgatttttaagcttgtaattaggtctgattcaataatctgatgtgataaagcaaaattctccatattgtatctctagcatgtttttccaaacttctttttcattgttactttctaagccttatatttctgccaatgaaactacattatgttcattgtattattaagttctaccctttcgtgtgtctgtatgcttttatattgttccctacacttgaaatattttctaccatttccacatggcaatatattgcaacactaagctcaaagagcgcttcctaaccaaatctttcataaaaatgcttgtttaaataatttctactgttagaatttcatagtatcagtctatgttttcttatcctactttgtattttatatggcatctgagtgcaattgtgaatcatcactctttgtgtctaatatctgtaatatttgtcatataggtagttagtaccaaatatatttgaataaataaatatactttaatgtataaggtggttatataatgtctttttttttctatgcacaatattagctaacatttatatagcactcattgcatgtcagatataattataaatgttttatctgtatttacttatcaaaatagccttgtgacgtataaattaatatattgattttgtaaatggcaaatgttaagtaacttcaccaagttactttaagtagtgttgctgggattggaaccaaggcagtctaattctagaggctactctattaatctctgtgctaagtgcctcttagataaaaaattaatacttaatttcctatagtattaatttgttattttatgtatgcttatctttttttacatatagttattaagctgtttgtggacagaaccacattatatacttttagatcccttccaatccatcctggactgcagcataattaattgaacatagagatattcagtttaaaaacttttttatttatttattttatttatttattttttaattatactttaagtttt

SEQ ID NO: 477102 - DNA, 721 bp, Homo sapiens
ttgtacagaatagctgcaacaatggggaggtgcctgtggtgtgtagttgcaggagcctgtgagaatggaggggcttctgccaggtggacctcaggcatccagcagggcagcacaggtgcgtgggctgggttggtttctggtgcccttgaacctgctggtttcctggagtcaactgcagccatggtctttagaggagtgctcccatgtatcctgcagtacactgtggggagcactcaaaatgccaatggcttctctacctgcttgtgtctagtgaaactagtggccaatattttacggatactcttctggttcagaagtcattttgactcacctctcctgtggcagagcataatcatgatcttgaccatgttgctaatgttgaaactctgcactgaagtctgtgtggcaaataagctgaacaaaactcgcttctttgcagacttctggccccaccacttacagcactggagccagaagtttaggggactataggcagtgcatcttggccttcatagcatggcagagtttttctctccctgcagtgtgcacttcagagataaaagtgtcagttctgacacatggaagtctgtcatgctttcctcaggtttatgctgtaattggaaatcaataaattatagaaatgtcttcacagcacttgatttagccttatgtcctcagtttttattgagggctgatgtaataaatggttttatgaagaaac

SEQ ID NO: 477103 - DNA, 1975 bp, Homo sapiens
agaaagatttacatctcaaaggggcagataaaggatttacaattaaagttttctgaagacacagacactttatcaaaaacatgattatagggacatctcaggctgaccgtgctgtcctgattgttgctgctggtgctggtgaatctgaagctggtatctctaagaatgggcacacccatgagcatgcccttctggcttacacactgggtgggaaacaactaattgttgatgttaacaaaatggatcccactgagacaccctacagccagaaaaaatacaaatccttaaagaagtcagcactttcattaagaaaattaactacagcccctggcacagtagtagcatttgtgccagtttctggttggaatggtgacaccatgctggagccaagtgctaacatgccttggttcaagggatggaaagtcactcataaagatgtcaatgccagtggaaccaagttgcttgaggcactggactgcatcctaacaccagcttgtccaaccgacaggccctcgcccttgcctctccaggatgtctacaaaattggtggtgttgctactttgcctattggcggagtggagactggtgttctcaaacctgtgactcttcctcagaacaatgtggccttcaatgtcaagaatgtgtctgtcaaaaatgttcattgtggcaatgttgctggtgacaacaaaaatgatccaccaacggaaacaactggcttcgctgctcaggtgattatcctgaagcatccagtccaaatcagtgctggctattcccctctactggattgccacacagatcacattgcatgcaaatttgctgagctgaaggaaaagattgattgccattctggtaagaagctgaaagatggccctaaattcttgaagtctggtgatgttgccaccaaattcttgaactctggtgatgttgatatggttcttggcaagcccatgtgtgttgaggtcttctcagactatcctcctttgggttgctttgctgttcatgatatgagatggagaattgccatggatgtcatcaaagcagtggacaagaaggctgctggagctggaaagatcaccacccctggtgagcagggccgtatttttaatctcagtgctcatggatggtgttacctgagaaaatgtattacaatgtgattgctttggaagcatcagtctttttgtccatggcattttcagatgaataaattactaaaaatacatattgatgaaagattcacatgctctgttataatatcattataattaatctaaaaaggcattctctatttaatgcaatgaagtggaacatcttatagggtatttatgctcatttaaaaagatattttatatttatagtgagagtttaaatttacgtgtatattttgcatcataaaaatgtgatcattgctactattcttctattactaaagttctaaatattttatatttctcctttagctatcaccactggtaatagtaaatatgaagtttctaatcttaattttgctttaaaaacagaaaagaaaaatttagaaaaattatctaaaatatttatacattcagttcaacaagatttgttaaatattagctatgtggcaaacactatgctaataagtagtatagtattatatgtatattagtttggagcataaaataattcaactgtgatttgacttatctcaataacacatgatgtgtttgtaaagtgtttaagcactgttgggtgtttgtcattcactacatagtttattcctcacaaaaatctcatggagaagacactattattacacccattttagaaatgaggcacatttgcttacttctgccaggatcatcttttctactactatatgatccagaaaaatgcaataatatatgtgaaaacatcaagcagtgcctagttcatgataaaaactcaagtattaaaactcaaagcagtgtgacagtagaatatagtagttaggactgtaggctcc

SEQ ID NO: 477104 - DNA, 535 bp, Homo sapiens
agcacaacagggtgactatagtaaaaaataattgaattcaggatgagccacagacaaaacctctcagacaccgagatagtgaagggagtggctttaatcagctgggagcatcggcaggctagcatcttaaaatccgagctcgtcagaaggaggttgtgcttctccctagtggaggaacctctaacatacctgcagtcatccagtcccaaagctctaggcagcaatggaccaccattccatgtcatccgaacctcaaacacagatttctgtgactttcttctggttgatatctcatcagctgccaggctccttttccttcttcctaacaccttacttactgattactggaaaacagatggacaagtgcttcagcagactgaagaaagctggattttaaagcagctcttgagaagacacctgacttgccaaaaaatttttcccaaaggctcaccagaggttttggtggcacttgttacctctgataatagagatgaaggaggggctaaaaccaaaatgattggttgaaacactcttt

SEQ ID NO: 477105 - DNA, 611 bp, Homo sapiens
gcttacttttttcctgtttattaatgtatttaaggtttttagcttgcttgccatgggttagaacatgctcctttagctcggagaagtttgttattactgaccttttgaagcctacttctgtcaactcatcaaactcattctccagtttttttcccttgctgagctgtcaggcagggatgtttaagtctgcagaagctgtctgctgccttttgttcagatatgccctgcccccagaggtggaatctagagaggcagtaggccttgctgagctgcagtgggctccacccagtttgggcttccctgtggctttgtttacactgacagcactgaattcaatgactcataattgctgtgttctctctcccacagtgcccagagatgctctccgcaccaagccacagatgtggaggaggcagcttgccattctgttccttttacttggggcatttagcccatttacattcaaggttagtgtttatatgtatgtatttgatgctgtcatcatgatgttagctggttattatgcaaaattggtaatgtggttgcttcatagtatcatggtctgtacttaagagtgtttttgatacttgtgtatgcttcacgaagttctc

SEQ ID NO: 477106 - DNA, 702 bp, Homo sapiens
ctggagaattgaagaacagctacaagtacgcacctctctctctctctctctgttgcctgccgcatgtaagatgtgccttgcttccccttcaccttctaccatgattcagtgtgaaaacggactaatacagagaattggtaccaaggtagtgtggtactgctataaagataacttgagaatgtggaagcaactttggaactggataacaggcagaggttggaacagtttggaaggctcagatgaagacaagaggataaatgaaagtttggaacttcctagagatttgttgaattgttttgaccaaaatgctaatagtgatatagacaatgaagtccaggctgagatggtctcagatgtaaatgaggaacctattgggagctggagtaaaggtcactcttactatgctttagcaaagagactggcagcatttttcacctgctccggagatctgtggaactttgaacttaagagagatgatttagggtatctggcagaagaaatttctaagcagcaaagtattcaagagggccctgggccctgctgctctgtgcagccttgggacatggtgtcctgcatcccagccactccagctccagctgtggctaagaggggccaaggtacagctcaggccattgcttcagagaatgcaagccccaaaaccttggcagcttccacatgatgtttggcctatgagactctgga

SEQ ID NO: 477107 - DNA, 589 bp, Homo sapiens
cagcctgccaggccagaagatatgggtaccagacgcatgtacatcaatcaagagattttgttggtgagaagatgaactcattctcttccaattgcatctatttcctaaggaaaatctaccaactgggtataagtggagacactattgttgattttagtggaaggaagatgtgtaatagcagttttaataggagagaaaacagagttcttatagaaatacatgaagataagccagtactgaaagtactcccgccaccaagcttgagcctccctcgagttcagactgctctgctggcagcgagaatttcaagccagtggatcttagcttgctgggatctgtggggtgggacccaccaagccagaccacttgggctccctggcttcagcctcctttccacaggggtgaacggttctgtgtcatgggaaggagagctctgcttggagaaggaaggcactgggctcacagccagctgttttctaggcgctgttccttctactccaggaggaccctcactgacctggcatatggaatatgctctatagatgttggcgaggaatcctcaaaaaggtatattctgtgtttcagaata

SEQ ID NO: 477108 - DNA, 744 bp, Homo sapiens
gtgcactcagggctcactgctgccatgacctgggctcaagtgatccttgtgctttggcctcccagctgcttcttttctcattctacttgttctcccttgttatctaagcgaccctcccacgttcatcagagctctgcactgaatgtaagcaagcatttgttgaatactaattttaaaacagcatttttccccatctatgtattgtttcttatgtgcttggggcccttggatgtagaatctggagagaaagagagtctctgggctggtatctggggacacccagacaaattagccaaaaccctgcgttcacattccagcagggaagaggaacaaacaggcccagtcactctagagaaacagcaagatgagccccttaatggagaaaccaaaactccaagatcctgtgaggagtttcagcttccagcaccaggaggcccctatgttaatgcagaagtcttaagatttccaggctctaaaaacaatggttctattaaaagagaaatggttctgtcaagctaaacttaccacaccccagtagggcaaagaaggttgcagatttttatagaatgcaagagctgcttatctgcttgtgttaccaatcaaataaactgattgtgtatatcaatcaaataaaataattattactgttaatctaattcacttttagcctctgcaaccactaaaataatgcctttttaatttttttgtggttgaaaaataatgcatgaaaattatgtaaaatgt

SEQ ID NO: 477109 - DNA, 511 bp, Homo sapiens
tcctcatggctttgcggaaatagatttgcaatgtatcaagcatcgttgagtaaatctccacccgaaattcaaccatgtaaaatgctaggttattgccaggtctgctggagtttgctggaggtccaccccagaccctctttgcctgggtatcaccagcagagactgcagaacagcaaagatttctgcctgctccttcctctggaagcttcctcccagaggggcaccggccagataaccagcaaggagggatgtttaattccgctgaagctgtgcccccagctgccccttcccccaggtgctctgtcccagggaaatgggagttttatctataagcccctgactggggctgctgcctttctttcagagatgccctgcccagagaggaggaatctagagaggcagtctggctccggcagctttggggagctgcagtgggctccacccagttcaaacttccctctgccctgttcgaacttcccagctgctttatttacactgtgaggggaaaacc

SEQ ID NO: 477110 - DNA, 1037 bp, Homo sapiens
caaatactactgaatggctctctaaaatttacatgaaggaaagagctattttatgctagcacacagaagaatccacattgggtagtaaacaagacaagagactaatgggaatccaaaatcagactcactggataactaagctttgtgaacaccggcagtgaaggaaatatgaaatgggcccagcaggttctccaacgacttcaaatgttttggtcaaacttcgcatctctccgttatctatttttgggcaatcctgatcacgctttagtttatcaaaagtatgttgaaatgaccactttgcttgatcaatttgaaagtcgtatctataatgaatggaaaagtaatgtggatgaaatctgtgaattcaatttgaatcaacccttggttaaattcagtgccataaatggtcttctctgtgtcaattttgacccaaagtacattggaaatcttgaccttcttgtgcaagggtataataaactcaaacagacgctcctggaagttgaataccctctgattgaagatgagctgagggctattgacgagcagctgacagcagccacaacgtggctgacatggcaggatgactgctggggctacatcgagagggtgagggcagccacgtccgagttggagcacagagttgagcgcacacagaaaaacgtgaaggtgatccagcagaccatgaggggctgggccaggtgcgtgctacctcccaggagagagcacagacgagaggcagccttcaccttggaggacaagggtgatttgtttacaaaaaaatacaagttaatccaaggagatggctgcaagatccacaacttggtcgaggtaatggcttttaacctttcaagatttatagatcttttcattgagttcagagaagagcaaaaatctttaacctaataatgtgggactcttttatcaagcctgaaagagctttatgaatggtattattaggcatttaaagtggaggaatttgtgttacttgcctgcaatttctgtagccctcaccactgtcattcctgagggaagagatt

SEQ ID NO: 477111 - DNA, 886 bp, Homo sapiens
tctggctttggctcactctgaggctataatgcacgacttagacttctttctgaagaatacagagaaacaattgaaaccggcacctctgaatgagctacaagaatttataaaggagacagattccggacttcagagagaattaaatgaaggtgatcatgatggtttagttgacatcatggtgcatcttctggctgtaagaagccgacagagagctactgatgaactctttgaacctctaaaagaaacgatcaccctcttggaaagctatggccagaagatgcctgagcaggtctatattcagctagaggaaatttggtcactcaacaaggaagtccgcgtctgggatgcttacacgggcctggaaggcacagttaaggacatgacagcctccctgagggccatcacagagttacagagccctgccctcagggacaggcattggcaccagctgatgaaagctattggggtcaagtttttaataaatgaagccacaactttggcagatttgttagcactgcggttacacagagtggaagatgatgtccgaaggattgtggacaaggcggtgaaagagctggggactgagaaggttattactgaaatcagtcagacctgggcaaccatgaagttttcttacgaagttcactatcgaacaggcattccattactaaagtctgatgaacaactttttgaaactctagagcacaaccaaggtacacgcgcacaatgtgcaggttagttacatatgtatacatgtgccatgctggtgtgctgcacccattaactcgtcatttagcattaggtatatctcctaaagctatccctcccccctccccccaccccacaacagtccccagagtgtgatgttccccttcctgtgtccatg

SEQ ID NO: 477112 - DNA, 1179 bp, Homo sapiens
caggtagtacaatagcaggcttattcacagtcacgagaacagcatgggaaggacctgcctccgtgattcagttacctcccactgggtccttctcacaaaacatgggaattcaagtatcttgagacttgatgaactagataaagagactaaaggagataagccagctgagaatagagcattggaaaagactgaattcggtgaacaagaggaggagacaaaaaggaggcagcaagagagtgaagatattcgaatccagcttgtgaaagatgctagaagatttgatggggtggatgctgaatttaagaagagaaaaattctgtgtgggcctaaagtggtgacagtgcttatcacatttatttttataaaaacggtgtgcttctacattgcttttgatcttcatctaagagttgaaaagcaaaatttagaaaagattgttctaatatccacggccccgtattgtactttcatgcaggagttaatgttcaagacagccaaagtagaaaatgtgttagaagcaacgtgcagacctaatctctatgaaaaacttaaagatttacagtccaggctttctctttgtgaaaaagctctcgctgaatacctggaaaccaagcgcatagcctttcctcgcttctatttcgtctcttctgctgatttacttgacattctctcaaaaggagctcagcctaaacaggtaacatgtcaccttgccaaacttttcgacagcattgcagatctgcagtttgaagacaatcaggatgtttctgcacacagggcagttggaatgtacagcaaagaaaaggagtatgtcccattccaagccgagtgtgaatgtgtgggccatcaagtgttgaatacctactatgcatcagatgctaggtcaggctttggggagttccgaaatggcccttgtcttcgaggagctcttaggcccattgagaaaatggatatgcacataataatggagctccccaaaccttctacccctcagcctgtggtaactactattttgctgtttatgtaaattggactttttcatttaaaatttttttaaattttatttgcagaaatgtatgaagtacaagtgcaatcttgctacctgcgttgaattcgtaatggtgaattcagtgctttttagggtatctttcatctgaacaatgtatagtgtgtccattaatttct

SEQ ID NO: 477113 - DNA, 597 bp, Homo sapiens
ggtagtgtgcagccacccgggagcctgaactggaatcagtgggtcttttatatgattgtatttaattgttacagtgacactatggggtatatcaggattggagataaagaatgtgaatttaacaagaactttcgccttatccttcacacaaaattggcaaatcctcactataagccggaattacaagctcagacaactctcctcaatttcacagtcacagaagatggtctagaagcccagctgctggcagaggttgtcagtattgaaaggccagatttggagaaacttaaggtgattgaagccaaagaaaatgaaagaaaaatcaacgaggcccgagaatgttacagaccagtggcagcaagagcatctcttctttattttgttattaatgacctccaaaaaatcaaccccctctaccaattctctttgaagacaaatgtttattatgatcaatcacgtcagatgcttgtcacttgagtgtatagttttggacaaaacataagggtggaggtatatctatatgtagatacatatagatatatatgtacacatagatatagttccacctttatgatcatacatttgtttataaaagta

SEQ ID NO: 477114 - DNA, 646 bp, Homo sapiens
tggcttcactcctgaagtcagcaagaccatgatcccaccagaagaagaaacttcggacacatctgaacatctgaaggaacaaactctggacacaccatctttaagaactgtaacactcactgcgagtgtccacggcttcattcttgaagtcagtgagaccaagaacccaccggaaggaaccaattccaaacacaatatgaccctggtaggccacctagccatggatataagcgaaatccccaaatcccagaaggtagcacacacaggcctgagggtcaacgttgccatgacagacatttttgacagatatgttcttggcgttgagtcccacattgtccccaggaagagcttcactcgaagcttcatgatgcatttcaacagactttacttcagttgtaacgtcgactggagcaaagctgaagagcacaactggtttgcaagactagatgaccaataccaggtcagatgagggcactgatgaaaaagaacacagaacagtgtttttctgactgtactttctattaagtggaatcattccatggtcattccatacattatgggacactgtttttgtataaccgtcctgtaaatctaaagaacttgagtaaagcaaaagtttactcattccttgtgtacctggtttagc

SEQ ID NO: 477115 - DNA, 1475 bp, Homo sapiens
gctgccaaccttcttgcatggaagacaacccagttggattgccagcttttattcctttatttgtcccctcccatgtcctgctgattggtccattttacagaaggctgattggtccattttacagagtgctgattggtccattttacagcacactgattggcacattttacaaaactctatctagctacagatggctgattggtgcattttacaaacatctagctagctacagagtgctgattggtgcatttttacagagcactgattggtgcattttacaaacctcttgtaagacacaaaagttctccaaatccccacttgacccaggaagtctagctggcttcacctcttacatacagttcatgtacgatgagtttgtggaggaatatgagcctaccaaagcagacagctatcggaagaaggagctcaggatggggaggaagtacagatctatatcataaatacagctgggcaggaggactacactgcaattaaagacaactacttccactgtgtcttctctattacagaaatggaatcctttgcagctacagttgacttcaaggagcagatttaagagtaaaaaaagatgagaatattccatttctactggttggtaacaaatcagatttagaagataaaaggcaggtttctatagaagaggcaaaaaacagagctgactagtggaatgttatctatgtggaaacatctcctaaaacatgagctaatgttcacaaggtattttttgacttaatgagagaaattcgagtgagaaagatggaaggtgacaaagagtggaaaaagaagaggaaaagtttagccaagacaatcagagaaagatgctgcattttacaatcaaatcccaaactcctttcttatctcgactatactaataaatataatttataagcattgccactgaaggctcaattgactgaaattactttaacattttggaaattgttgtatatcactgaaagcatgaattgcaactgcaatgaaattcaaatttacttaaaaaagaaattaatatggcttcaccaaggagcaaagttcaacttatttagtaattgccaacaattatcatggtcctgaatgtagcatgggagcttgtgtttctgaggcagtctttcttgaaatattaaagaagcgagatgggggtgaggagagggaggaaagaggacttcctctggtgttttattataaagcttacattttatatcatattaaaatatcttggtcttctactgtcttgaaaaatgacaattgtgaacatgatagttaaactgtaccactttttaaaaccattgttatgcaaaatttagaagaaaaagttattggcatggttgttgtatatagttaaactgagagtaattcatctgtgaatctgctttaattacccggtgattaaagtagtgtaaacttgtacatggaaatttttgaatatgccttaatttagaaacagaaaaataccc

SEQ ID NO: 477116 - DNA, 648 bp, Homo sapiens
gccgtggctttttttttttttttttttttttttttccctgaggtggaattctgctttagaagtgcacgtctcactctaggggaggaggtgtgtgtgtcccgtggtgttgaggctgacgcttaccataaatgtcgtgtttctccctgcaagccgctctgaatgattttagcgtgttgagaaggcgtgacaggccagcccagaaggaggaagggagcgttggcagggacatgcagctctggaagctgaccggcgggtgcccgcgggagacagagcgaacgcagtgctggcactgcgtccctggcctgcgcctctcccagaatgggaagacgacccccaaccccttgactagtgtgcggggtcctcgcacgcggaccgccgccggcggccgccgggagcagcgagctgagccaggttgggtgggggtgtttcctcgtcgagagctctctggtcaaagtttccttcccgctggaaaacaaaaacaaaaacaaaaaacaaaccaaaaccaaaacaaacaaaaaaaaaaaacctggctaggcgtggacctgtgaattcctgaggggtgccccttagcagtccatttctctttcgtgtggttttactaagaagttacctaacatttcctgggaagagaggtaatacaagcccctc

SEQ ID NO: 477117 - DNA, 836 bp, Homo sapiens
gccacagtccagtttccatttcccctgaagagccagaaccagggcgatggatgctaaacaaacagcttctacaaacgcagactaaggcacttctcgttcaagatgtggaagcgaggacgtggtgggtcctctggtgtgaacttccggatttctgtgggtcttccggtaggagctgtgatcaactgtgctgacaacacaggagccaaaaacctgtatatcatctccgtgaaggggatcaagggacggctgaacagacttcccgctgctggtgtgggtgacatggggatggctacagtcaagaaagggaaactagagctcagaaaaaagagaaaagatggcgtgtttctttcttttgaagataatgcagtggtcatagtgggcaataaaggccagatgaaaggttctgccattacaggaccagtagcaaaggagtgtgcagacttgtggcccccggattgtgtccgatgctggcagcattgcgtgattctccagtatatttgtaaaagcaaaacaaaacaaacaaaaaaattttaaacccattaaaaagtatttgttcccagaaaaaaaaagagtagtgtcaaaacactttaatagaagccgatttgtaaatacttatgttattttaatgtcctacaaaattatttttgagggactgaggcaacagtgaacagggattctggtacttttcttaaaatccaacttttcttgataccatatcttgtttgaagtatgtaaacaagctgttgtgttctctggtgccaagtgataggaaggaagaggggaagtttagctttgtattctcctggctcctccccagtgtattgctaggcaggcca

SEQ ID NO: 477118 - DNA, 879 bp, Homo sapiens
gtttgcaacttctgatttaaagaagacttaaagattaaattcttttcaataaaattctataatgaaaatgaaagttactgtgtatggacactttttaaatcaagtgcccctaagaaacgatggcctgaattctgtgcttgggcctgagcttctggcctggttacacagtggccaagcagagtgttcctgttgcaggtaccaccatccactcttgtgtagacacacagctgaacacagcagcaggtgtttatgggtagttgataatactgttcagagacagagagaaacgaaaaagaacaacaacggatttggaaggaaagataataagtctgttcaggaaagaatcatgtttaagtcagtgcagaatatgcagagggatgtacccaacagaaggttggaaactcaggcaggcagtttacaactctaccttaaccttcacttcctacttgtgcagagcctcaaggtcatccagagggaaaatgttgccctgcagaaggcatctggttatcacagctggggaggtggagaggatgctggtatctacaaggcggaagccggggatgctgctaagcatcctgtaacgctcaggacagccccccacagcaaacagttatccagccccaaatgtcaatagtgccaagattgagaaaccagagctagattaaggtattgcctccatgtttttaaccacatggatgctggcaatagtttataagctatagaagctcagtgattaaaatcagtccttagatttccacacagtgaggagcaaataagatcaaagcaaaccagtagagattggctccctcacccttctaccacatggaggtcagatacctgtccttgagcttgtgagaagaagcctaaatatcaggtttc

SEQ ID NO: 477119 - DNA, 884 bp, Homo sapiens
tgcatttctcagccagtttgtctttgactgaaatgagctttttttttttttttctgaatacaatttatggaagcatcctcctgtggtaggagggccgggggctgtgattcaggccagaagttattccccctgcttaggactcttgatgcccatgaattgaatattgatctgactccaaggcaccagtgtacaatttgtctttttggtcagcttgcttctcatgtcttcatggtgcccgataaggagatctgctttttcctagacctgaatagtctgactaaacaaaaccaggttgccatttcctataaatatcaaattccagggaattgtctcctaggcaagagggatctctccagaaccacaggaattgctagttggcaaggccccaggattcgttgtggagaagctgtccttgtaatcccgggagataatctctattatctaagagaggaagggagcttgccagagataaaaatgctcacacaaggccaaaattcccccgaaagtaagtttaaagggacagtggtgacagaacaaagttttcacatgaccacaagaccacttaatccaatcccaagcctccatttccaaaatggctggctggctcagctttctgccctacaaaatcaaaaggcaaatattgttactggtgctccaatttcagcaaactcttagaatatttctacttatataaatgtaatggaggaggaaaaagtgtataccttcttttctttctaaaacaatcacttagtaactcattactcatcagctgacatttggaaatagcatggtagcctgaagtcaaatcttttttcgtttcttcaatcactctccttcacttacagagtgagtctcagttgtattttttaagcagactgtggaaa

SEQ ID NO: 477120 - DNA, 806 bp, Homo sapiens
ctcatctgccaccccagcagcctctttcctggaaattaagtgcatgtttcatttgcttgcagcaggaataagactacgtttttttttgaaatctaccaacaaaatgatctttctaaaagtcaccctcctggaacttgcccatgcatacgaattacctgagaattttgatcaagtgcagattttaatgcagttaagtcttgggtctaacctggagttctctgtttcctataagtactcctgtgatactgctgctactgctatgactgaaccgcaaggtggggagaggagggcagcaggagtactagtggtctcctgccttatcttgactgtccctgctgctcctcatgtggccctggtgtgtcgtgccccctcctctcgggactgcacctgggggaattggctaacttacaaggcaaaggctcctcctgagggtgtggggagaggcttttctcagggtgccaaaggtgggtctgatcaactgacccagcagccctgggaagaaagccccagtcagtcacctatctggaggcttataaatgctggatccgcaggtatggaaacccacaccacatagcatccagccagggacccaaatcataataaaaatgtgggcatgggtggattgtcgactattataatatgatgcgctacatcatccagaaggaaatagcctcacagagtgcagaaacagacttctaaaggcaccggggaagtaccattgtgtagccaatagtcttcaaggatatggcggcattttttaggatgcagtatacacatcaaattagagtgctttatatggtactgtg

SEQ ID NO: 477121 - DNA, 833 bp, Homo sapiens
cattagaagcattagaagcaacatgatgtggagagaagagtgtgaacaattggcatgcagaagctgcaaaaagcatgtggcagtaacatcgactcagcctactgtggtgaaaggtcgcatgagaccatgcattggcgaggacaggaaaagaggaaaaggcacagtgggagtgtccagctgtgaccttggagcagttgaagaggcaggagtggctcaggctaggagccccccaccccacaacaggccccagcgtgtgatgttcccctccctgtgtacatgtgttctcattgttcaactcccacttatgagtgagaacatgcggtatttggttttctggtcctgtgttagtttgctgagaatgatggcttccagtttcatcaatgtccctgcaaaggacatgaactcattcttttttatggctgcaatggacaaattctttagtggtgatttctgagattttggtgcacccgtcacctgagtagtgagccaatgtgtacactgtatccaatgtgtagtgttttatctctcacccctctcccaccctttcctctgaattcccaaagtccattatatcattctcatgcctttgtgtcctcatagcttatctctcacttacaagtcagaacatacgatatttggttatttggttttgccttcgtgagttacttcacttagtgaataatggtctccaacttcatccaggttgctgtgaatgtcattatttcattcattttcatggctgagtagtattccatggtgtatatataacacatttcctttatccactcattgattgatgggcatttaggttagatccgtatttttgcaactgc

SEQ ID NO: 477122 - DNA, 634 bp, Homo sapiens
atatcccactcctaacccaaaaccaatgtgtaacctccacatactgtctgtaacttctgcattcctgaaatgcacccctgcctttaaaaacctttccctgcaagccacgggggaggtcagttctttagcaagagctgcccgtattcttttgcttggcgccctgcaactaaacgccttcttttctgccactgcaaaagctcagtgtagcatagagaagctgttcatgcttgttcatgaaaaaggcccccttccccacttaagaacacatctagtagtcataaagaccttgctgataaaacaggctgcagtaaagaagctggccaaaacccaccaaaaccaagatggcgacgaaagtgacctctggtcgtcctcactgctacgctcccatcagcgccatgacagtttacaaatgccatggcaacgtcaggaagtgagtgccattaagcatggaaatcttatagtgaagttagaaattcttcagagggcaagtgagctgccatcttgggtgctaccagtttcagccagtttggtcatgagggagaactcctgaccttaagatgccggcattctgtttcttaaagataagcagggttaaggtaggggagaaagtcaggtaggtcatgtaggctttata

SEQ ID NO: 477123 - DNA, 1790 bp, Homo sapiens
gtggtgtattccaaaaggggagaaaggcatgctccttccaacagctgcaaagcagagatggtcatcaggatggggagggccacacagcagaggccctttggcgaacattacttgggactaacaagcacaggaaaaagtggagaacaattttgcaggagccgagaagccaagtctcagccaacagtttccttgtccccagggggcatctgtttccacagcaactacaacctggggagactgctgccttcagactgtcccaggaaaatatttagtctgcactatcaattctggatggccagaaagagcactgaatacaagatgcaaaactcactggggcttagggaggttgaacaaattgcttctatcaccactgaacctggtgcctcatcccagcaacctccacctgatgacaacaatgatgatgacaaaagtaataatgatcatgacagcaatgacaaagatgatgatgacagtaatgatgatgatgatcatgatgaagatgataatgaagacaaaagtgatgattataatgacaacaatgacaggataatgatgacagtgatgatatggatgatgacagtgatgatgatagcaatgatgataatgatgacaatgatgatgatgatgacaatgatgatgatgttgatgacagtgatgatgacaaagatgacaatgaaaaagatgatgatgactgtgatgataattataacaatgatgacaatgacaaagatgatgacaatgataatgatgatgatgataatgatgactgatgatgacaacagcgacaataatgatgctaatgatgatgacaatactgatcatgacaacaatgacaatgataatcatgggaatagcgatgataatgacaatagtgacaatgataataatgatgacaacagacaattttctaatagtgatgatgacaacaatgaccatgatgacagcaatgacaatgacaatgatgataatgatgatgacaatgatgatgacaatgacaatgatgataatgatgacaacaatgacaatgatgacaatgagaatgattatgacaatcatgatgataataatgataatgacaatgatgatgacaatgacaatgagtataatgataattatgatgacaacaatgacaatgatgacaatgacgatgatggtgacaatgacaatgatgacaatgatgatgacaatgacaatgatgatgatgacagtgatgaggatgaaagtaccaagctcaactgcaatgtgcatacaccctctaggcctgttggtggagttagtggacacttcaaaagatcttgtgcagttggggtatccacaccacattcacaaagcccctcattgtggcagtggatctggggttcagaagaggagcagcagcccaggaaccagaagcctggagcctgggctctctttctccataccatcaagttctatcagagaattcctgggaatcaaagtttttatggagatgtatttgtccagcgcaatgagaaattcagaaccatcccaaatcaggaagatgagcacagcaaagagaaaaccaaagaagggcatttggagaaagttctgagagtccaggccatcccttgtggcttgatttgccatttacaaattcctggactgctctcagtggatggattttatggcagtaccaccgcctccattttagccaaggcttgaaattctcaagatgatcaggaatattaattaattttaaattttcacatagaaagaggggacaatgaaggaagaggaactatcatgtttgagcaatgctgtatgccaagtac

SEQ ID NO: 477124 - DNA, 1034 bp, Homo sapiens
ctgcagctgcctcgcctgtctgctgcagctgattgcctgtgatctccatcatcctgcagcaggcatgcctgctgacacagcctgttgtgtcggagacctgattactgcaaatcccatttccacctcgcagattcctcggaaattgcagacgtccattcttaaccggtgtgaggtgatagctccttgtggtgttgatttgcgtttttccctgatgattagtgaagttaagaacatctttttatatgtctgtcggccagatccagcaattccacttccgggtgtttatccaaaggaaaagaagtcagtatctaggagagatcatgttcacggcagcatcattaacaatagccatgaaacagaaacagccaaaatgcctgttgatggaaactcttatctctcccaatacccacatcccttgcccaaaatactaccaccatcaaaggtgtttttgaaatacagaaaccctgaattatccaaaaatccaaaactttaatcgacgctgtcatgctgtggctctgttggctgatcaggtggttaaaagggttcgccaaagctttttaggtacatgcaaataaggctatcagacttgcagaaactgtaaggttctttcaaatgcaatatcaggatgaaagaaggcttataccctcaccctttcggatgattgcaaagctgttgtggagcaaaactctgtgcgtgagtctgattggttctgtggcatcctcaagcaaggttaaagccagatgctttgggatatacttagaagtaaagaataatagctggatttcaaatccaagatggtgactccttcctggctagaaaatatggacagagaggagtcctggcaagctgcctggcttagcaagaacacagaacttgaaaccaggaaatctggactccatgaataaatcattcattctccctaaacatctgtttcccaatctaaaaatattagcatccactccatacttaccactcacactgctgagaggttcaaatgggaagatcattgtggaaacacgtggagaattctaagc

SEQ ID NO: 477125 - DNA, 1535 bp, Homo sapiens
atccgagttcaaaatgggtcgtaaagcagcagagacaattcgcaacatcaacaacgcatttggcccaggaatggctaacaaatgtacagtgcagtggtggcccaagaagttttgcaaaggagacgagagccttgaagatgaggagcatagtgaagaagctccaaagcacttccaagagccaaacttgcaccaaaaaaaggtcatggtcactgtttggtggcctgctgttggtctgatccactatagctttctgaatcctggcaaaaccattacatctgagaagtatgctcagcaaatcgatgagatgtacagaaaactgcaatgcctgcagctggcattggtcaacagaaagggcccaattcttctccttgacaacgccccaccacaggtcacacaaccaatgcttcaaaagttgaacgaattgggctatgcagttttgcctcatccaccgtattcatctgaccccttgccaaccaactaccacttcttcaagcatctcaacaactttttgcggggaaagcacttccacagccagcaggatgcagaaaatgcttcttaagagtttgttgaatcctgaagcacagatttttatgttttgggaataaacaaacttatttctcattggcaaaaaaatgtgttgattgtattggttcctattttgattaataaaattcgcagtccaaaaccacaattatttttgcaacagtcaaccttgaatggtgtcctagtccattttctgttgcttttaacagaacacctgaagcttggtactttataaagaaaagtcatttctttcttactgttatggagactgagaagtccaaggtcaaggggctgcatctggggaggaccttcttgctggtgaggactctctgcaaagacccaaggcagtgcagggcattggtgaaggagctaagcatgctagctcacatctctcttcctcttcttataaacgaaacagtcccattcccatgataactcattaatccatgaatctatgaatgaattaatttattcatgagggaagagccctcatgacccaatcacctctgaaaggacccacctctcaatactgccacattggggattaagtttcaacatgatttttggaggggacaaatattcaaaccacagcaataggtgtataggttggagcatttaaagacttgtaaacaaagactaactgaatgttttctgaaggcccattttctgtcaataaaattctgaatcatactgagacaaagcaaatgcctcatgtatgcaaagcacttgtgttatgtatccctactcaaatgtatttcatttacttatgcattaataaaagcatttatttaacaaataatgatggctccagttactgtattatacaagtggacttcactaattacttctccaactatttgcacttgccattcttccatcaagaaatgaagtctctttgctatggtctgattgtttacatcctgccaaaattcttacactgaaacctaatttccattatggcggtattaagagaaggggtctttaggaggtga

SEQ ID NO: 477126 - DNA, 629 bp, Homo sapiens
cgggaagctctgcttctaggaaaggctcgggcccacctggacaggtgggaacccttgcaaactccaagttcccagatgccgccaagggccaaccttgtaagcatgtctttcaaaggacagcagttaggcctgctaaggggactctgttctgcagacaaactaaatggggaatgtgaagagtccaggaaagtgttatgtctgtacagagtcttgggtcttactctgtcacgcaggcttgagtgcagccaaagaaagagaaaagaggtctatcagggagaaagtggtatccaggaggctccaggagcctctcaccttgagcataaattggataagcagacttctcctggcagatttccaagttgggaggaagagcgtttgcatggaaaattgttgctggctaatccaacaaactcaaaagcttggcaggcccggtcctcttctactgaattactaaatcgagatactatgctagacactggggacaggaaagttggagacgcttctctagaggtatccatgaaggacacagatataaaatagtgattgtaatatgttgtgtgctgctagcaagccacttctgatttgccaagaaaccacagaagggagaataaccaactcaactttgcaca

SEQ ID NO: 477127 - DNA, 2759 bp, Homo sapiens
tctccagaagaaccctaagagtgtgtgtccggaattggggggtttttgttctcactgacttcaaaaatgaacctgcgaaccctcgcgtggctctcgcactgggtctgcaggtggagctgcctgccagtcccgcgccatgcgctcgcactcctcagcccttgggtggtcgatgggactgggcgccctggagcagggggcggcactcgtcggggaggctcgggctgcacaggagctcacggaggcgggggaaggctcaggcatggcgggctgcagtcccaaggcctgccccgcgggaaggcagctaaggctgggggtgagaaatccagcacagcgccggtgggcgggcactgctgggggacccagtacaccctccgcagtcgctggcccgggtgccaagtccctcactgcccggggccggcagggccagctggctgctccgagtgcggggcccaccaagcccacgcccacccgcaactccgcgtgcagccccggttccgctcgcgccactccctccacacctccccgcaagctgagggagtgggctccagccttggccagcccagaaaggggctcccacagtgcagcggtgggccgaagggctcctcaagtgccgccaaagtgggagcccaggcagaggaggcgcccagagctagcgagggctgtgaggactgccagaacgctgtcacctctcattagcataaattttctggagattcatccaaattttttcatttaaaaaatcaataatttattcccttgttattgctgcatagtacccacagtatacatataccacagtttgtgtaatcattcactgggtgaaatacactgggttatttccatagactgttactaataaagctactattttcaggattttttgtgaacgtaagtttccattcctctgagttaaatgaccaagcacacaatttctggattgtgtaacatttgtgtgtttaacttcataagaaactgccaaactgttttatggagtgactgtgccattttacatttgtaccaacagtgactgattcagtttctccatatcctcaccagcatttagtgttcttactattttttgatttggtcattttgctaggtgtctagaaatatattattgtagtttaatttggggaggattttaaattacaaattcaatttttgaatcattatggagctgatcaggtgatccacttcattttggttgagttttggcagtatgtggctttcaggaatttgtccatttctcctaagttgtggtttttggtgttctcttaatgttttaatggctacagaatctgcagcgatatcccagaatatgatattaatatactctatatgtacggtgttatatttttgatattgatgatttgtgtcttctatttttgtcagtttttcctaaaggtttatcaaatgtactcttttgaagaaccatcttcttgtttcattgatttttctgtattgtttttcttttcttaatttaattaattcctgatgtaatttttattatttccttccttatgcttgctttagattttgatattttggatttcctgaggcataggaacttagattacttattgagatctttcctttttctttataaatgtgagggtatgagaaagaaaatatgtggctacagtatgtttttctgcacaccaatgctttcataagctataaaaccatattctgtttcttaaagaaatcagtgacagggtattgaatgtaacactctgaacagaacatttccagcggtatgtagcattataagagtaaaacaggaagactctaccaacagatttaataattaaactggacttggatgtagacttggatgtaacatgattctatctgtcactgtactttaacttttgaccacttccctggttttttcatctccactaatgctacatgaaatttcagttaggttccttcagcttttaaggtcattcttgagtaaaaaaatgtccccctttcagtctcctagctcagcctttttgtggctgggaaacctgcagtggggagtgggagtgggcagtagatgatggtggcctccttccctgtttctccttccctctgtcactctctgactgtactttgggtccctgcgagttggaaaggatgagggaggagaggaaaggcagagccagccaattagtttagacatttctattagattaggagccaggaaatgagaaaaatcctgtctcacaagggagctcttctcagcttgggcaacagagcaagactccatcacaaaaacaaataaataaataaaataaacaagcacatccattaagatccttcttggtattcatcaccatttcctagatacctggaaaataaggaactctaccttttctgtgcatgaaaccaaactctgcaataagaacctcccttcttgagtccagatttattagaaaatctgcatttataacactctggttctctggagaatgtaactttcagtccagataaaaatatggtttgacagcaaaatcatgctatgaaagcaagatcatattccagactgcatataacacaaccaaatatgaaaaaaaatggttaagagcaaaactatacactggatttgagggctgaatctgctactcacttgttcagagacttgagagagttattaaatctcttaaagtttctgtttactcacctataaaatgaggccaataacactcaactcagtggggttactgtgagggttaaatgaagtaattcaagtaaatgtgttttgccttgaatac

SEQ ID NO: 477128 - DNA, 683 bp, Homo sapiens
taccattaagaacattcaagattcatgggaggagaaatagctttacggcctgtatggttcagcagtcaagagataaagaggctagagcttgggtgcttgggtcagaccacctccaattgctacctcatattttcctgtacagattcttcttctcttatggagcaaaaaaatattatccatggaccatgtccagctcgacatttgggatctctggatggagggccatcctttccatcaggacacctaatatacaatggtgaagaaaacgaagacaactgcaacaaaaactcctgctcagagaaaaggggagaacgggaaactacagcaattaccaatcttgacaaattatcaaatcctgctgggcaattactaagtcctgctggacaagatcttgtttctgatcagcctgaggttcacgggctatagggccatggtgtcccttgatgggtgggtttatgaagatttacgacggcatgtgaacagattgggcaagctgggacattatgtgtaatcacggttttttattggagagcctttattaacttttccacttggttcacaatatgggagggtattttgatcttatcacaatgaataatttggtgagtagctttctaaatttttgctatgcatatacaaagacatgtatacaaaaaaaaaaaaaaaaagaaaacaaggtctac

SEQ ID NO: 477129 - DNA, 4232 bp, Homo sapiens
ggtgccaatgccttgctcttcgtcggtgtgaacatgtatggggtctttgtgcggattctgactgagcgttcacagaggaaggcgttcctgcaggcccggagctgcattgaggaccgactgaggctggaggatgagaacgagaagcaggctgacggcgactccttcatgcttgttcaccttctgtatttctttgtgattagtacgcttcaaccctccgtcccgttacattctgactttcctggcagtcgggtgaacttctcactgtataacagagacactgatgcctcatccccacgtttccccagctccgggaatcccagagtctcctccctgtcattctgtggccagtgctgcaatattgctgaggaagatgccggagctggttgtcgccttggtctgtgggaggctctgcggcatgtcctcgggggctgtgaggagatggaggtggtggccaacatgtggctcctggacacactggtcttcttggttctccctgatggaacagcccaggctcagaagccacatgccaagatatagagcccaggtgtggccgggagaggaaaggtccctgagcccaccagggcccacctctgtgctggaggagaagaggaatgcagccacattggattagggcccactcaattacctcattttaatttaatacctccctaaaggccctatcttcaaatatagtcaccacattgggttttagggcttcaatctatgaatatggaggggagggtcacaatttagtccatagcagccactaaacaacatcttattttatttcaaataaaagtcgagtgtatgatttaaaaataaggagatgctgcgtgtgagtcctggatgagtgtgcctggactgcctgtccaggaagccctgtatccctgagttcagctccctcttccatactatggagctggcccctcccagagccctggctgttcctcagatgccattattaaatcagaattccaaaaataatatgcagctatttaaagcacacactcaatttgttaccctaacaaggtaaatggaacaattttgagttctcatcatgtgaagaaatttatcaagagaaagaagacttccatttaagtgatgcagtatggatttttaaatggggctggccaatggacagcaccttctcaaacaactaccgttgtgatttatttttcatttttaaatggctttattgagtttatgtaccataaagttcaattaaataaactttgtccaactgaataaagttcactcaaatgctttttcctatagagttattattatttagaattatgcaagaatcttagtcttattacacattaatcttatttaatacatatgtcaaatgatcttattgtagaaaattagtatacaataatctaaatttaggatatttttattatcccccaaagacacctcatatccattagcagtcactctccatgtatacccacacctgccctccagcaagacataggcacccactaatttactttctgtctccatagatttacctgttctggacatttcatacaaatggaatcatataataggtgatcttttgtgactggctctttccacttagcataatgtttttgaggtgcatccagatcatagcatgttttagtatttcattcttttttatggacaaataatattccactgtatggatggatcacattttgtttatctgttcacggctgatacatatttgggttgtttccactctggctataataagtaatgctactataaaaaatcatgcacaagtttttgtgtgaacacattttcatttcttttggataaatacctaggagtagaattgctaggtcttgtggtaactctatggttagcattttaaggagctgctagactgttttccaaagtggctgcaccattttccatccctaccaggagtatgcaaagcctctagtttctccatattcagaatctttttttttgtttaaattaaactgtttttattttgaactacttgtagattcacatttagttataagaaataacacagagagatcccatgtgccctttacccagcttccccagtggcaacatctgcagaactgtggtacaatatcacaactaggatattgacattgggacagccaagatatggaacatccgtcaccctgaggatccctcatgttccctttaaatagccacatccacttccctccacaacaccttcattcttaagacctgggaatcactaacctgttacccatttctttaaatttgtgatttcaaaaaatttatataaatggaataataaaatactgtagacatttgggattggcttttttttcactcagcataattatttggaggttcatccatattgttgaatatatcaatatttgtttctttttattactaagtggcattctatggtgtggctgtatcacagtttgtttaattgttggcccattgaagaatgtcttggtagtttccagttttggcctattaggaataaagctgctatgaacattcatgcacaggtttttgtgtgaacataggtactaatttttctggctcaaatacctaaaagtacagttgctgggtcatatggaagttgcctatttaggttactgagaaatagtgaaactttcccagaatggttgtaccatttatgtacccagcaacatatccatgtcttttgcctactttctaactggattttttaaactgctgggctttgagagttctttatatgttctagataacagtactttttgggatattttgtttgtgaatattttctcaaaacctatagttgatcatttcattcttttagcagagtctttttgagagcaaatatttttaatattgatgaggtttaattcgccagtttttccttttgtacttttggtgtcaagtctaaagactttttgcctagccctagttcttatgtgtttttctgaaagttttatcttttacatttaaatctataacgtattttaatttaatttttgcataaggtatgaggtttaggttaagattcatttttttgtctatgaatgtcaagttgctgtagcatttgttgaaaagactacccttcctccattgaattacttttgaacctttgtcaaaaatttgttgcgcatatttgtgtgatctatttgtggattctagattctgttttattgtcttatgtgtttatctggcaacccacgtcacactgtctggattattgttgttttataacaagccttgaaatcaggtaaagtgatttcttttaccttgttgttctttttcaaaattatgttaagtagtattattccttttcctttatatttaagtgttagaataattttgtctataggtactaaagaatttgctgggattttgataggatttatattaaaactgtatatcaatttggagagggttgacatctttactaagttgagtcttccaatccatgaacatggtatgtctctccatttatttagatcttctctgatctctttaatcagtcttttatggtttttaacatacaaatcctatacatgttttgttagatttacacctcagtatttcatttttgagcaactgtaaatggtattgtatcttaaatatcagtgtccatgtgtttattgccagtatatagaaatgtaattgacttttgtatattgatcttgtatcctgtgaccttctgaacttaattatttgttctaggagtctttttggtacaattttcttttgtttctgcttttgtaacatccattgtatttcccatgtagaccatcatattacttttatttctttctttccaatctgtatgccttttctttccttttctgaacttactgcactaataagaccttcccatgagatgatgaatatgagtaatgggagccaacatccttgccttgttcccagtgaaagcattcaatgtttgttaggtgtaggctttttctgaatattccttataatgaggaggaaattttttttctattttcatttttctggaagttttcatcataaatagatgttgaattttgtcaaattcttttttggtatcaattgctatgtgatttttttttttattctgttgacatggtgtgttgcactgattgatgtttcaattttgaattagcattacatccctggattaaaccccatgtgtttggggtatatacttcttgttgcatatcactgaattgctatcttgtaaaagacttttatatctatgtttctaaagtgcattc

SEQ ID NO: 477130 - DNA, 1012 bp, Homo sapiens
ggtccgggaagtgtggagctcctctgccaggctgccaaccatctgggaagtgaggcacacctctgcctggctgccgaccatctggaaagtgatgaaggcctttgcctacccacctccaggaagtgaggagcatttctgcccagctgccaatcatctgggaagtgaggagcacctctgcctggttgccaaccttctgggaagtgaggagcgcctctgcccagctgcccaaagtctgggaagtgaggagcacctctgcccagctgcccaaagtctggcaagtgaggagcacctctgcacagctgccaacagtccgggaagtgtggagctcctctgccaggccgccaaccatctgggaagtgaggtgcacctctgcccggctgccaaccatctgggaagtgatgagggcctctgcccacccaccatctgggaagtgaggagcacctctgcccggccgccgccccatctgggaagtgaggagcatctctacccggctgcccacagtcctggaagcgaggagtgcatttgcccagtcgccaaccatctgggaagtgaggggcacctctgaggagcgcctctgccctgctgccagccatctgggaaaagagtgacctgcttgggccacagcaatgggcttcttcattctccagcttctgattggacacaggccatgggagagggcagagcagagtcaggggctttatcctctgggctccattcctgcaagattgccatggcctggctgcatccctccatgaaatgctacagctgagtcagcacttcctctctgagctctgctaagctctccctcccttgtgtccctaaaagtcacagttgtgtctatggttcctcttattcaattttcctgcaaagacccagtttgaatgtgccatctagatctagggcctctacgggatgaactaggtttctcaatcaggatcaattccggagaagagtggaggtgggatccaagatgcagcagtggacttgggggaaccagccagcctgaggggcc

SEQ ID NO: 477131 - DNA, 570 bp, Homo sapiens
tgactttctgattctgcaagggtacagaaggtttagagaaccttggcaaatggaggaaaacctaatcatcagggttaatgtgcaggacttgacgaaaaggggcctgctcttcaaatgtaaggataagacaagttgtgataagaaacagctggagatgcctgtcattcttcaaaataatgttaaaaacactgatttatctcctcccacgctgctcctcaacatcattcctggctttcctaccaatctaccacctacctcatgcctgaaggccatctctaccactgaactggcgactggagaaaggcattctcccctttttatgtatgaaaagataaaatttgaacctgccctctgccttaatcccttttctctcctgcgtattttcactaatttaaacattgccagaatcctgtgctgttctcatacttctatgattccttattttaagttcaaaatgtcatgatcttacccagtgtgtatgtttaatggattaatgtatcattttctttctggccattagccacatgaacaactaggcccacagctgtcagatttcttgcaaggtttttc

SEQ ID NO: 477132 - DNA, 951 bp, Homo sapiens
ccccagttcagaactccttggggagatggatttgagggtctcctcccatctccctgcttggctcccagcgatcctgaaactctttctctgctgcaaaccctgctgcctccgcgcattggactgtgactgcataacaggcactcgaacctgtgggcccacatgcagctcttccctcctgagtgtgacctcgggacaccccacatggcccccgggatctggctttgggaaggaagatggtgcctggattgcgaaggcctttcaatctcatgccctgcgtcatggggtgaactgcaccctggagcctccgacggggcggccacgggcagcgaagaacccggaaaaacaggttcgaggcagacacaagatccaggccccggcaggctccgtgtctgccgaaggcttcctggtacccttctgaggttaatccgcgttgatagaagcaggtgtggttcatctggaatctgttggtgtgaactgcgcggcggcgtcccccaccaggcaccacagcgggcgcctcttggtagcagccaccggcctcttctgggactcgccggagggtttccacgtcgcccgctccgacggggctgttcatctccccttgatctgtgggactccccgtccgtctcaggtatgacccctttgttggtgatctgggttgcagatatcccctctgtgtctgtggcttgtctcgctgcgttgtttatggtgcgcttttgtcatgcagacgtttctaattttgctctgtctggacttggcaatctttctgttcgtgatttgtgcttttggtgtttatgtacaaactctttcccggtccagaaagcataaaaaagtttgctttgtgcgctgaggtctctaatccatgtcacaggaatttgtggcgggttggggcagaggctttgcttagcgttttccatcaggtgagcccatttccccagattgactgcacagccc

SEQ ID NO: 477133 - DNA, 1145 bp, Homo sapiens
tgggaagacgaaagggtgcgggagaggtctgatgcccgctgctcgccacctccgggggtgtccaggctgggcacagcaagctctccccgattgagccagcccgcaactgtggggctcctagagatgtctctggaagttcttcaccaagctgtctccccactgccccctatgcaggcccaagcctatccccgatgcactgcctggaccagtggctgcacaaagcacgccagcccatcacctgccccagcatccctggtgcactgtggccagagccgagctgccagtcatggagccgacccctccccagcacgagaccagctgacccccgggccatgccgagcagctcgggcacatgactcgcctgccctgggcccccaggatggggagattatgaggactcccatgcacccccagagacccctggatcccccgtgggaggactctgcacccccagagccccctggatcccccgtgggaggactctgcacctctggagcccccgggatcccccatgggaggactctgcacccccggggcccccaggatcccccgtgggaggactctgcacccccggagcccccgggatcgcctgtgaatgcttttccctcgacctccacctgcctgccttctgctcggcactcaagcctcaaccgaaacatcacctcctcagatgctcctcctcgaaccacccgcccaggcacgattgcgcccctccacgttggtaccgtcgtggcgctgattgccggaaatgggctcacgcattgactggtgcgctcctcttcccatctgtccacacccccggatgcggccatcagctgtcttggcccccgaggtgacccagcgtggacacggcacctggcacagggtacctggttggggttggacagaatccgaggcagaagagaaaagcaaatccgatcaaatcactgggcttcctccctcagggctgtgtgctggggttaccccaacactgaatctctgcatttactgagtgagtgtctcttccaggaaggggtgggcacggccctcttgcccactggtgggtcccagcatccagcagctggggatgctccgtaaatatctgtggaccgaatgaatttggacaatgagtggaccagtgccaatgaggtgggggctctgtagtt

SEQ ID NO: 477134 - DNA, 1180 bp, Homo sapiens
tcaacgcgtccagcatccttgagggggaggctcccaggtggggaacaagctcaggaagtcgtgcccagctctcaggcccgccttgcctaacctccccatcagcgcccacccgggcccgggcccagagccacagcatgcacaccctggctgggccctcctggagcctgcctgctccccaggcagggaccttctggaccaaccgaccctgctcccgggtgactctgtcctgcagcctcaggcgtcacctctggagagaccatccccgctctgcattcccactgcagccacaggtactcctgccggcctcccacccggcctgcagagccccaggcagtcggctcagcgcgtgtggatgtcgccctctggctgtgtcgggatcaccgtcacggacaactatgaagtgacgatggctgggggcccgtttgaaggggctcgccggctgatcgaggcctcacccggtgctggtgtcacagcctctgcgcccgctgagcagaaaacagtgctggacgtcgcactgtgtgggcgcaagggcatcgccttaaagagtgaacactgtccactgtctcggccgcagcggctgccatgggccccgtgttcatcactcacagtgagcccacaggagctagctggatggcggaggtgcttagccttggtctgtgttgttaccggctgccaggcggctgtgaaggaggacctcgggagggcactggggggccagtctcaattatatgcccgtttcggcatcgccttcaaggcgggtccccttcctctggcggtgatcctgagccgccccccgacaggtccccttcctctggcagtcatcctgagtccccgaagccgtcccgacagatccccttcctctggtggtggccgagtccccgcagccgtcccgacacacatgctacccgctggggcctcgctcctgtgcagatgctcctccccttttcctcccattgactccttcaaggcccttaaaactgtgggctcaggggcagggaccacggctgtgggtgacccagcaggcaccatggcactgggtgctcagcaggtcctcaatctcctgaaggagtgagtccttgaagagtcagtttccttctgtcccatctttagcaaactcaccttccaaactcctttgaaatcggaccagcatctgaaacggcccctcccatcccctgtcctc

SEQ ID NO: 477135 - DNA, 722 bp, Homo sapiens
tgtcaggaccccacagcatgatgtttaaagtggctttatctgtgcagatgtgtccagcttcgacgctaccatttggattcaagctagcggactgtgcggtacgctgtgtgcagagacgcgcccatagctctggggaaacaatatggataaggcacgttttcctctctgccagcagctctgtgggtaatggtggccacagccagagtctgaagacttatttggacagatgccaggagtggaaggatattccagatctgaacaaaggctgttacccaggcttactgtgctttggagaattgattcacaatcagcaaacttgtgagagactcatggatcaacccacaggccagcgtcctagtgcccagacagcatctacgacccagattctcaatatctttttcggctgccctgcccctgagggttctgccgtgtcccagtcactgagacctggagggcctctgggagcctgggagcagagggcttgggagaggcgcacttacagtctgagcacagctccttctagctccacaacccaactgcctgtgaatgactttacactcaagatgttacacctagtaaattaacgggagaaagaactgtagaagcctaatcagtgtatttcttgttttatttggaaaattaagttataattgtttttgtatttaaaggttatgttttgccaagacatattaccattgtgattctcagacccacaacaaaag

SEQ ID NO: 477136 - DNA, 580 bp, Homo sapiens
gcgcctggaccttgtgggcaataagatcattaccactacttgccctgcctcttcatgtagtgtctggtgctctcctgggtccacagcctttactgacactccccagcaaccagccgccgcagggccacacctggactttgtcatgatctttggctgctccacctaggaaatgaaaagcagtcattcttatccaacctcaacctcatccaacctgactcactcgcctactcccaagtatccagacatcgctcttaagcctccaatgcctcaacttaccccctttgtcacaccgaggcttctccgggattcattttatatgttcggagctcagctggaggaagtcacagatccatgcacatggtaccctgaagagtttgtgatctttgatcctagtggggtcctcagtagcactccaaaccatttttcctgctcatacacctccagagacttctaccatcatcaccattctcttcaagcccaacccaacatgaccaccctctgtgccagatcaccttgcttctacatccctgcgaaaattagggctcaggctgggcatggtgttgcgtacctgtagtcccaa

SEQ ID NO: 477137 - DNA, 760 bp, Homo sapiens
ccatccatcaatggaatactacacagccatgaaaagagtaaatactagaagagctgatgctattcctatgagaagattacatgagaggcgttccgtgtcaggccgtgactgggctcacaagacaacaatgggtgtaaatggagggaagaggttgtgtctagacttggaaggaggacagacagccatcgtgctgctgaagactcagctgagcagtggagagtggcagccacagggtgatggtcccagcttccatttcttggcttgcataatcttctggattgcatatttgttcttatcactcaccggctttaccctgcagctgtaccccatggcatctcgagtgaagtctaaacttcccaacatgctttgcagggcctgcctcacagcctcatctctaacccctggggcttcccactctataattctgtactttggtcacactgaacttctgctgcctggaatggacctcacttctcatgggctgtcctctctcccagcctcagtgttgtcaggctcattcttccccgcccttcacagaaaggctcattaagtcttactttccatgggatgtttccttcacctttctgcttcatcccctcagggaaagggctgtcagggaatgcacagcctgcttccttccagagcctcatctgttcaggttacatgaccctctgtgctgacacccctattctgcttactagaggctattgtgatgtctctctgtgaccctgaaatgtatctgccaaactcttaaaacaac

SEQ ID NO: 477138 - DNA, 662 bp, Homo sapiens
ccctgactaatatagattttcgtaccaggagtggttctagaggaacagaatattaaggatggagttctttagttggttttggggtttctggagttggctgcttaatatgattagaccccaaaatgctaaggactctactgctaatagtacagagaacactaatagccattggtgtgaactcttcagagaattatgcaaaataaatgcatttgatactcctgattcacccctcatgagagatttcaaccagtcagttattgaagagatggtaggcaatgagtctggcacgttctatgggaagaaaacagaaacacgtacagcttgtccaactgaggcagaagaaactgtgatgggaacaattaccttcatgggttgggggcactggctgagctcccatcccaccactagcaccgactttcctggtgcaagaatacggcatcttagaactaattctccaattcccagtcgaaccaccccaggtcttcaggcagagagaaacaatttccaaggagcttatctcaatgaactgaacccaggacacaggagcagcacacaggataagtggatttgggttggatgtcgctgagggaaaaataagaagaaagtgtagtctctgtgcttaaagggcatcagcatgggatcagagctcttcaaatgcaatc

SEQ ID NO: 477139 - DNA, 781 bp, Homo sapiens
tgcctttggcaatgtggggtgatggcgacatactcagaaatccagaagaaaaacacatgaacaattctcaatacaattttactttcattaaatcaataatatatgaaaacaccattgagaaagaggaggaaccttcagaaaaccatcccatcaagtgtgaactttctgcattttttttcccctgtcctttttcccatttgcaaagaggaggaggatgggccaccctagtcaatcacggggaaacagtaggtgtgatcactgtcacgggaatccagcccattcataatagtctgagaaagcaggtgctccatgtcagtctgggtctcagaagtttgggacacgctgcattccatattccctctgtattagtccgttctcatgctgctatgaagaaatatccaagactagataattatgaatttctgcatcttatactcatgctagtggatgccttttcaattaaccactgacgatgggaaagagacagatttctgtatccatgaattaactgtcagtactgacaggtagcggggaacttgtgaagagtacagtgtgagtgtgtgtgcgcgctcacaagcaagtgcacaattggataggtgggcgggcttgaccctattcctttctaaagctactgtggtcctgatgtcatggtatgggatggtatagtttatcattataagcaacagagctggatttcaaggctctcatattgattgtctagggctactgtaacaaattaccataaagttggtggcttgaaattacagaaaagcattctctc

SEQ ID NO: 477140 - DNA, 624 bp, Homo sapiens
aggggtggaagcagggagtctgcggtcctgcggggatctctgcccctgggccatggagctggcagttctggggccctgcaggccctgccccttcctcagggacagccccaagtctggcaagggaacgaacacacacagggacccaggcttcagctgcacaggcctgtgccctcctccagcccagggtgctgtggcagccccacatcaagaccccccagcacccccaacatcacagcctcccctgatctatgatgctaagtacctagttagaggctgggggctcctgcagaggacgtggctcaagctgaccccaggctgggacagacccacttatgctcccaagaagcttggcagcaggagtgagggctgggcaaccacctggctcctcccggcctacactggtctcttgcaggtggatgaggagaagaagcaggtgaccatggaggctggcatcctcctggccaacctgcacccacagctggatgagcatggcctggccctgtccagagatgcaacaggtgccctccaggtatgtcactgccttctctggctgacagtcacgatgaggaagggaccctgctgcatgtcggtgctctgacagttgcacagtgccctcccaccttc

SEQ ID NO: 477141 - DNA, 612 bp, Homo sapiens
tgtctttgggtttctgcaaagaccagggtgcccagtggaaatctgatgactgacttctacaccttcccctggcatctccagaggaaacctctcttgacgctgtttaagcacttcacactccgctacctgctaattttgatggaaattgcttttgacatgtgcagttggtggccaggagcttggggtgagagaacacataaagctgaactaattctcattaacagtgagcaaagaccagagataggaaattggcagaaatggggcacctggggagcaggttaccactgggctccctcgggcagtgaacccagctttgaggaggaaatgagaatgtccatgctgggctctggggaatcaggacccacacatccctctatgctttgctgcaaagcctcttacctgggagggcgcaagaatgatggatgcgaatggcctcagtccttccccttccgcagccccatcccctcagatgctcccatgacccatgtggtctaacccctggcaatgctgaagcttctaagtcagcaccaagtgtgggctctggaaaagggcttgtcttataagcaaaaccatcataaacacttattgggcactaactgtatacactcttct

SEQ ID NO: 477142 - DNA, 589 bp, Homo sapiens
gcagtgctcctgggaccacacctgtcagcatcatgaggaaaatagacacagaacccatccctctccccacccagaagagcccacccagcgtgctagggtccgggtactctgtgttggaggggaccccccagcaaagacctaaggataggcctggagcctggttccctggatatgagacaattgtggccagagatctgaagggagccccggattccatggggccccgggggccagatgagcaacagattctgtccccctgggctgagtgcagaaagaagaccacggaggccctgctggagctgaaggccgtgctggaggcccaccctgaggtggtgtcccactacctggtgggggtagggctgcgggtgagagcctcgcggagcggcggggcagctgcggtgcaccatgcactaccatgtccagcagagggcactgctcttccctgtgcctctgccacccccggggctgacccaggagatgcagggctgagccccaactacccttctaccctctcttgggttcttgttccaacagcgcagtgactgcgatgcactcagagttttcagagaaatttctcatctttcagtct

SEQ ID NO: 477143 - DNA, 995 bp, Homo sapiens
ttttctagaacatcatctcaatggaataatacagtctgtactcttttgagtgacttcctctactcaatgtgcttttgagatttatccaagttggtttgcatatcactagtttttttgttttttttttactgatctgctctctgtgctgtggggaggttatgagatatgagtgggtcaccgctcagtgcattcccagcatcgcgttgggtcagtggcttagcttggaaccggctcaggataatcatgcttttcatcagccgctcccgtttcccttcctcgttcctcttccttgtgaacttccacccccagcctggcataaagccctttcactctcagcattctaggttctggggaaacaaaagtaattcccactgtctccacaagcccgcccttccgtcggaactgggggtccttagaccctggacccagagagtggctccatttcctgtggacacttccggaactggtttatcaaatctcacttcttcggatgcttttgggctgcctggacacacacactcctcccagactccgctttggatttttgggcctgttctgattgacttgctgtggtcactaacattttcaggatgtttcccatggaattccaggttctaaggaggtgccttgggggctgctgcagagagcctctttaaacacagagctccccagccccttcttataaaacactgtgaaatatatcatacttttaaaaaagaacaaaaacatacgcatgtatgtacagttgaaaaataattataaagccaatacctgtgtaaccttcacccaggtcaagaaataaaatattgtcagaaccctaaaagccccgtgtggccctccctaacctactttagatgtttaaagttgcagctaagagctcccttcctaagcaagtctgaaaaatgctgggttaagggattccttcctgaatgcccctatagccatattcactattgaatcttgtacattcctgttttctctccaggtctcagaag

SEQ ID NO: 477144 - DNA, 702 bp, Homo sapiens
accacttccttttggcaaccttctgattcatttcttgtaagacttcctggcccagatgacggacaccccaggtactgaaaacttgtcagtggagatttctcaagtgttatttgtgaactttgagcaaccatggaaagcaagactaggacactggtggtatccacactggataatactctgtcacctagagttccttccagtggctcatactaaatccaggaaaatcagaaattcacagatgatgaggactggagaagacccagagctctttctaaactgggctccgagccagagctctccagagcccttaaaaactgatagctcctggacaatggacagcccacagacaaaccttgtgagagctaaattgttgagacttcaccgacgagggctgctggcaaagtgggctcaagtctcagaggtggctgcaggtgtgccctttgtgactgggaaagggtgtgagattgtaaagacccagttgggaagcgcattccaggatcagacaactatggcactgacaatccttacagcgagcctgaagaacccacaaatgggtggaaaagaaccagccctggggcctctgctgcagtggggctgccaacagccaggttgtaagagtgcccgccatgaaagactctcctctttttctctgactcctgccctctgcccctgtcctagaggatccagcggctaatcctccct

SEQ ID NO: 477145 - DNA, 617 bp, Homo sapiens
agcattttcaaagtgccttcgcctcataaccacccttgaggtggatggtaaggccgggaaatagtaacccggtagtacagcatgtgaaaactcaggttcaaagaagttttgtgacttgcctacctcacagggctgaggagggtggagatgggagtcaagaccaggcttcatggctcagaatccagtgtttgcttcacgaagcttctctgaagtctaccatccatatcaccaaccgttctgtgggcttatataacacagggaaggggtataacatggatttgctaagggcaggatttacgtcaaggttgtttagacccaacggcaggattcacggactgatggctcctcctcagactccaccagtgtgggcgtcttttacgatgtggcacttggagcactatgggaccttgggcacatttcctaatataagtctctatttctgcatctgcaaaatggagcaacaacatctatccctgggaggtaatgtgagaattcagtgaaaccatgagcacaaagcctgagtataatgcttgctgtcagttgggtgctgggcaaagggtagggctgttgttttcatcatcatcatcatcatcatcatcatcatcaccatcatcatc

SEQ ID NO: 477146 - DNA, 1143 bp, Homo sapiens
tgaggagctctgagtccagaccctggcatctgggagaggtgcagctgcagctgtggagcaagggagcattcagactacttagcaaatggatgcaatacaatgtgtcaaagagataatggatgatagtgagcctgactgtgctgggggtgtcctgcaagatttcattgacttgggtcttgaagtatgacaaccctgagcaatctggattggactcctaccatctgggaaataccaatttcacttggaaaccaggagcatctcctacctcatctagaactagttacctccccagccagcagcatgtcaaggagaaacagaaaaagtatagattatctatcgtgcaaaacagccgttttcatgcccacggcttctgtgtctcagttgttttgggctgccataacaagctaccagagactgggtggtttatcaacaatggaaatttatttctcacaggtctgggggctgggaagtacaagatcaaggtgctggcagattcattgtctggtgagggccacttcctgtctcataaatggtgcttgcttactgtgtcctcacatgacagaagaggggagggcaatctcctggatctcaagatttagatgttctatttattgaatgtatgctagagcttaccttttaaagcatctgatcctagtgttttctttgtgggaagatttttaattacagagtctatttccttatgtgttattgcactattcaagtttttttccttgattctgtcttgatatttaaaatatatttgtagtttaaattttcccaacaaatacattggcataaagttatatatatatatatatatatatatatatatatatatatatatatatatatatatatatatggaaatgtccctatcctgtgtgcctctactttgtcctcatttatattcctactgcttttaatttgtgtcttctgtgtttcttttttgatcagttttgcttcaggtctgtcaatatcattagtctttttaaagttccaacttttagctttgttcatccatgcttctgcctgttgtatggatatggcacaatttgtctgttcattcacctgctggtggatgtttacgttgtcccattcttgtttattacagctttatctgaacatttgtttgcaagtctttgc

SEQ ID NO: 477147 - DNA, 3022 bp, Homo sapiens
agaagtactgtgaagctcgcagatggccttgtggactttagcacttcaggtaaagactcctgttatccctattttatagatgagaacactgaggcacagagattataccagctgggctagcgagtgaccgggggaagcctccagatccatgcacacaaccgccaggtttatgacacctctagaaatgtggccagtgcccctggggtctatcagcatctcttgctagaccagcagagccctaaaaaagaagacaacagtctcccagcaaaatgttgcaagcagcacaggctcaggaatggacagactggcaggcaagacacagcaagaaggcagcagtctgcacaccaggaggagagtcctcaccacaactcagccctgccacaccctgatcctggactttcagcctccagagctgtgagaaataaatgcctgctgtttcagcagctcagtctatgatgcaggtgcaacctgcaggggggtcttcccaggagtcactctcgccaagggaggatgctgcccaaagaccctgatgtagggcctctgggtggtagacatcatctggaagctacatgcatctgtgattcgaggcttctcataaaggaaggtccttctcatgtctccacctccttcctcactgcctccaccctcgtcagcagtgtgagaacagacgaatacacccacccttctggtctcttagtgtaccatgggcagagcccccaaatctcagagctagaaggaggtggggagatcctcgtgcacaatgcccctgtgggagcacccggagcctggtcaggtgacctctgcccactccctgggcactatcccccacctcgaactgtggttcccaaggaggacagaaccttctgtagggcactgtctgtggcctgtgccttgcacacacccagcaaacaatcaggatctgaagaatgactaacgtgtagtagcagaagtgccatgacatctgttgttccaagaggtacccaggttagctttttcacttctcaactttctacaccatctcatttctcatcttttctgtcaccaaggcaggccagggcatggaggtggctgggacaaggaggagcagggtcctggggtccctgctcaggctttgtccactcatctagcccactcccctcatgctcccctcagtgcagttgctcccaccagaagcatcttcccagtgggacgaagggtctgggaccaggcattcaggagaagcaccggggttttcctggggatcagccaatgaggggaaacccatgccttctcccttccctgatcccagaacacatgacggggtaggggacctgtgtgggctggaatccaggaactgatgtgccaagagcaaattatgaggacagctgatgagcctggcctggagccagcagtacagtcaaaaccacccccagaaccatgctaaccacaggccggctgacagggtagagtggctcagcaaacagctccacttccagtaccctcaagtcaccagggcctggattctgagcccctatcacctttacaattgtgaggtctctttttttcatcatttaaggcatctctctgtgaccctgagaagtggacaaggcaggcactgtcagccccatttcacagccgaggagactcaggcccagaaaggtgctgggactgcccttgctaccgtcctccgagcccccaatggagggtggtgggcggggctgggggcaactccacccacttcccagcagagtccgtgtggaaggagatatgagagcttggctcaccatacaacgtcccagggacctcagcccaggccatgctcctcagccctcagtagaacagaaaggccactttacctgtcactccactcagagatgttccccactttcagcaggtccctactacccagaaaccagagtcccagcattagcctggaatccaaagccccactctgtgacgtcatccctttataaatatttgctgaactggactctctaatagattgtgttttttctcacgaaatcagcccacagacaaatctgctttgcgaacttgttttcatgaatccagagatgtattttttttgtcccagccaggtcactggatggttttgtgacttcagccaatcatctcccctctctggcctcaggatcctcaactacaaaacaaaaagagtggactggatgatttcagatgtattgccactccatccaaatgctgtgattccagaaaacctgcatccttgccaaagagagccatctgaatgtgactttgttcaggtttccccttctgggctgcctcccctctctggttacctttcccctcctgggctgcctcccctctctggttacctttcccctcctgggctccttctcctctgtgatgatctaagttctctgcttctttcaaacccacaggcagatttcaacagacctgattaatgctaaaaatccaaaacagaaaatagaacccccactgcagatattcacaagagaaaaactggagacaaagctcatcaaaaactgtataacaaagtaagagaataaaaaccatttgggtcaagctcaggaataatgtaaataagctcatatttgaaaaaatacacatagttgagtatttgtgacttctcagccaggaaagagcaaagcgtgagagtgtggtgagtgtatgtgtatatgtatgtgcatatatgtgtatgtgtatatgtgttcatatgtatgtatatacatgtgcatgtgtgtgtacatgcacatttgtatgtgcatatgtatacgtatatgtgcaaacgtgtacacatgggtatgtgtgtttatgtctgtatatgtgcaggtatgcgtatatgtgtgtgtgtgtatatttgtgtatgtatgcaggtgtggatgtgtgtgtgtttaaaaaccttaatagaggaactagataaagctagggcagaaaggccactgcagacagcagtatgggaatgcctggaagcttttctagtgacctagcccttgttcaaaagccagggtagagtttggtcctgttaaggctgcatggtaaatac

SEQ ID NO: 477148 - DNA, 876 bp, Homo sapiens
cacgatcccattttgtaagacatgcacgcgtaagacaccacccactctggcttccctgtgctgcagtggtgtccagttcactgggctcccaattccggccctccacccaatgcctccacccaggcagggcctctaggtggggccgcgggcagctccagcactgctaagttgcaagggaccctccctcatttcatgagcactgtgtgcggcagccctccctctggcttcactccttgcggggctgtgaagcaggaggccaatgtctcttttgcctgcaataaccctccctctgccaaaggcaatagcctctgcttcccagaggccacacagagccagacagggcgctgcccctggggagtggagctggtccagcaggagcccaggggatctgctggggagagggactggggccgagcggggccagatatctcagcatttgccatggtggccagagagctggctgccaccacgctgagagccaggccgcccctcggaccgcgtccccacagccagccaaatccagatggagtcatagaaaggggctgcaggggcgcccagggacgagtctcagagcaggaccacaggggccacttctgcaggaggaccagccctgtgaggtaggcaagtcacaaaacttctttgaacctgagttttcacatgctgtactaccgggttactatttcccggccttaccatccacctcaagggtggttatgaggcgaaggcactttgaaaatgctgaagctcttctctaatgtcagccttactgttatttttcagacttagcagcccctgacaaatggagtattaatcacgatgatggggctccctatccagagtccagctgctgacagctggcactgagtccaagacagc

SEQ ID NO: 477149 - DNA, 693 bp, Homo sapiens
tcgtgttgagaggctcagagagaaggaaggacacctctacactgacgtcagcaagatgcccagtgcatgcctcttctgtgccccaaaacacaactcagttacccccttcccacctcccttccggggccatctgagctcaccatggtcctgcgagcattgccaacgctactccttagtgctgcagtggggcagagcactgatcagccctcgacagcccactgtgggaaagtccccaagccacctgctgctgggggacccattcatccaagcccgaccacccgaggccaggagactgcagcttagcccacctttcccacaatttcggatctgtttctctggccatggccccataggatggctgctggctgaaccgaagttggcagtaaccttttccccaactcagtggctaaagtccaggacactgacaacaccaaatgctgatgaggatgtggagcagcaggaactcccattcattgctggtgggaatgcaaaaccaaacatcactctgaccatacctcccccgcagtcattcatcaattacagcaaagcaccactctggtgcgggatgctgataacgcggaaggctgtcggggtgtaggggccggagaaacatggaaactcactgtactttctgctcaatttgcctttgaacctaaagctgctctaaaaaatgaaatctattttaaatatctt

SEQ ID NO: 477150 - DNA, 618 bp, Homo sapiens
cagcagggcaacagaaacacatccagccatggaagattcaggcgctgattggccaggaagcaggccaagaacagaaccctggagaattccaatggcagcactaggaatgctgatggacggcatggccattggcaacgtccacctaccagaaagcagacagctgcagcagaggaggctgcacattccttgtgttccgggaccacaaggaatggtggccgaaggagaccatcttccctcagcccatcttggagggacgagaaatgccatagtctggatgggtggtgacagctaccaagaggagaggagagcaggggaggccctggggcctgccatggtgaaaagggagggctgtgaggagcctgcctggacctgtgaactgcccggggactcaggagaaaggggttttgcaaatgcagtgacagataagcgttgcatggtattatttttatcttcattgttactaaaagagcatagaggaagcttcctgtttattttcttaccttatgctgatcttgaaacagcaatgaaaatacttctgctacagggaccttaaacaacaccgaaaacttcaaacgagggaagattatttactcccatctcttaccccttttccttttc

SEQ ID NO: 477151 - DNA, 676 bp, Homo sapiens
ttctttttaaaaagctcatgtgagattactgagcagaaaagaagaggcgggacgtgatcatgacagacccctcagcaccagccctgccctttcaggaccccatgtggccccagccccacaccaggaccccagtctcctggtttgcggcgctgggtgctcaggtctcctggtttgtggcgctgggtgctcaggtctcctggtttgcggtgctgggtgctcaggtctcctggctcttgctggtgctgcgccgcttgtcccgcctgccaaagtcagtgacaggtcctcctgcacccgtcctgctgcctgaggccactgtgccgcacctggatgctgcccctatggcccttgggccccccctgccctccccacctcctggctgctgcctagggcggcctgggaaaggtgaagaagccggccctgacctcccaagtccattccatggcttgctgatgggctgggtcacagctctaaacccctcaacctggcctgtcctggagcaggcggctttgtttttcaacatcatactgatcattgtgttcatataaggaaactaccagagaacaggaaggattagagggaacagtaagggaacacctggaaggattagagggaacaaataaatgctgctctgctgctgtgtgacaatctcagaagcaagagtcaacattttcagttt

SEQ ID NO: 477152 - DNA, 705 bp, Homo sapiens
gccttagaacttgcaatgccggccattcgcgtcggggtggggtccccagaagcagaccctgaggtgaggcttcctgtattcttggcttattgggaggcgcaggctcggccagtgaggactgggaagaagaggaggccagcccgggtgagcgtcgtgcagaggccgcggggtgaccgggtccagtcctgcaggggggtctggaacatgttcggatcggacctcagcgcggatccctcccgtcggggtggagggagctgggccttttctgcctcagcggctttaggactgttccaggaagaggtgagcagcggcggccctcgacccagagaagcaggggccacaaggaactgggtgcaggaaggtggtgaagggcccaaaggacgcgtgcgtggcctcaggaagtgccggaagaaagcctgagtctgaatctgagaatttctccaggtttaccttcttgaggggtcgccaaactgttttccaaagcagctgcctcattgtaccttcccattctgtatctgttcatccatacagccatacatgacagtttctccacatccttatcaacacttgttattggcctttttttaaaaaatcatagtcatagctgaatataggatgagacactttttagttttaaaatatctgattctagatgtttttagtatctccagatgcttgcttgagtatatttacttctgttgtgtt

SEQ ID NO: 477153 - DNA, 962 bp, Homo sapiens
aggcctgtaatcctagcactttgggaggccaaggcaggcagatcctttgagtccaggagtttgagactagcctgggtaacatggtcggcagggggatgaagaggagctgcccggtgggaactcaggaagcagcacagcccacagctagggccaggggctgaggggcaggactggaccctgggggcagggtgaggggttctggggtcagcccaaaattggcccacaggcccagcctgtccgtcactcctgaacaaatctgcttctctggaggagcagaaggagagttgggtgcgggatagagggacacaaacactgcggaaggccgcagggacctctgcctaggaaagccaggtattgtccaaggtttctccccatgtgatagtctgaaatatggcctcgtgggaagggaaagacctgaccgtcccccagcccgacacccgtaaaggtctctcgttccaccttacgagaaacacccacagcacaggatttacatacaatttttggacatccaagttcaccacaatacccatattgtctgaaattatgtgccatggccctgaggggagtcatgatccctcccccaaagatggttgtggctgtcaggacacagcaagtacccacaattccctcctggtgaagagtgcctctgtcctacccagcctgtgcctcactcctgagcaaatccgctgtcagcagtgtgaatgcaggagacacccttggtcccccaaagaatctgaggaacctaggggcatccagtcctgggacaaggatctatgtagacatcatacaagtttagcaccacccatagtggagtgctgggctaagcctacttagacagatatcaccctcctcacccagtttcccctgtccttgtgaaaaggaagaaaatgatggttcctggtctgtcttgtgctcaaatctgacccggctcccaaccagctgtggctctggatgagtccctt

SEQ ID NO: 477154 - DNA, 1966 bp, Homo sapiens
gaacagcccgcctcgcctccaggagcatgaattgtaatagaggtagcccctccctgaggacatgcactccctagacatgagcaaacacaaagcagcagtaacttaccgctcctagtccaagtcctaccctagtcctgggttgcagttcttaccagagtggagggtgtgcaggtgctccttccccaaatccctgatagcctgtggagagggcgaggccaaggttgggacccccttcctggtaaatctctctccctcccccaagttcagtttttccctcttcctctctggggcttctgctgagaatgaggccgctcactcggggggtgttgggctgccctttctctgctgggccctgtggatgcagcagtgggcagcaaggagagaggcctctagcagatcatgcaaatgtttctcatctgctgggttctcaccgagcccttgactgcctggatagcagagtatgtggttgcaggaggcggttgtgttcgaggatgtggctgtgtacttcacaaggatagagtggagttgcctggcccccgaccagcaggcactctacagggacgtgatgctggagaactatgggaacctggcctcactaggctttcttgttgccaaaccagcactgatctccctattggagcaaggagaggagccgggggccttgattctgcaggtggctgaacagagcgtggccaaagccagcctgtgcacagattccaggatggaggctgggatcatggagtctcctctgcagagaaagctctccaggcaggcaggactgccgggcaccgtgtgggggtgcctcccctgggggcaccctgtgggggggcaccctgcaccaccccacccgcatggcggtcctgaggacgggtcagataaacccacccacccccgggctcgggagcacagcgcctccccaagggttctgcaggaagacctgggccggcctgtggggagctcagccccccgctacaggtgcgtgtgcggcaaggcgttcaaatacaactcgctgcttctcaggcaccagatcatccacaccggcgccaagcccttccagtgcacagagtgcgggaaggccttcaagcaaagctccatcctgctgcggcaccagctgatccacactgaggagaagccgttccagtgcggcgagtgcgggaaggccttccggcagagcacgcagctggctgcccaccaccgcgtccacacccgcgagcggccctacgcatgcggcgagtgcggcaaggccttcagccgcagctcccggctgctgcagcaccagaagttccacaccggggagaagcccttcgcgtgcacagagtgcggcaaggcgttctgccgcaggttcaccctcaacgagcacggccgcatccacagcggggagcggccctaccggtgcctgcggtgtgggcagcgcttcatccgagggtcctcgctcctgaagcaccaccggctgcacgcgcaggagggtgcccaggacggcggcgcggggcagggcgccctgctcggagctgcgcagaggccccaggcgggggacccgccccacgagtgcccggtgtgcgggaggccgttccgacacaactccctgctgctgctgcacctgcgcctacacacgggcgagaagccgttcgagtgcgcggagtgcggcaaggccttcggtcgcaagtccaacctcactctgcaccagaagatccacaccaaggagaagcccttcgcgtgcaccgagtgcggcaaggcgttccgcaggagctacacgctgaacgagcactaccggctccacagcggcgagaggccataccggtgccgcgcctgcgggagggcctgcagccggctgtccaccctcatccagcaccagaaggtgcacggccgcgagcccggggaggacacagagggcaggcgggcgccctgttgggcttcctgatgacggggacgacaggccgaggattcacgctggaagcccacccaagcc

SEQ ID NO: 477155 - DNA, 667 bp, Homo sapiens
gtctcgcccaaccccatggggcagctgcctgagacatgtcatgaggcagcgccagaagggggctggcacccagggattcctggggtgctggtgtgtgtcctttcaggaggtggtaacatttggcgatgtggctgtgcacttctctcgggaggagtggcagtgtctggaccctggccagagggccctctacagggaagtgatgctggagaaccacagcagtgtggctggactaggtgaggctgcaccttggggccccttcccctgcatcatcagtcagcacccacccagccaggcctccatcagaggctgggtctcctctctgaactccaccaccgccacaggcagccactgcggtgctctttatgtccatgcctgtgtcctcacaagctgtatactgtcgttggattgcaacttgagaacaagaatcctgggcagtagccgggacatggtgggggaggctgaagggttgtccctgagcatccccaacatggagctcggaagtctgggccatgggcaggaaagcacgaaggtcagggccagcctggggaaccaagagctgtgccacgatcccttccacctggggcagctgcccacatgcccgccactgggttccatcacctgagactcctggcaggtgcctctctgagtctttgtcctgtgctggaaa

SEQ ID NO: 477156 - DNA, 905 bp, Homo sapiens
taagcggtcactgtttttctgctcccttctgggcaaagtggacggcagggcttggccgatggaccggccatgagggaaagtttgttccagaagcagctcaggcacccgaaaaaccctttctccagagtggacactgggccccatttacaggagttaaggatgaggagcaatagttctgaggcctctgggccgtggcttcggactgccacccggtggcagcattcccgctttacggctttgccattcgcgggtccccggagccttactgcaagccagggaggtgggcagccgacacgcggcgttctagcttcccagagcggcccggacggcgcctcggacccagacagtcggctgacgtcacttccggatcggttccgattggcggggagggagggccgaacgggcgaggttgggctgccgtgctgctcggcggcgctgagaccctcccctgcgcgttgcccctgtgcccggtcctctcgcggtgctgcaggcgtgggtccgtcccgccatcagcggcacttcctgttcgagggaccccccggacaaggccccgagtacggactgcgcctcgccgctctctgccagccctggggtcgctcctcacggggctccttccgctctcgagcccctgacaactcccttgccccacgcggggtcccctggactcctgccgcacagagcggcttctgcgtcccgatgcgctccagaccccttggtcccagcggcccgaggcttcccatcccggctccctcccacgctcctctcctgtcagcttttcaggggcggggctcacctttctaaggtacttcaataaagttttataatgttgttcattacatacatatctttttttaagacttaatgtactgtatagtttttgtagctattgtgaatggtcagttttc

SEQ ID NO: 477157 - DNA, 688 bp, Homo sapiens
gaatatttcggttaagtgggtggagtcgtggtctctgctgtccatgaggcagaggtggttgaggtgacatgcagccaattatggcttgcccccaaccccctgggcccagctgctggggagagacccctgctgaccacctttccagggtccagctcaggccgtgcccctccacctgcaaccatgatgccatggtggcttcttttgtggtggcctctttcgagggggtgcagggaggctgcagagctgaggcctcaagatggacagggctgtgggccagaggcctggtgagaaggtcttgggcacacgtgcccttcatgctgaaggaaatgcagggtcaccagctcctaagacagcttgttacctggggccgctgcagcagtcagcctctgtggccctcagccaggggcagctcagatattctagcactgaccattatcttcttgatagacaggtttttcagtgtccacactcagggttatctcccagcaggagcaggggaaaatgccatgggtcattgctctgccagggcctccctgcacagtttgcatgctgcttgcatgcaggcattcttctaggtgctggggttaagtataagcaaaaccaagtccttgtcttcagggagtgtacattttggtttgtggagaacatcgtagtttgtggaagaattatttatcctgcctgatgtcct

SEQ ID NO: 477158 - DNA, 689 bp, Homo sapiens
agctacagacatttgtatatgtgacttgctcctccttgccttccaccatgattgtgaggcctctccagccatgtggaactgtatgtaacagcagaggttggaacagtttggagggttcagaagaagacaggaaaatgtgggacaatttggaacctcctagagacttactgaatggctttgaccaaaatgctgaaaatgatatggacaatgaaatccaggctgaagtcatctcagatggagatgaggaatttcttgggaactggagcaaagggccaagaaggcacttgcagtttcctggctctaatacttgtatatgtgaaaagcaggtgcaactagaaggcaaaacacttagatctcccaaaatcaaggattccattttacacagaatcctgcgtcccccaaaagagggcaatgccacgggatgggatagagtgatgcttccacagtgcacctcacagcaaagacattccctgagtctgagtggccgatcaccaatcagcccatcccccacaggaggcttatctctcagtgccatctccaaaactgcagccctcaccagggacttgtcaaccaccatacatccaaaggtcctggttatctcgcagtataaaataattcccggtatcccccaaagctaaagggatcaggaaatcaatgccaaagacagcagaactttacacttgagagaa

SEQ ID NO: 477159 - DNA, 676 bp, Homo sapiens
tcatcagttaaggcaggaacaggccattttcacttcttttgtggtggaatgtcatcagttaaggcaggaaccggccatctggatgtgagtatgggaggaacacgaaagtggacaaggagcgtgaacattgaagcacagcaccacgggggtggggggaggcggtttaggcctccggatgactgtgggcagccctggataatatccagccttccacaagaagctggcagagcagactgttccctgactcctccaaggaaaggagattccctttcacgatctgctaaaaatgggattctgagaaagaatttgtgcgagggaatgaaaatgtggacccttcttctcactctgctctgctctcctggggatgacccatggatggagctgggtcacacttttccctcatttcccaggtctcctggagtttcactacaggaagcaatcaaagttggtcgatattgggaacaatccacactcccctgcaaagtgacagctttaagaataatgtgtgtagctgcagccgcgtatgagagtaactgttgctaaatatatttggtgtcattctctgtcagatctttaatttttgccaacctagtgagggtaaaatgacatcttgtaatatcattttgcatgtctgtgattaataatgacctttgcccctcttttcatacaggttggt

SEQ ID NO: 477160 - DNA, 1716 bp, Homo sapiens
cccgagtacgtccacggtcagccttccggtaaccttgtgcactcagaggaatccagggtaacaatggggcaaactgaaaaaccatttcaaacaggagaagatagcgtttcagtttctgatgcccctgaaagctgtgtaatagattgtgaagaagagacaggaacagagttcaagaaaggaatggaaagttcacattataaaaatgtagtagagtctgtaatggctcagtcaatgcaaaatgttgactataatcaattacaggaggtaatatatcctgaatcatcaaaattgggggaaggaggtccagaattattcgggccatcagagtttagaccacgatggccaccaactccttctcctgtggttcagatgcctgtgacattacaacctcaaatgccaatacagacacagtatctacaatatcagctggttgaaaataaaacccaaccactggtagtttatcaacactggccgccagccgaatttcaatgggatcctgtgccaaatagtagggcactatatcaacaacccacggcgatggtgtttgatcctacagtaccagctagtggacaagatagtgcactgcatgagaccgttgatacagccagaaaacagggagatcttgaggcatggcagtatccggtaatgttacaaccgataccggccgggaaagggccaggaaagggagtcaagcaggagcgtctgtccgaacggaggctagaaacaagagacaaattaattgacttttacatgtttctgcagacagaggttgcaaacacaggcctgacaatagcatctgataagattcagacctccactccttttaattatttgggaatgcaggtagaggaaagaaaaattaaaccacaaaaaatagaaataagaaaagacacattaagaacattaaatgactttcaaaaattgctaggagatattaattggattgggccaactctaggcattcctacttatgccatgtcaaatttgttttctatcttgagaggggatccagacttgaatggtaaaagaacaataactccagaggcaactaaagaaattgaattagttgaagaaaaaattaattcagcacaagtaaatagaatagatcacttagccccactccaatttttgatttttgctactgcacattctccaacaggcattattgttcaaaatacagatcttgtggagtggtcattccttcctcacagtacagttaagacttttacattgtacttagatcaaatggctacattaattggtcagacaagactacgaatagtaaaattgtgtggaagtgacccagataaaatcattgttcctttaaacaaggaacaggttagacaagcctttatcaattctgctgcatggcagattggtctagctgattttgtgggaattattgataatcattacccagaaacaaaaatcttccagtttttaaaattgactacttggattttacctaaaattaccagacaaaaacctttagaaaatgctctgacagtgtttactgatggtttcagcaatggaaaagtggcttacactgggccaaaagaatgagtcattgaaactcaatatcactcagctcaaagagcagaattggttgctgtcacttcagtgttacaagattttaatcagcctattaacattgtttcagattctgcatatatagtacaggctacaaaggctacaaagctctaatcaaatatagta

SEQ ID NO: 477161 - DNA, 1046 bp, Homo sapiens
ggcatctgcatctgggaccgacctcctgggctggctgatcaaagaggaagcagcagcaatgtctgctgtgggggctgcaactccatacctgcatcatcctggtgatagtcacagtggccgagtgagtttcttgggggcccagcttcctccagaggtggcagcaatggcccggctactaggggacctagacaggagcacgttcagaaagttgctgaagtttgtggtcagcagcctgcagggggaggactgccgagaggctgtgcagcgtcttggggtcagcgccaacctgccggaggagcagctgggtgccctgctggcaggcatgcacacactgctccagcaggccctccgtctgccccccaccagcctgaagcctgacaccttcagggaccagctccaggagctctgcatcccccaagacctggtcggggacttggccagcgtggtatttgggagccagcggcccctccttgattctgtggcccagcagcagggggcctggctgccgcatgttgctgactttcggtggcgggtggatgtagcaatctccaccagtgccctggctcgctccctgcagccgagcgtcctgatgcagctgaagctttcagatgggtcagcataccgctttgaggtccccacagccaagttccaggagctgcggtacagcgtggccctggtcctaaaggagatggcagatctggagaagaggtgtgagcgcagactgcaggactgacccctcacttgaccagtcccattcagatccggcttggacaggcacctgagatggtgccaaagtgcagctgactcttcccacgacagccctgcccttcccatgaggcaggctcttcagtgagtgtttgaacgtaattatgtagttttctgtttaattgaaaaagagagctatgcctttttttctttttggaagtaaagcagctaaaaacatgtttctatagctgcttagcaaagcctgtgtggagcccagagcatggacctgccctcggtcctcaggctgacctctcgccgtctctcattgggaatctgtgttt

SEQ ID NO: 477162 - DNA, 3515 bp, Homo sapiens
aagtaagcgttagtgtactgtctattagatggagcaatgggaagttcagctaggtccttggtgacggcctgtccgaataggtgggggctgtcccagaacccctgtgggagtatggtccatgttagttgggtggacatgtgggtattaggatctgaccaagagaaagcaaaaatactttgggaagccgaatttaaggaaatagtgaaaaaggtgtcctttaaatccagtacagggaagtgtgtggtagaagagggactatgggagagtggagtatgtgggatgagagtggagtgttggatgaattggtattaccacctggttaacaactcagagatcctggaccaagtggtccaacttacagcgggtccagtgggtccccagactcatcctgtggtcattttccaagtgccaggatgcataattggcatagacatacttagcagctggcagaacccccacattggctccttgactggtaaaggctattatggttggaaacgccaaatggaagccattagagctggctgtacctagaaaagtagtaaatcaaaaacaatattgaatccctggagggaacatggagattagtgctactatcaaggacttgaaggacacaggggtggtgattcccaccatctccctgttcaactctcccatttggcctgtgcagaagacagatggatcttggaggatgacagtggattatgatgagcttaactaagtagtgactccaattgcagctgccgtaccagatgtggtttcattgctggagcaaatcaacacatctcctggtgttgggaacaggccccccaaaatctggccataaactggccccaaaactggccataaacaaaatctctgtagcactgtgacattttcatgatggccataacgcccacgctggaaggttgcaggtttacaggaatgagggcaaggaatacctggcccacccagggcggaaaaccgcttaaaggcattcttaaaccacaaacaatagcatgagcgatctgtgccttaaggacatgctcctgctgcagttaactagcccaacctattcctttaacttggcccatcccttcatttctcataagggatacttttagttaatttaataactatagaaacaatgctaatgactggcttgctgttaataaatacatgggtaaatctccggttggggctctcagctctgaaggctgtgagacccctgattttccacctcacacctctatatttctgtgtgtatgtctttaattcctctagtgctgctgggttagggtctccctgactgaactggtctcggcaagtgacgtccattgtgggggctcgaatccaggttgaagggtcactggagcaacggagaatgtggaactaagctggaggacacccaagtactcttaaagccatccctgtggtgagtaaggggagctcagaagcatcagggtaacagtgggacaaatgtggggtctggtgcgttctcccttggaactttttcacactgatgatgaggaggaaggagagtaaaacgaagtaacagaagaggttacagagcaggtttatttgccaatttgccagctaaagctcaagcggcaaaggagggagaggttcatccctacccttctgcaccccctccttattattttgaagaaaaagaccctccagatctttcttttccagaggacattgggtgaaaagtagttgccccagtgactgagcaatgccttgagcaactgctcttagttctattcaggcaggaattcagcaagctagatgagagggcgatttagaggcttggcaattccctgttagaatacaccccccagatcaacagggaaatattatagttacatttgagccttttccttttaaattatttaaagaatttaaacaagctgttaatcagtatggaccaggttctccttttgtaatgggactgttaaagaatgttgctgtttccagttggatgattcctactgactgggatgctcttactcgagcttgtctaactcctgctcagttcttacaatttaaaacttggtgggcagatgaagcttccattcaggctgctcgcaatgcccaggcccaaattaatataactgaagactaacttttgggggttggcggctgggctggtttagatgcacaagtggtcatgcaggatgatgccatagaacaacttagaggagtgtgcattagagcttgggaaaaaaatcacttcatgtggagaacaatacccttcctttagtgcagtaaaacagggaccaaaaaaaccatacatggattttatagctcggttacaggagtctcttaaaaaggtaactgcagattcgactgctcaggatatagtgttgcacttattagctttcaacaatgctaatcccgactgcctggcagctctgcgacctatcagagggaaagcacatttagttgattataccaaggcctgtgatggtattggaattaatctgcataaggctactctgctagcacaggcaatggcaggactaagagtggataaaggaaatattctatttcctggagcttgttttaactgtgggaagcatggtcatactaaaaaagaatgtagaaaaaatcagcgagttatgctgccagataggggaaaagagaaaactgttgagcctgaaatatgtccaaaatgtaaaaaaggaaaacactgggctagtaagtgtcactctaagtttgataaagatggtaacccgatttcgggaaacgccatgaggggcccatcccaggccccattctaaaccggggcatttccagctcaggccattccctcacccctgtacaatgtctgtcctctgccacagccagtagtgccacagttgatttatgctgcacaaaagctgtgagccttctgcctgggggacccccacaaaaggtcccaacaggagtctgtggacccttgccagcagggatgataggattacttctaggcaggtctagcttaaatttaaaaggggtacaaatacatacaggagtcattgattcagattacaatggggaaattcaaattgttatatctacttctgttccctggaaagcagagccaggagagtgcatagcacagctcctgattgtgccatatgtgggaatgggaaaaagtgaagttacatgaacaggaggatttggaagcacaaataaactaggcaaagcagcttatcgggtaaagcaagttactgataaacgtcctacctgtgaaataactattcagggaaagaaatttaaaggtttggtagatacaggagtggacatttcaatcatttctgtacagcagtggccgtccacgtggccaattcaacccacccaatttaacatagttggaattggtaaagcccctgaagtatatcaaagtagttatattttgcattgtgtagggcctgatggacaacctggtactatccaaccagttataacttctgtacctataaatttatgggggagagatttattacaacaatggggagcacaagttctaattccagaacaattatata

SEQ ID NO: 477163 - DNA, 787 bp, Homo sapiens
gtgagatccgatggttttaaaaatgggagtttgcctgctcaagctctcctttttgcctgctgccatccatgtaagatgtgacttgctcctccttgccttccaccatgattgtgaggcctctccagccatgtggaactttgctgaaaagatacccaaaaatgtggaagcaactttggaaccaggtaacagcagaggttggaacagtttggagggttcagaagaagacaggaaaatgtgggacaatttggaacctcctagagacttactgaatggctttgaccaaaatgctgaaaatgatatggacaatgaaatccaggctgaagtcatctcagatggagatgaggaatttcttgggaactggagcaaagggccaagaaggcacttgcagtttcctggctctaatacttgtatatgtgaaaagcaggtgcaactagaaggcaaaacacttagatctcccaaaatcaaggattccattttacacagaatcctgcgtcccccaaaagagggcaatgccacgggatgggatagagtgatgcttccacagtgcacctcacagcaaagacattccctgagtctgagtggccgatcaccaatcagcccatcccccacaggaggcttatctctcagtgccatctccaaaactgcagccctcaccagggacttgtcaaccaccatacatccaaaggtcctggttatctcgcagtataaaataattcccggtatcccccaaagctaaagggatcaggaaatcaatgccaaagacagcagaactttacacttgagagaa

SEQ ID NO: 477164 - DNA, 2804 bp, Homo sapiens
tgagatttgggtggggacatagatccaaaccatatcaacttctatattttcaacatacaatgggtttttcaggacataaccccattaactttgaatatgttatccactgtcttctgacctccattagttctgataagaagtctgctgtttatcttattggggcacccttgtacatgataagttgtttttctcttgctttcaagattttctccttgtcattaacatttaacgtttttaccatgatgtttctgagtgttggctgtgattctaggattgaaaaagaggaaatgattccaaagcaggacatttctgaagaattggaatcccagagagcaaaatcagaagatcatgtaaggaatatttttaaggaaactgaagagatgagtaaaactgagggaaagttagagaattgctggagaaaatatgcagtagaaggagttaagaactcattctcccagaagagcaatttcagagaaattaccatgaggtatgtgaaaaccctctctagagagaatggccagaagttcaatgctgttggagaaaactgcattacagactcaaatcctgccaaacatcttagagggtctagagaggagagtctccatccaagtgtgtcaagtgtagaaaacttgcaacaacatgaggacctcattaacctccagagtttccaattaggagaaagagcctatcagacagatgtgttagtgaaagtgcccagacagagctcagttcttagtgagaatcagaggatgaataatccagagagatggtttgagagtactgggtgtggaaaaacttacaatcagaacagagcttttaaccagcaccagagatttcatagtggagagaagacctatgagcacaatgaatgtggaaaagctttcagttggccctctatcctcagtaaacatcagagaatccacactggtaagaaactctacacatgtgaggattgtggcaaatctttcagtgttcactcatactttattcagcattgtaaaattcacactagagaaaaaccctatgagtgtattaaatgtgggaaagcttttagtacacattcatcttatgttcaacatctaaaaattcatacaggagagaaacatcatgagtgtaatcagtgtgggaaagcctttagtcatagctctaatctaattcatcatcagagaattcatagtggagagaaaccttacaagtgcaaagaatgtgggaaagccttcaacagacaatcaaaccttattcagcatcagagaattcattctggagagaaaccttatgactgtaaggagtgtggcaaagccttcagtacacaattatttctcattcagcatcagagaattcatacaggagaaaagccctatgaatgtaatgaatgtgcaaaatcctttagcctgaaccgaactcttactgtccatcagagaattcacactggagagaaaccttataggtgtaatgaatgtgggaaatcctttagtcaatgctcacaagttattcaacataagagaattcacactggagagaaaccttatatctgcaatgagtgtggaaaatcatttggagagaaaccctatgaatgtagtgagtgtggaaaagctttcagccagagttttaatcttattcaccatcaaagaacacacaatggtgagaagtcctatgaatgtaatgaatgtgataaagccttcagtttgctttcttcccttgttcaacatcagagaatacataatggagacaaaccctatgagtgtcacaaatgtgggaaggcctttagccaggggtcacaccttattcagcatcagaggagtcacattggtgagaaaccctatgagtgtaatgagtgtgggaaaacctttgggcagatatccaccctaattaagcatgagagaacacacaatggagagaagccctatgagtgcagtgactgtgggaaggccttcagccagagtgcacaccttatccaccatcaaagaattcacactggagagaatccctatgagtgcagtgaatgtgggaaggccttcaatgtttgttcctctctcattcagcatcacagaattcatactggtgagaaaccttatgaatgtagtgactgtggcaaggcgttcagtcagcattcacaatttatccaacatcagagaattcacactggagagaaaccctacatgtgcaatgagtgtgagaaatccttcagtgcatgcttatcccttatccaacacaagagaattcacactggagagaaaccctatgtatgtgccaaatgtggaaaatccttctgacaaagctctcaccttattcaacatcagagaattcacagtggggagcaacctcatacgtgtaatcgatgtgaaaaaaccttcagttagagaataactcttagtagtcatgagaaaatccatacaattcacattagagagcaagtctatgaatgtaatcctgcatacttttaagaccactgactgagctggtcggaaagatgccacaaggagctgaccacaccaaagaatgcagtttccacgtcctgatgatgtcatcccctttgccctggccaatcaactacccccattttccagcccctcgccctccatgatccccttaaaaaccccagatggatttgagggtctcctcccatctccttacttggtgccctgcaataattaaactctctgctgcatccctgctgtctcagtgtcattgggctgttactgtgcagccagcatacaaacctgttggtcctataacaggcttaatcagtgaacaagtgacaactggtgcccacccccacccctgcccactctggtgctgccaat

SEQ ID NO: 477165 - DNA, 1495 bp, Homo sapiens
atccaaggttagaactcagtcctattcgagtccagagcccatgcgcctaatagcagcattacatgcctgccacatgcgtttaggagtgaaggcagagtacactaagaggtgtgcctcagctggagactgtgaagacatcaatgagcttatgttcagctgccagtcagaaactctgcccacacctcaggacaagctcagagacctagtgatggctgtcatgcagctccttcttggtgggctccaaggctgcatcaagatcttgtcattccacatcgtggtttcctttgaggatgtggctgtacccctctcccaggaggagtgggactgtctgatccctgctcagaggggcctctacaaggatgtgatgatggggacctatgggaacctactctcattagtaggtgaatggttaagcaaactgtggtacatccataccatgggatacgactcaacaatcaaaaggaactgcccagacttcaccacgatgcaatatatgcatgtaagaaatctgcacttataccccctaaatatataaaacatttttaaaagaaaaaaaggaagaagatacatgcaacaacttggatggatttcaagggaattatgctgaatgaaaaaaagtcaacctcataagattacattctatatgattccattcatatgacattcttgaaatgacaaaattacaaagatggaagacagaacagtggtagccacaggttggggtgaggggataagaaagggatgtggctgtggctgtaaaagcgcagcacaagggatccatgtgatagaactgttctgtctcttgtgatggtggtcacatgaatctacacatgataatactgcatataattgtctaaaatgacattttcttcaagagttatctacagtttaaagctcacttttatgaagtgtcacatccatcaccattttaagagacataaaatcatgaaaagatatcaccagaagctacgtaaacatttcagctaagggtaaagagaaagttaagagtgttttcacaaggaaattgaaagaaggcaatccgaatgaagtcaacttggtcacacaaaaatcttggtaaaagaactagaatggaagcccaaactgctgagcaagtgggagaagaaaagaaaacttggttcaaacagatcacacaagggaacccaggacaaatgctgactttggcattatctaggtaacccttttttttgtcataggtgactctaataatagacctgttgttgcaaaaccagtcaaaatcctaccaaattaaaaagaagtccctcattgacttgttgggtgtaggtggtaccccatgtcctcgcacaccaaaagagatcatttctggcaagaaagctcctacatgccttgatggtgctgctggtaggatgccttaggccaggcccatcccagcgatgttctgctggctgtggtaaaaggtgggaggagaatatgccttattcattactcaatcaacttcttagccttgaagaagcat

SEQ ID NO: 477166 - DNA, 850 bp, Homo sapiens
tctctcgttccaccttatgagaaacacccacaggtgtggaggggcaacccacccctacagtataaaagctttcctatgcaagagggctgatgttataacagtagattattatgctacagtgtattttcaccagaagttggaagagtttggagacttagaagaagacaagaagatgagggaaagtttggaacttcctagagactggttgaatggttatgaccaaaatgatggtagtgatatagacagtgaaggccaggctgacgaggtctcagatgaaaataggaacttattggaaactggatctgtgggttgtgaagaccatgggaaaagtgtggtattggggccagataacactgtccctcatggcacagtcactcatggcggcttcccttgtctaggggaggaagttccccaacttcttgcacttcctgggagtattgatgagaaaaacaaaatgagaacatctttcctaattttaactcttccactttctggtcatcgatccttactggcctggttttgtcatccgtaagttggttttttattctgtatttagaagctctattattaatctgtatgcacataataaattttgcatttaaaaaaataagtggccaaatagtaaacaatttaggttttgggtgtcatactgtctctgtcacaacccacatctgtctttgtagctctaaagtagacaaaaacaatatgtaatcaaataaggatggctgcattcataaaacttcatttaaaacagaaacaggtacaacaattaactcaagatggattaaagacagaaatgtaaaacctagaaccataaaaaccctagaagaaaacttaggcaataccgttt

SEQ ID NO: 477167 - DNA, 470 bp, Homo sapiens
tgcagctgatgagcatacaccccaccatgctgctgctgccgctgctgctaggacatatgaatgaggatgcaccctgctgccactgcgttggggaagttgtcctggataatatcctgaagagtgtttttcaacttggttccgttctccccatcactttcagcaaatgcagaagaaatgaaatcataacaaccactctcttggactacaccacaataaaattagaaatcaagaataagaaattcacccaaaaccatacaattacctgtaaatcaaataacctgctcctgaatgacttttgcataaataatgaaattaaggcagaaataaagatgttgtttgaaactagccagaagaaaaataccacataccagaatctctgtgacacagctaaggcagtgttaagaggggaatttatagcactaaataccacaccaaaaagttagaaagatctcaatttaacaatgtaacat

SEQ ID NO: 477168 - DNA, 736 bp, Homo sapiens
cacctctgtaggctgggaagtccaagattgatgtgcctatatctggtgagggactccttgctgtgtcataagacaacagaagagcacactgggtatggcagactgtggccagattgcctcttcaggccagaccctgaccctccttcctcactggtgtggcaatactgctgcttcttgtaaagagaaggctccatctttggaccagtgtgagtgggtgtttgttgtggtggtgttggctggttgggacagcctgacctcaggccctgaggctagggcagctggcactgggctgcctgttgggctccctgtgggcttgagcggtgcctgtgcaaaaactgcaggagtctctctgtgtcactttagaggcccagagaatttggggggttctcccatggccaggattgtgagggtccatgtgggaagtgtggatcccctggggactctcactcattcaaccttttcccgtgttagagagcttctcctggctccatgccagtcctgggtgtgcagctacctggctttgctcctctctgttctctgtgaggcccctggcttccttggtggatccagaggtgatttctaattttcttgaagaactactctttactagccactttgattcttcactgtgagagcagtgcacattaactgcttctagtcagctaccttgaacctcctctattgttttcaagtgaaacttcttttttattgcatactgtttcacagatttaatatc

SEQ ID NO: 477169 - DNA, 749 bp, Homo sapiens
aggagtcagcttaaatcgggctccgtgacagccaacgcagtgaccctcgccccttccttggcagcacatcatgcttgtgcagcggcagatgtctgtgatagaagaggacctggaagaattccagctcgctctgaaacactacgtggagagtgctttctccaaagtggatgcttgcggcagcccacactctgatttaaaatcatctctggtagatgaggcgccaactctaggacatctagctgtgattgctcccttggcagtacgccctccaatgagtgttaagtgtcacaggaagtatgaagatttcaaggagaaagacacaggctgtttcggatgtgccttctggctcttcaccagatggcccacagtcaggaagaaaaagggagaaccaacaagctctcctctcatgtctgatcctgaagatgcaaatgttttcccagagtccctgcttcccagcatacttccccttgcatctcactggccagaattcaagtcacatggtcattgctggccactgggaaggctaggaaacaagtgtccagcagagaggagtaaggttatcagggtattctcagtccaacactgagtggtacattgggtgtattgcaaactgaacagtggcagagtcatgttagtaagaggagagtactatttggggaggcaatggacagtgtagccacatgacccccaaagtacctgtgaagaaaatctgaagttgagctaaaaacaatatttgctgcatcatacct

SEQ ID NO: 477170 - DNA, 1553 bp, Homo sapiens
tgggaacccacttcttgcatcaatggctgaataggaacagctccagtatgcagctcccagcatgatcgatgcagaagacgggtgatttctgcatttccaactgaggtacctggttcatctcattgggatttgctggacagtggatgcagcccatggagggtgagctgaagcagggcagggcatcgcctcacccgggaagcccaaggggttgggggatttccttttcctggccaagggaagttttccacatagcacctggaaaactgggacattcccacccaaatactgtgcttttctaacggtcttagcaaatggcacaccagattatatcctgcacctggctcggaggatcccaagcccacagagccttgcttactgctagcgcagcagtctgagattgacctgcgaggcagcagcctggcagggagaggggcatccgccattactgaggcttgagtaggtaaaaaaaagtggccggagaagttcaaactgggcggagcccactgcagcttagcaaggccagctgcctccgtagtctccacctctgggggcggggcacagctgaacaaaaagcagcagaaacttctgcagacttaaacatcccagtctgacagctctgaagagaacagtggttctcccagcacagtgtttgagctcagagaacggacagactgcctcctcaagtgggtccctgacccccatgtagcttaactgggagacatcttcccgtaggggccaactgatacctcatacatgagggtgcccctctgggacaaagcttccgggggaaggatgaggcagcaatatttgctattctgcaatatttgctgttcttcagtctccgctggtgatacccaggcaaccagggtctggggtggacctccagcaaactccaacagacctgcagttgagggacctgactgttacaaggaaaactaacaaacagaaaggaatagcatcaacatcaacaaaaaggacatccacaccaaaaccccatctgtaggtcaccaacatcaaagaccaaaggtagataaaaccacaaagatggggataaaccagagcagaaaagctgaaaattgtaaaagccagagagcctcttctcctccaaaggatcacagctccttgccagcaatggaacaaagctggacggagaatgactttgatgagctgacagaagtcggcttcagaaggttggtaataacaaacttctccgagctaaaggaggatgttcaaacccattgcaaggaagctaaaaaccttgaaaaaagattagacaaatggctaactagaataaacagtgtagagaagaccttaaatgacctgatggagctgaaaaccacggcacgagaactacgtgatgcatgtacaagcttcaatagccgatttgaacaagcagaagaaagggtatcagtgatagaagatcaaattaatgaaataaagcaacaagagaagtttagagaaaaaaagtaaaaggaaatgaacaaagcctccaggaaatatgagactatgtgaaaagaccaaatctacttttgattggtgtacctgaaagtgac

SEQ ID NO: 477171 - DNA, 1058 bp, Homo sapiens
tggaaacctaacaacaggtcctaacccaggccatggacaggccaaccgtatgggtgtggatgtaggacatctgcatgtttctgcgaagagcacatgtggacaatcagaaagtcccctctgctgggagaaggtcacggtccaagatgacagctcagctttgccctctcaccctggtgttgcaagtggattctgcgctgcttctgaattacccaggtgggctgcccgggttctgcaaagcactgcaatatcgctcagagcaggtgctcttcagacctctggttgcgattactctcagcgcagggtcaccaccacccagagggacacacttggagcaaacttagtgaagggcgcttgccttaatcagctgcaaaatccgtgtgcatccaataggatttacctgcagaccagcccctcccagaaaatagtcccaacgtcgccagtccactctgatcttagcccctcactgagctccggctgtccctgtaatcctgaccgtgctttcacgcttttcatggctgaagagtcctgcaaaatatggaaacccagagaaaaatggttaacaaacactgactatgattttcctgattgcacagctcaagagattgagttcaaccacttaaactagctcagatgtggcacctcttaatcaaaccctgtctttctttagccctttcttttctctttttcttccaataaaagagtacttaacattggatcttttatcttgatcagcaaagttttatatttaacttttttcccccaagacgttttagaggtactttatttttttctattttctagagtgtgaaacatggtatcttaaaatttaccttaaaatttatcaacatattttgttttggattttcacaacatacttattttagatcctttgctttcactttaaaaaataaaacaatgtcaacacttcatactgaaacaagagggcatattacagaaaatgtcttctatttctcctctgtaattgatttctaaaattactttgttactaaatgtgctatcttaagctgactaccagcttttgcaggcatttcctggaa

SEQ ID NO: 477172 - DNA, 790 bp, Homo sapiens
cggagaaattcacagaatcttgggaaaagagagcttgggaaaatcctgaagaagaggtgacatgtttatgttcttccacgcgtctgataaggaaaaccagcagacattccagaatgtacaaaacacgggtgaggacaggtgcaaggaccacagctggaaaccagcgaacacaacaaaccgcagctgtctgggccatgccacgctggtgtgggccagaggggaaaccaagggcgtgtactccaacatgaaaacggagcatgcatgtgagctgagtagtgacatgcaacatgcatgtccattgatccttgctgctcattcacatacagtgttcgcgatgccccctggacacagaattccagtggacccaccacgtgtggggattcaggggagactcaaagcaaatacaaggaaacatgaaacagagttccttgctaaaatgaccttggaagacatgatgagagatcagaatgctagggcaagaacaggagatgagtctacaaacctggggcaaaactggaagagttctgagggccagctctgccacgtagtggatttgtggtcttgggacctattgctagcaccattttatatattaggaaaatatgacccaggaaatcctgaaccatccaagtacgtacccaatgttaagtgtaaagccaactcagttccagtgaggttttctggctcgtaatctggtgatatttagctacttagatactgtttagatattcagattctcagtgagtgactcacaagattatgtctgcgaactgtggctagatttcatttt

SEQ ID NO: 477173 - DNA, 693 bp, Homo sapiens
actccccagacaggagtgccatccgttatggccagtgttctacgatcctgtatctacagtgcctagaatatggcagatgcttaccaaaaaatacgtttttccatctatggaaatgtgttcatattcatctccttttacctcaaaatagacccaattgaagtggcaacttctggatctggcctgtctcagatatgtctttatcagcagtgtgaaaatggactaatacagtggaaaaaggcgaggtggggacaggtaaatcaggcttttgactttaagacttcaagtgcttttcagatgagagatgtgttaaggggaaggtcttccatcccagagcaatcctttaatcatcctcatacaccttcccaaaaggtgtgccatgaccacagggtggccaggaaggctccctctagaactggtgaaaatgggagccctttgggagcaatatcctctgaacctgttataccctctagggtatgaatggagttttgacacaacaggtattgacataaacctgattctcctcttctttgcatggaaaagctgtgctctttgtagccagaggagcagaattctttactacccctttcaaaatattcttgcctagatatgagaggatcatctcatcttcactaaaaagttaaagtgagtagcaaacttagtgttcaggcttatatggggaatataaaatagcct

SEQ ID NO: 477174 - DNA, 727 bp, Homo sapiens
aacaaagacccgcacgtaacagtgggaaatatgcactgctgtttagcaaaggggtcaaacccatttggatggaattccaggctcagcaggctaacaatggcaggaaactgggccctcaagccggctgcaccggggggctgttgagcgatagcttgttgaaagaggcggccctggggcagtgtgatagtgtcatggcagaattttacacgtttcatggcctgcagataagaagtgaagaatattcccagaagcagccacaaacctttccttccagaacattgtccagaactgaaacatggaccaatattaaaacagtcactgactgtacttccaatggagccctggacttcttgggccagcaagtaaactatcagaaccactctcagctgccccagctaacaccactagatccagaatcgtgggtgagtgcacagtgcacccacgtttaccctgatcaaagtgatgttccttcctcttgaccaatagccttcaggatgcctttcctcacatattcccacatctttgccaatataattaagtcctgtttttgtttacttatttatttattttagtggtgtttttaacatttactatagacttacagccaagttgtaaaaatagtccacagagctttcatgtactcacctcccagctcttccacaactgtaattgtagtgcaattgacagaccttattcaaatcttgccagttgtcacactaatgttttt

SEQ ID NO: 477175 - DNA, 519 bp, Homo sapiens
tggaaaagagctgaggttgcggtgggagagaatggatggagtgcactggaattgggtattttccttctttcacatggaagaatctgatcaagctcctagaggtgaaactcacaaatatttggtagtcgctctagactgggttgctccggagtttttaactctcaggcttgttcgccctgattctccagcaatttgtaaattagagctcaggttttcctgccccagcaccggtccccacagtggtttccacagatcagtggtggcattagattctcataagagtgacaaccctattgtgaactatgcatgcgaggaatctaggttgcacgctccttatgagaatctaatgcctgatgatctgaagtggaacagtctcatcccaaaaccatcctctgcccccttctggtctgtggaaaaattgtcttccatgaaacctgtccctggtgccaaaaaggttggggacggtggtagaacatctttcaactgactggaaatatgagatcttcacatttgtgcctt

SEQ ID NO: 477176 - DNA, 680 bp, Homo sapiens
ctcttaggctatttctggatgaggttttttgtttgtttgtttgttttataagataccccacaataggtaatggcagaatggccaggcctagagcctagaaccttctccctctggctccctgcttcctgtaccacctggccaggagaacatgcagacacagaatttcttcctccaaacatacttttcactattcccaatgaaaagactctccaaggccctggagcacctggcccacctctccttgcaccggctcctgtatgcttgggccccctccgaggcctgacttcactgagcaagaggcacaagagggtcaacacatcagaacatctcgtgagccacgtgttctgcgtgggagtgaagggcagacctatgcagaggagctggggagaagcagtgggtgcagcgccacgggatgacggcttagtgggcagcctagtggggcttttactgtcagcaattcagtgctgctggtgcctgaaggaggcagcagtggaagcagtggacatttctgatatttctctatagtaatccatgtagtttattcgtattaactgctctataacattccatgatatgaatacactaaatgtctttatatatctaatttcagtattcatttcattttttactatttaaaaatagcaaaaataactgtaatgagcattctgtctccttgtgca

SEQ ID NO: 477177 - DNA, 646 bp, Homo sapiens
ttctgtttctagacttccccccatgggttttcttatggaattcaaaggcttgcttttaaatggtgcgatcatagcttcatcatcatccactgcttctcaagtatttcctctagttttgaatattaatgctgtttccagtaatttgctgttacaaacagttcaaatgacctttcctgagttggatttcagcacagcaattttgcagggacaccaacattcaggccatggcatccagcacacaagagaacagccttcctggatggtactgaacaatgatgttcttctagactatccaaatactggccaccttctgagcacagctcaggtgcctcctcctccagttaagatgaatcatcctggagaaaaaggtggacccttaatgcaacatgagtggtatccttgtaaagaagaagggagagacacagggagaaggcggccacggaaacagagtttgggctctcaccagcatccatcctttcactgtgtagccccagggaatggatcggggactctgtgatctttgctttcctttaaaaagtttgtttttgcacgtccactggagccgatcattttctcctattcgccttggtgacatcttagccttgaggtttatctgaaatgtgattgttgctgattgattgcttct

SEQ ID NO: 477178 - DNA, 901 bp, Homo sapiens
ggaaggaaagaattaaatgatctcggttggtcctcccaacagctctgagagacagacactctgatttctctctgctttacagatgtggacctgggactgagatattcagtaactggcttagtatcacacaggtaaacaaggcttacccgggtttctgcaaggaagcttcatgcattagcgtagcagatgctctatgtccgctgcacctgagctcacttctgcattggcagaagtcaatttctgagcacccgacaacttctccctcagcggccctgcctgggtttttctcaggtgcccaagtcatgccagcttgcccagccagcatgcgaggcagcgggactgctgaggatcaagtatgcaggtgaactggggcaaacctgggttcggctgcaagtcagtgccagcctgttccgtgtgtctcattctggggtccaggatgaagtcgcagtggctccctgaggcatacactccttgtgtcggggtcaaaacacacaaagtcccttggtttggttctctggcggcacctcacattaaggggccagataccactatggtaaaatctcggagcggtgagaggccactctcaaagaaaaggtccattctggaaggcagtgaagataacaaaattcacagtaccacagtcagcaatggtgtgggctcttttgcttcttggagcaggacaagtcagcccctggattccttgctggccgccccggctgacaaacctagaacaacagcggcacagacatcctccctgtgcgtgcccggctgttccgttttgcttcaaagccggtgggggacggaggggcggtaaaatattggtaactcgtgtgatagaactgatggtactagtcagccatctcacccacctcctaaaggcgcctgcccagctgtaactgcc

SEQ ID NO: 477179 - DNA, 657 bp, Homo sapiens
gataaaacaggaaaagcagtttatgtttaccactcacagacatgaagatctttgtcctggggatatggtccacagctttatggggtttacaatctggtgtggactccagacatatcaacaggctgttataatcaagtggaaaggtactatgataggggaagttcaaggttctattggaacactcagaataggaactcgaccagatttggcagagtggagagtgaggaaaggtttacaaggagaagtggtgtctaaactcaataggaattggccaggcaaagggagacggaagaagagcgggtaccaggcagagggaaacaccctcaaggtgagaaagcggctgacccagtatttgggaattgcaaatgctcacgtggctggatataaaaagcaacaaatgagataccagcctggagagataatcaacagttaaactacagagggtgacattaaggagttctggacaatgggatgccaaaggtgttttacacagaataatgttataatcagatgggtagactgaaagatagtttggagctccccatggatagtagatttgatgaaaacaagcaggaggcaagggaaccagttagagggttgaggtagaaggccaggttggatatttttatctttatcttctaactttataattacttg

SEQ ID NO: 477180 - DNA, 613 bp, Homo sapiens
atccaggtctggttcctgccttttgccatgagctgctgggacagggcccagccacctgcaaccctgaactggaagaagcaaggtacagcccccttggctgctttcatgggctggtgttgtgtgcctgtggcttttccaggtacatggtgcaagctgttgatggatctaccattccagggtctggaggttggtgactctcttctcacagctccactaggcagggccccagtgagcactctgtgtgggagctccaaccccacatttcccctccacactgccctagtagaggttctccatgagggctctgcccctgcagcagacattccagagcagttgcaggaatgttttggccaggttgatgggagtcctccagccaaagtgcaagaagacctgcatctcacaggaatggcatctgtgctcagccactgggaaagagcagtttggaggaagtgtggttctgacaaggaggttggggatccagaagttagcggctgggccagcattcagtgctccggcagcacttagaatttttaacagaacagaaaaaaatcttcgttgaaatgaaagtgacactctagtgggaagggggagaaagacggtaaacaacataaat

SEQ ID NO: 477181 - DNA, 634 bp, Homo sapiens
cattacccatagagcacacaactccagccctctctattcacagatttagctgctgtagaggttcatggtgtactgccccatgttgctctgtgccagtcctgagtccaccttggacagccctcctctccgacggaagactgctccttcgctttgctacttatggcccctgagggattcagctctgggctacggggaaggcttcattggaagcacccttctggaagccccagctatggaaagcgtctgtgcagacttgttcatgtgtccgccctctggagaaggggactggtctgcagctggggaagcacataagatcaaaactctggcagtggatccaggtactgacaggcacaagcaggcaatagtgggcatcacatgtaccagtgtggaagagcagggagggctgctgctgagcacatgggaggaccaccaagggaaccctacaaataactgggagagatctggggtggacacagcttgtcagagaaggggcatgctgggtggagagagaggagaggctcagagtctgtgtcagtcctgaacaagtgaagtgaataatgtgaacgtcatttttcatttctatgacatttgccctcctcagaagattttggttactgaaatgacttaagatggt

SEQ ID NO: 477182 - DNA, 760 bp, Homo sapiens
tgaatcatggactccaatacccaatgccacaggactctgacccagcctggtaggatctgtacagagatgttactggtgaagcttctttcttcttcacgtccttttgtacatgtttatttccatgggggtggagaagccctctgagagagaaacacacgagtcccattcaccattaggctttgggtacagtgacagatctgatggatgggtgggtagcgatggggaacagggaggggaggtcctggacagggcttttcttgatggcttggcacttatgcttgtcttggcaacagagaggaatggccaaaacgtaaatggagaagtggttcctgagtttgaaaaatggctctgccatttacaatatgtgagacctggagctcagcttccacttctgaaaaatgaggatgagaagagtcaccatctcatagctcgaggtgaaatcagaggctgggttatctgagtgatccaagcccacactcacattccctagttcatgctgttcctctcttttcccttgttcatgctgttttctacacctgggatgctcctctcttttctgcccaaaatcccccttgtctttcaagtgtcctcacttttgtgaagacttctgtaacccctcccctttccctactcttagtcagaattacaatgaacgctgcctctgaaatcccctagagcttctcaaatctttctatggcacccctcaaagaagagtaagcttgggtcatcatttatctttaccagccctccacccaccctc

SEQ ID NO: 477183 - DNA, 586 bp, Homo sapiens
ctccccatgctccttcagtgggctccacgatggtcctgccctccaagcccactcactctctgtggcccaacatggctgacatgggaacattgatttccttaaggaggagaaagtgccacctttatctacaaggagagtctgccctcggagtcaaccaagatcatatcagtgatgctggcacttggatctacaggcaactcacagtctgtctgatgtggtttggctgtgtccccacccaaatctcatctccaattgtagctcccacagttcccatgtgtcgtgggagggacccagtgggaggtaattggatcatgggggcaggtctttcccgtgctgctgttctcgtgatagagaagaaaaagaatcctgtggcattgtctcttctttcccgcaattctgactccaaggctgtgcagatctttgccatctccctgcgttgctaaaaccagtgttgtgaggacctcattaccaatttggttacttggtgaggggcccctaacctgggggctcggaatttggatggggaaaatactttattttcactaacctctgactgaaatttactatttccttcaattatgaatgt

SEQ ID NO: 477184 - DNA, 896 bp, Homo sapiens
tctaaaatacgtatgtatgtaacagaaaagtgcaccaatcatcacaccttggcaaactattacaaagtaaatacgcccttgtttttcttgatcctctccctcttcccacccttcgtcctccaaagggccccagtgtgtgttgttcccctctatgtgtccatgtgttctcatcatttcctcccacttacacgtgagaacgtgcagtattcagttttctgttcctgcactagtttgctaaggataatggtctccagctccatccatgtcccagcagaggacaccatctcgttcttttttatgagaagcctgtctctttggtgtcactcttccatcccagggctctactctgtgcttctgtttccaaagcttggcttccaagtcactgtctcggaagttgccagtaaaagtcctacactcttacctctactgagcattctaaatagatgctgtgattaccgttcgactttgtgcccggtttcattctagtgagtgttttttccctgctactctgaactattctactgacccttatacaataaaaccgcggcctcgttgtgtttctgcaacctgggcaagaagagacaggtcacctgcttgacactcagtctgaacagaatccttcacaagttgaaaattgagagcaaaacttatccagagaaggaagagattctgagcagttgaagggccaactaattacaaatgaaaccagtgcttctaaatccggagtcccttgaataaataacatggaacgccactcctggggcaagctcctgcctttagtctgggggctcagtggtcactggcgcacagccctggcaggagccaggccaggtaacttacacagaggatgatgtgaacacctgccctgggatatagcagtaaataaaccaataata

SEQ ID NO: 477185 - DNA, 686 bp, Homo sapiens
ctaagcataaccccttgttagcaccttcagtcaccatacacaggttaccagtgtaacttgatgaaatcaagtaatcttgccagtctccaaatcaatacgaatggtatcattcaccttgatgaggggatcagggtagcagatggtgtgagcatcatgagtcaccacatgagggattccttttgtgcccacaaagatttttctcactttgcacaacttgtacttggcttcctcaggtgtaatacaatgtacagcaaagtgacccttggtgtcatagatcagacaaaaattctctcccatcttgtcaatgctgatgacatccatgaatccagcaggatgaactggaaaaactggatttttggacgttctcaaatcaaactctggactgacaaccccaccaagattccaccgtcctggggaagtcctgtctatgaaggcagcctgcctctctttttaagagttcccaccttaaatccagtgttcttctgtgacagacaccctgccccaaatgtcaacccactcgatgctctgctcagcatcctctctcctgtccctccaggggattcctccactatcatgtgacttgggctttagtctgtcccttatttattgtgtgatcttgaacatactgcattggctcttgagccttcatttccttaattagaatactgtatagggcttatctaagc

SEQ ID NO: 477186 - DNA, 599 bp, Homo sapiens
tcagaggggggcaccagaggaggcaggaaacgtggtgggagagatgaagcagacctgcgtcggaggcagcggtgtagcggaacagagacacgagcccccgcaaacgttggcatccacggagggagcacggagccttgggatccccaaggttataacaatcctgactttatgccatgttatatgtttttgggcaaggtctgctgctgctacaattcaagctgcattgacaactggaatcttccggattgtttcttttgtgattataaagtgtctttggagtagcgtgatgtgggtggatgcagtttatagaactacttggaccaatcagcctcctcctcaaaggaacactggctttccactcttccagtggattataatgcttactgtatctggtagcgtgctttcagcggcaactaacggaaaagccaactcaaatgagtttaaccaaaaaggaaatgtattggcctatgtaactggaagttcacagatgggacaggctgattgaaccctggtgtcaaggacctaggttctttctgcatctctgctttccatcctcagtgtcagctgccttttaagcctggctcccttcatagtcagaa

SEQ ID NO: 477187 - DNA, 1020 bp, Homo sapiens
aactcagacttgtaggaagtcggatcactatgcctagtaataatccaggaaggcaaacaataattcttttcattcggccaaaaatgaccaagataaatgtctgggtccagacagtgtatttctggaaagccagaccatgtgaaaaagttatgacttgggcatttagcatgtttttcagccagccggtacctttgaaacatcctttctatgtttggggagttaactcagaaaatgctacccaaaaggcttcttcgcaggcaccttgtaacctaagctccaccaatcagacgtctaaatcagaatctgattcagcagtagaccagggtaggcaggaggatccacgtagaatctccttgctggtggtaaaggtatccagccttcagaagcagcagtgtctgcaaacttggattcctaaggtgcagaaatggctgcagtggctggagtttgtggaaatttcagttgtgctgacttgctggcagcagtgcaaactatagcaactaatgctccatgacgatagtgacagtggaaggacagctttctcatcaaatcaggtctgccacatggtttgggacactgttcctggaaactgaacttcagaccaagttcctaataattccatgatgcaatggtattttaattaactctatttctgcctaatcagccagagtcagcttctcttttgtgcaagaacttaggcaaatgcaaatacaatgacctttctaaaatgcaaactaatcgtctcttgtctttgcctaaaacatcgccatgataaagtctaaactccttatcttggcatataggcactgctgcatctctggcctcacctttcaccagtaggcctcccactccaccataagctgcagtcacaccaaactacttgccattacccagcatttcatattcttccttacctcagatcctttgcatatgctatttctggaagccaacaaagatttctgaacattgaaaataatgacaactgtctaagattggtgagtcagtgggtttgccaacactgtg

SEQ ID NO: 477188 - DNA, 1254 bp, Homo sapiens
gaaaaggggctcccagtgcagcagtgggctgaagagctcctcaagtgccgccaaagtgggagcccaggcagaggaggcgccgagagcgagcgagggctcatgctggcatctctcgcagccctcgttagctctcggtgcctcctcggcctcagcgcccattctgactgcgcttgaggagcccttcagcccgccgctgcaccgtgggtgcccttctctgggctggccgaggccggagccggctccctcggcttgcggggaggtgtggagagaaaagcacgggcggaaaccggggctgcgggaggcgcttgccttgaggagcccttcagcccgccgctgcaccgtgagtgcccttctccgggctggccgaggccggagccggctccctcggcttgcggggaggtgtggagggaaaggcaggggcgggagccggggctgcgggaggcgcttgcgggccagatagagttcggagtgggcgtgggctcggcgggccccgcactcggagtggctggctggccggccctgccaccccgggcagtgaggggcttagcacccaggccagcagctacgaagggtgcgccggggtcccccagcagcgctgccccaccggtgctgcgttcgatttctcgccgggctttagttgcctccccgcagggcagggctccggacctgcagcccgccatgccttgagtcccaccccgccttcgctgttggctcctgcacggcctgaacctccatgaacgaacggcgccccctactccaccgcgcccggtcccatcgaccccgaagggctgagatcgcgggcccgcaagccgcgggactatcaggcagctctacctgcggccccagtgggagatccactggatggaaggtgtggctggccagcattaccatctcagagctggccgtgacaagtgccatctgccatggcggttcagctctggcctttttccagaatggcaacatcaatgctatagttccctgtgaaattggagaagttaattatactttaaaacttttttctgttgccttaaagatgctggctttggtatatagcctgaatcaaaggcttggaggaggggtgaacccagaaaataagggactggagagaggcgaatctgaactagcaggaactgtttactgcagctgtgaccgaaatcggaggtgagtcaagaggatgggacacagggcactaaaacaggctgctacaatttccccttaatgtggccacttgctgtctcaccctgtttgggacac

SEQ ID NO: 477189 - DNA, 4713 bp, Homo sapiens
gtgcaggactgcaggagcagctgagcttaccaccagataagacatggctgctcagaaggagcacccaggatgggccgtcctcagggtgtggccccaggagctcctggcttcagaatggcagagccagtgtggccttactgctcacaaggtgcaggtgatgcccactgcatggctcatggatacagaggtgcaggtgatgccccctgcatggttcatgggtgcaatggtgcaggtgatgccccctgcatggctcctgggtacaatggtgcaggtgatgccccctgcatggttcacgggtgcaatggtgcaggtgatgccccctgcatggttcatgggtgcaatggtgcaggtgatgccctgcatggttcatgggtacaatggtgcaggtgatgccccctgcatggttcacgggtgcaatggtgcaggaatcctgccttgcacctgctccctgatcgctctcacccctggcgcagagcctgcaggcagccctgggctcgagctagggcccaatggatacacccacctcgaggccggatcgtcgtagtgttgcaacggcactccctgtcttgggatgccctttgggtaagacagctcctgcaaggtgtggtgtctatacacgttggaataaaaagtacctttgaggtctgtatattggatgttctaccctggtgtagctccatttggtctgccacttggggaaattgggtccgatcagaggtctaattttatcagacgtacaaagctcttatttagctttttctttgttacctttgcttatttatttagcacactcaaagtttaaaaacgtaatagactgaagaaaaatcacctatggcaggggttggctaaatatcaatcctgttttctcttccaggcaccctgggagattgcatttcccaaattccattctacttaggctggggccagatgactgggttttcgccagtggaatgtggctgggagagattcaagctgcttctgggcctggcataaaaacccgacatgctccttcttccccttctgtgacaacgtggaagtccacgtgtttaagatggtggcagcataagatggaaggaacttagattcctgagtcacctcctggaagtgagctaccaaactgctttccatgtgatttgagtaaggaataggcctatattgtaccaagccactgagatttgggggttgttgttgcagttatttatcctaacatactaatacagcagtagatcaaggtattcttctatgacagtaagacctctcttctgctgattttctgtattaaaacttgcctgctgggtcatgggctcatgagaggacagacaggacatcgtacaacttctctagctaagctcatcagcctctcattgtactactttgaaaacagaatgcacatattttaatgtgtatatgcacacagacatatttctaaagctaattcttgaagtatgcactggctgacaagtacatgcttcgaaggaatttgtaaatactagaccacagtcaagaaaaacagagttcaaaaaatctgtgtgcttccagacaggattttttttcagaattggaagtataatgacgacccctcatggggcataccctgaaaccaaccctcatctcagtacttctcttttggagggagcgacttctgttgtaccttaaatattctcccctgtcaccatcatcacggggacagcttggcatatctttccctccctgctcaagggtcagcatgtaagcagtggggactcaaggttaaaaacacccagctccaggttttagtcaacccgtgtatatataaatgagctgtggtactcctcatttctaagtataaagtcgttctctctttttctggttttaaaaaacttttcaggctaaaatcacagatttgggatttaaattttgtgtgttgttactagaaaagcctctgaaacatgtggatttatgctgtgtatgccagatgggcggtagttggaaccagagctgactcatggtttggaagccacatatttccagtttggggttgtgttgttttgcttttgtttttaaacccggcatctttcaatagagcttgggagaggaattagcagaagaggattccaatccattcaccatttgggtgatctggatccctgaattttgcagctctggactgaatctccaagtgatcacctagttcttgcattcaaagcttcttggacactgactgaccctcactggggcagagccgccctaatttgtagggtgtgttttgctcctgtgtgccggacactgtgcacacaggacacatcatctcacctaatctgtaccataaccctgcagaagaggccaagttcccatttcaagttaagaaaatggagactgaagaagtaaaggaactaccagtaagtggcagaactgaaatcacatccagtagcagagcattgtatatctgtttgccctccatctctctggctagagcataaagtacataagggtgggggctttgcttcgttccctgctgtaattccagcccctggagcagcgtctgctacatcgcagctgctcaataaatacgagtgaacgaatgagtgtgaggagacaagtgtgattttccacccttcttctaaaggtacagcttgaattttgaaactaggtccctacagtttgatcctatcttgtttgacttggaagaataactcataacacagctgatttttaaaatactggtaggttccttaagactctgagtgtgatgtctgctcagagcaaattgtggagatgctaagattaggctctgagctcaactgttgataaaaaataaatagaggcaggcaggcagcctggggtggggtggggtggggtgggctccttcacggaagctggagagcagcagggaggaggcacgctctcccccgctctgtccttccctccactgcctttcccccaggggtcatagcccacacccactatcacctgtagcttaggcctctctctcctctgagccgctgacacttgtggccagcttgttacccagcagttctacctgatgtcccgccaccctcttcacactgaacgacggaaagggagcccattgctaccccgcatcatcaactcccgtcctgctgtgggtccccctttctttctttttaactgtctctaccgtctgtctccactgtctgtcccactgccaccagcttggctcaggccctcatgatttgtcacctgtattagcacaatcccctcctttgaagacacagtccctgcctgcagcccagcccctcacaatgatccatgttctggtgagctgcctacagccttgctactgcacgtggggtgcccagaccggctgcttcagcatcgcctggaaatgtgtcagaaatgaagaatcaccgcccccgtgttctcgatcagtgagggtcctgtctgaagatggaaagctccattaatgtgaataaggaaaatttgatataacaaatgggcaaatggataaataaattgtatccattcatgcaaaggaaacttattcgggaaacaatatgaatgactcccaagggcattatgccaaatgaaacgctcaagtctcaaaaggttgtaggcagcatgattctatttataggacattctagaaaaggcaaaactttaggaccaagttcagtgatttccagtggctaggaggagggggaggattttattacaaagggacaacatgaaggaattttggggggtgtggaagtgctgtgtaccttcatttttaggttgggtacacttgtctacacttatattaaaactcatggaactgtacaccaaagaaagccaagtggactgcaggaagattaagaataaataaataaagtaatgcattataaaccattgacttaaatcagaaaccataagttcatattgatagaactaagtaaatataaaatatcttcccccaaacactacaaagcggggaaatattaactttatagtggagaagcctggtcaacccactttaatagagtgactaaaggtaacatcatcagtaatgtactaaggagaatcatttgccatctggtgagatgcaacgtgaagatcacagtcagggccagcttcatggacttctgcaatagcacagggctcagtgctcagaaggggcatacgtttggtttaatgctctgttgtcagtttgaaagtcttagtaattgtttaatgaggggtccatctacattttcattttgcagtcatccctgcgtgtaatgtagctggttctgaacacagtatcctttctgtgattttcctgccacagatgtataacctgaatttgatcatggtgaaacatcagacaaagccaaatgaatggacattttacaaaaccagttgcttggtcccttcccaagtgtcaaagtcacaaaagtcaatgcaagatggaggagctgtttcatgttggagaatgctaaggtaacatgacaagtaattgcaatgcaggtttctgtattgggtcctttggcaacaaaaagtgttgttgggacaactcatgaaacttgactgaggtctgaagatgagatagcaggaatgtaccagagtcagctttcctattctgatggttgaattgtgattgtacaggagaatgtctttgtttgtagaacttccaaacttaaatatttaagggtgatggggcatcatgtggatgtctaacactgaaatagttcagggcagaaattctttgtgttctctttgtaagttctcatgaagttt

SEQ ID NO: 477190 - DNA, 977 bp, Homo sapiens
gagaaaaatcttccctctttgggagataaagccctggcagcaagaactgaaggaggcggtcatgtgctgagtgaggcgggtgaccagcttggaagccagggcgggaagttcgcatggccctctgggtgaatcctttgcttccctgctttggaagacagctggctgcagagcaagagttctcttgtgtgaggcccatggcagtcattgctctcttccttccatttcggcttcatttcaaggctccacatgatgccaagagggctgctggttactccaggtctactacctcccagatgctagtgcaaggaaaaagaggaagatggcctctaacagtggcagctaaaggctatgaaaaatcactgactcagttgctggcctccttgtacagatctactttctggactcatgtacccacacaagcctgcctttggaatggtagagagttgactgtgctatcatgtttgaatcttcagggaaggtctattcggctggccatgagacatgagaaaggctgcctttacctttgcgacatcataatcttctcatctgcgctcaggtctgtgcacgtgggggagaccttccctggccttcctcagaaccatcatgtctgcagcatccccagggctacaagacagcaaggaagtgaggaagagcaagcaacaacctggtgctaaacaaatatcagcttacaagtgacttgtctcaggaataattcttgcacctgtagagcagacagcccatatcaggaccagtgactggggaataaacaccctgaaaggcagtcgtaggacttactgacagctctactgtgtccacagctgatgtccaccttagagaaaaaactaggtgctgatgtccatagcttttagtcacaaacagaaaagaagcccacctctcgcttttctgtttcaaagagcaaaattctgcaaacacagttgagggtcagtgtttggggcaatgcctagtgaggggtgagc

SEQ ID NO: 477191 - DNA, 1014 bp, Homo sapiens
cccagaaagatccaatggacaaagcttcatcaagcccttatcatgcctggcattgaggatgtaacaaagaacaagggagacccctgttctcaaggagctcccatccctcccctctctgcctccctgtgtgagaaagaatatcacattctcttcctgttccttctaccaaatacccaccgggaacaaatagaaaagacccccaccaataaaaactggccaaacaagcatactcaagtcaaagcagccctggttgaggtgtcctcaggcacatttctacacggttgtcaaccatgcctatgtaacgtcaatcatgcctatcggaagcctccagaaaaacccaaaaggacaaggtgtttccctgagtcctgtgagctgctccagcaagttaatcaaatcctaagagggggctatgagaacgccaacttgaagacagtagatcagaagttccagaggcctgctcatgtcacagatgtgtgaagtgggggcagtcttggggactgagtgagccctcaacctgtggaatctgacactatttccagcctcgtacaaaaggatatgaaaagcatgtaagaatgggttgcagcatctttgctgcagggatttggtcttaaggctgtggggtcagtggcttagctccagcctgaacaagaaagaaagagatcaactaatagctcaacagggtttaacctgggcttactgagaagaatcaaattttttttaaagaaaataaaattgtaatatgagccagtcatacattcatattcatcaacatatggaaagtgtgactccaaagaaaggtttggggaaagaacatcacaatacaagaataattaagatcagatcccctattcattgcatatgtgtatggtatatgtgcctgtgtatgtgtatgtatatgtatatgtatatgtatatgtatatgtatatgtataagtatatgattgatatggttttggcctgtgtccccacccaaatctcatgttcattgttggaaatgggcctggtgggaagtga

SEQ ID NO: 477192 - DNA, 1329 bp, Homo sapiens
cccgtgtgccggcaatgtgacatagtgttctttatgttcatatgttctttatgtccttatgtgagaccctgagggccaatgggtggaggccagtgggtcgaggggctggcagagcttggtggagtgttctgtcatcctccactgtgatcgagcacagggagaaatgcccttccctcactctgcctgccactttgtcacctggcttggaagcaaagcctcacacggaaaccaccccctcagcttctctctctttcaagggctcagatgaggaaggcggcagaccccatctgatcctcttgtgttttctctctcttcctacagatacccctctacaagctgtcttcctcacgggcatcctgtcctcaagaaaatctaacactctaaaagattcccacagtccattggcccatcaggtcatctggcaggaggattttgatctcattctgggcttatcctgaaaacctgctcaatgcataacacagtttggatatgcctgtagggtcttttaagttggccactccctgcccctgccgcaggtctgccttatgggaagtcctaatagatttttttttccagtatacttttctcacgtctaagaattctaatttgaatattcacaaacgtctcttggtccctgataaaaatcaattaaaagaagctggtagtaaggaaggcaaaagacaggcaaagggagggtagggcagagagagtagcttttgcaacctggttgtgtccatctgctgaggtggtcataacaaagtatcccaggctgggggacttaaagaacagaaacttatttccacgccgtctggagattgaaagtgtgagatcaaggagttgtgagggttggtttcttctgaggcctctctccttggcttgtagaagggggtcttctttctgtgtcttcacctggtcattcttcacctggtcatccctctggatagtatctgtgtcgtcatctccttttttaaaaaaacaaaataaggatactagtcatattggattagggctcacccatagcgcctcactctactgtaattacgtctttaaataaactatcttcaaagttacattctgaattatattctgaggtactaggggttaggatttcaaagtatgaattgaggagcgcacaactcagtcataatgttggccctgggggagtcaaaagaagacaagaaataaatggaaagccaatcttcagataaactaatcagtgctaatggatgttaatgatttaaggggtttacctctcaaagggatttgaattttaataggtaaattccatttcttagttcaaaaaatatcgagtgtccagtgcctgtcaga

SEQ ID NO: 477193 - DNA, 1604 bp, Homo sapiens
gaagtcccacccttcttgcgatcgaggccagcaacattggtgttcatgatgtcagccaaggatggaagctccaaatcgctcactgcccagacttacctgaggcactacagtcacactacaatctacagtcatactatcatcttcagtcacactaccatctacagtcgcactgccatctacagccacactgccacctacaaccacactgtcatttacacccactgccacctaagtcacactaccatctacagctacactgccatcttcagtctcactgccatctacagccacactgccatctacagccacactgccacctacagccacactgccatctacagctgcactgccatctacagccacactgccacctacagccacactgccatctacggccacactgtcatttacacccactgccacctaagtcacactaccatctacagctacactgccatcttcagtctcactaccatctacagtcgcactgccatctacagccacactgccacctacagccaactgccatctgcagccacactgccatctacagccacactgccatctacagccacactctacactaccatcttcagtctcactgccatctacagccacactgccacctatggttgcactgccacccacagccacactgccgtctacggccacactgccatctacagccacattgccacccacggccacactgccacccacggccacactgctgtctacagccgcactgccatctacagtcgcactgccacctacagtcgcactgccacccacggccacactgccacccacggccacactgccatctacagccacactgccatctacggtcacactgccacctacggttgtactgccacccacggccacactgccacccacggccacactgccatctacagccacactgccatctacagccacactgccatctacggccacgctgccatctacagccacgctgccacctacagccacactgccacctacggttgcactgccacccacagccacactgccgtctacggccgcactgctgtctacagccgcactgctgtctacagccgcactgccatctatagtcgcactaccacctacagtcgaacagccatctacagccacactgccatctacagtcgcactgccacttacagccgcactgccatctacagtggcgctaacatctacattcacgcggccatctacagtcacactaccatctacagccgcgctgccacctacagctgcactgccatcgttatcacgtggggagggactgcaaggccacccagtgctctcccaccacacttcacattttccttccttcacatgcctcgttcttgcatgaatgaagttttcacactgcatctctacttcaagagaaacaaagaaaaacagtctcactaaacaaaatcaccaacttccctggctgagagctcagagcacttaggatctaaatagaagactgttccatggttgctgttcaacagtgacatgtacctgacactaccctacttcgggaggtcagggtccaaggtaaaccagagaggaatctaattaagacttgttaatcagtgaataatcaa

SEQ ID NO: 477194 - DNA, 1985 bp, Homo sapiens
caggggagttacatccagatgtagctgacaggtcagggccccttctcctccaccatgtctcagggttatcttttccaaatggaggaagtcaagggtccagaaggcacagctgtgctcagggtgcctgtgttttgtgaactaactcaacaacggacagcgcgagatacacagagccacactgtggctgggagcctggccgccgtcttcctgatccctggggccgatggccagaagggctttcttaccaggtgcttcccaggagcctgggaggaggtgacgctgagcacagacaccacatcctgcagccgtccttggtcccgtctcagcaggcattcccaacagagaccccaccgagagctgctgggaaggcaaggagatgtgggtcatcgtcatcagctaaatggagggtggcattctgcttctaccatccagccagtgccacagatcaaagagaaataagctcggcaattttcctgccatcattttgttttgagataaggaaattatccacaatccaattatgagctgaaatctaaaaatggaaacgctctgtgtgagtcagcatcagatgtacaattgggatgtgttcgcacagccgcttcattccggcctgagaacaagagcactttgtttcctgtttgctaaggaggtcaaggtcccctggccgtctgcgtgtgggtttccctgtctcagacaactgtgctgtgaaagtttcttcagtgcatgatactggcccccctcctgcctctggacagaagcctgtcattattgtcaccggctctgccctgcacagggagctgggaaggaccagcctcctggcatctgtgtgtgatggtgcccggcacatctgtttcctgccccagtgcacctcaccggcctgggcacagaactgctaaacgtgactcaggaaaaggaactttcccacatcgcttcacttcattgattttcaacagcaggaaaaattttgctcactggtctggcaaataaataagtggttatatctgagcgtgtctgtgtgtgtgtgcaggtgggtatacagcatgtgtgtgcacatgtgtatacgtttgtgtgtgcttatgtttatatttgtgtatttgtgtgcatgtgtgcatgcatttgtgtgtgcacacatctgtatatacatttgcgtgttcacgtgtgtgtatatttgtaagtgtgcatgtttatatttgtatgtgcatgcatttctgtgcatgtttatatgtgtgcacgtgtgtatgcatttgtgtgtgcatgtttatatttgtgtgtgagcatgtgtatatgcatttctgtgagcgtgtgtgtgcacatgtttgtgaatgtgtgtggatgcatttgtttgtgcatatatgtgcatacagttgtgtgtatatttgtttgcacatgtgtgtatttgtaggtgtacatatgtgaatacatttgtgcatgcacatatgtgtatgcatttatatgtatttatgtgtacatatgtgtatacgttttgtgtgtgcatgtgtatttgtgtgtgcaaatgtgtgtatacatttgtgtgtgcatgtgtgtacatgtttgtgcacatgtgtgttaaaatctgtgtgggcacatgtgtatatgcatttgtgggtatttgtgtataattctaagcgtgtgtgagcatgtgtgtgtgcatgtgtgtatatttgtgtgtgtatacatttgtgtatgtgtatttgtgtgattgcatgagcatatgtgtgagcatgtgtatgagggtgtgtgtgcttgtgtgtatatttgtgtgtgcatgtgtatatatttgtgtgtttgtgcacatttgtgtgaatttgtgtgtatattcatgcatgtgtgtagacgtttatgtgtttgcatgtgtgtatatttgtgtgattgtgtgtgtgtgtgtgtgtgtgtgtacacccatcttgtcctttgtcccccactcgaggacagagtgtggctgtggcctccattctgaccctgctgcctgctggctgccctgggac

SEQ ID NO: 477195 - DNA, 936 bp, Homo sapiens
gttctttaaggaaatgcacgtggtgctgctccagccgtcaggcttgtgcgtgttctctgcggctggcgcctcccgcgtgccgtcctgtggcctcgccctcctcctactgctgctcggcagctgggggcttctctccaggaactgggaggagtctctccggaactgggaggagtctctccggagctgggaggagtctctccggaactgggaggagtctctccggaactgggaggagtctctccggaactgggaggagtctctccagaactgggaggagttgctccggaactgggaggtgtctctccagaactgggaggagtctctccagagctttgaggagtctctccggagctgggaggagtctctccggaactgggaggagtctctccggagctgggaggagtctctccggaactgggagaaaaacaagttaattgtaaagcagctgcaggcaggtcctgtgggaggtgtccagaagaaggcattgtcatcacaggaggtgacggctctgtgcgtgtcattgcccctgcagaccttccagtgggaccagatgttggggggaagacagtgacaccgaggaccctgaccctgtgtgggcctaggccactgtgtgtttgcctctttgtttttaacagaaacattttaaaagttaaaaaaaaaaatgaaaaaatagaaaaaagcttatagaatgagaatataaagaaagaaaataattttgtacagctgtataatgtgtttgtgttttaagcaaagtgttataaaagagtcaaaaagttaaaaaaatttaagtttataacataaaaaagttacagtaatctaaggttaatctactatttcgaaaagaaaactattttgcataaatttaatatatcctaagtgtacagtgtttataaagcctgcagtagttatggtcacgacctgggccttcagattcac

SEQ ID NO: 477196 - DNA, 1200 bp, Homo sapiens
gatcgggttggatggtgaaggagaagccccagagctgcccgcagagctgcgggatcgaggccgccatggccggcttcatctggctacggcgagtccgctggtgggtggaaggtgtccgagttactggcagcgaatccgcacgggtccgcagcaacctcaattcttgcctccttagaagaaataattcgaaggaggggcataaggcagaaaaagaccgaggcaagtttcagagcaggagtggaagtttattacaaagccttagagcaggaaagaaagtacattcggaagagatccaagcaggattttatacgctggtccacctccggcgttctgagcccctttcccgtgactcttccctgagggtgggctgcccgcctgcgcagaaccctcctcacgcttgggaagtgagcgtgcgcagtgggctagaagtgggacgcatgcccatccgaggccttcttccctcttccgtgtgtcgctgttgagatttgcatttccctgatgacacgtgaggttgaacatcttttcatttgcttattagccatctgtatatctcctctagcgaggtacttgttaaggtctttggcccattttttaatcgaggtgtttattttcttattgttgagttttaaacgtttttgtacattttggataacagtcctttattaaatatgtctctgcaattattatttttttcagcctctggcttaccttttcattttcttcacagtgtcttttgcagaccagaagtttttgaatcacgtccagtttatcaattatttctttcataaatcatggatttgatgtatctaaaagtcattgccaaacccaaggtcatctaggttttcttctatgttaccttctaggagttgtgtagttttttgcattttacagttatgtctatgatccactttgagttaatgtttgtgaatggtgtgagatctgtgtttagattcattcgttgaaggatgttcagttgttccagcattgtttactgaaaagattagctttgcttcattttattgcctttgttcttttgtcaaagaccagttggctgtatttgtgtggatatattttcagactctattctgtcccattgatctatttgtctctctcatatatatatatatatatatatatatatatatatatatatatagccaataccagagtgttcttagagtaagatgtagctttagagta

SEQ ID NO: 477197 - DNA, 585 bp, Homo sapiens
ggcaattcccagatgaagatggagtcagcactctggcagggtggactggggtgggctggatgacatgttcgaaacctgcaggcagacacgtgcattttcaaaagctgcccaagagatgtttcacggccctcgcctcccagcctgcctcgcctcgggctttggggatgccgacacgcaggtgcagcttctgagagacagagggacctgttcggtgtgggggatggcctggggctcaggtgccatttcaggcgtcaggggcaaaggcgaggaacagtgcctgtctgcagaaatatttccccacggaccccatggacatgtaagagtgggctcctccccatcctccacactgctcgtcggctttgggaacggaaatcacgtcaaggcccagcccaacaaagaccctgaagtcaggaaagccttccctgtggagactacctgtctgtctgcttcagatcagtttaccccaggtccagacagggtcattctggtactaaggggcatggaatgacccagatggtcccactccattcctggcacccacccaccccacctcaccccaccccacccacatacagataaagttgt

SEQ ID NO: 477198 - DNA, 876 bp, Homo sapiens
aagagacagcgggaatggaacagtctggagcaagccagggtggacatgctgcagagacagtctcctgtttataactgctccttcaggtatacagggaatggaattaaaggtgccagagacgtgggtccctacagctatcttggacctgcaccgaacactggatcatgtcaacaagcagccggcaagttccggggaatctcggatgcgaaggccccggaagaagactctaatccttgtggaaggaacatacggcatgaggagtgtattgttgaccttcctgaagtggttgccctcaagaagaaacccgaggcatccttgcatctggatgaggctcacagcacgggggcccgggccctgcagctgagctgctgtggaatacctcagcctggatccgaggatgcggacgttatgatgggagcatccgcaaagagctcccgtgcttcaggaggacacattgaaggcaaggaggagcagacggactctccgtggacaccttctctcagtgcgacgcacgccaccctgctgtcaccacctgtagtgcagcgatccctctatggagtgtgtcatggagcaggatggcacggccctggagacgcacttctcacctatggcaacaaagattctctgacgctctgcgggatgccaaaattggtgcctttggaccagctgctggagcagaacctcgtttataggtgaagacttgaggtctcggggctttaagcatctggtacaggcaggttagtctgacttcaaagaacctgcgccaacgaactgaaagatgttgtttctgcccatttctagttagggcatgggcaagcgtatggcagaaggacgctatcagcctccatgggaaagcactccatgagccgttgtggg

SEQ ID NO: 477199 - DNA, 723 bp, Homo sapiens
cagactgccctttgctctccagccttagggatgaatggcagccatgtctatactcagctcatttgttcttttctcctcgtcctccttgggccaggggcctcggaactcagggctggcagagcctcagagctggtgcttttgctggagaggaagtggggctcaggggtctgctctaaatgtggttacttgtaggagtcaggactgccgtcctcatggtctgcagagtcctggcaggtggggcaacatcgctctggaagtcccggagcagggacgaaccaggtacaaaaagccacacactgtctacttccatgtgcatgaaagtccagaacaggcaaatccagagggagagaaagtcaggcagtggctgccaggggctggaggatggaaaggaactgccaaggagaatgcagtttctcctgggagactggaaattttcaggagtcagggagcggtgatggttgcacaatctcgtgaatgtactagtaccactgaattatacactttaaataggtaaatttaggtgtcggagaaaaataatttccatgagaaacttcttatgtagaatacattaggtatgtataaacagtgtcagtgtaattgtgtgaagaaaatatgtcatttctgccaaatttttataaagtttcaacatgttttaatttaagttgtctaattttgattgtctactcaatttagactaatttatagtctgaaatgactgtattc

SEQ ID NO: 477200 - DNA, 568 bp, Homo sapiens
ggacagctctgcaggaccgtttcaaaatatggcaaagaaacatgcttttgggctcatcttgacagaagccccactcttggtggttgtggccaaggagacagggctcgctctcccctcagctcccacccgagggtccccttatctcaccaggagggacagatgccagcatttctcaccccagcacccagttgaagaggctaaattcctggtgagcatgacggacagcccccttcctccagccagtccctactcatcggatggggctctagcccaagaacagcgggctaagaaggctgggatccagttgctgtgcccagctccactgagcaatgaattggtctgtgagggctgccagaacaaagcaccacagactgggggcttaaacaacagaaatttctccctcacagttctgaggcggaagcgtctgagctcaaggcgttggcaggtttgatttcctcctcttgtaaggacaccagtcacattggaatacggcccacccccatggactcattttaacttaatcacctctttaaagggcctatcttcaaatagaatcatgttctaatac

SEQ ID NO: 477201 - DNA, 701 bp, Homo sapiens
tgaggttttctctttggttattaagagtcatgctgccaggacgttcacgtacaagctttgtggagaagtgttttcaatctcgtgagactcattcactatcacgagaacagcatgggaaagatatctgctcccatgattcaattaccgcccaccaggtccctcccgcaacagtgggaatccaagatgagatttgggtggggaaacagccaaaccgtatcaactgccctctgacttccatcattgctgaggagaagacagccatcagtccttttgggttctcttgtacacggcaactcgttcccactttctgctttcaagattttcatgttggcttcaaacatttgtactatgacatgtgtgagtgtgaatctctttgtatttatcctacttttgggattcattgaacttctttgagagattcacatttttaagcaaatttgggaagttttcagcaattatttctctgaatgtttttctgcccctttatctctcttctctccttttgctttcattatgcatatgctggggggcttaaagggttcacatatttctctgaggttctattcctttttttcaatctatttttatctccgtttttaagataacataatttctaccaacctatcttaaagtttgctgacttttcagttcaaatctactcatgagccctgccagatgttttttggcatttcagttatttt

SEQ ID NO: 477202 - DNA, 1083 bp, Homo sapiens
acattttcctggaactcatctcatctgggcggattcctgggcactgatgctgttggagggtggataaatctccatgacggtgcttcgggattgacagtgatgtatgtgttgttaggcccgagggctctctgtgcacatggcttagaacatctggacggtacatgcatcaagcatctgggcttctgagcaaggcatacctcctggtcacaaggtggctgcagcctgctgaccaccatgtcggcagccacccttccccatcacctttgccactgccccgccctgtgcccgtggccttgcttttcctctgcccgggatgtcctttaatgcaattgcagctgccatggacggctcctacgaggcaagaactgcaacacagcgtgtgcaccagggggatgcgagatgcagcaacacagggtgtgcaccggggggatgcgagatgcagcaacgcagcgtgtgcaccgggggatgggagatgcagcaacacagcgtgtgcaccgggggatgtgagatgcagcaacacagcgtgtgcaccgggggttgggagatgcagcaacacagcgttaaggagcggaaggtggtgcgctacagaaaatccccaaagctcactgaaactggaggccccgccacccatgactgttgtcaggggcctggacaagggaagctactaagtcccccagttaccattgcactggcccaccatgcaaaccctgcagttaccatcaaactggcctgctatgaaaaatccccagttaccatcgcactggcccgacatgcaaatcccccagaaaccatccagctggcctgccatgcaaatcccccagtgaccatgcactggccggccatgctgtcccatccttctgccttgtgcatgcccacactcgcctgctgtgactttttcagccacagaacgaagttctcaagagaaaccacattcactgccgtctaatccacgagcacacgtgtcatttcattgttgtaggttcacccctgcagatgatcagcttaacactttgctgaaaggccctgttttacgtacatatcaatggtgcctctgtggaaacaagtctaaaatatttgtaagaa

SEQ ID NO: 477203 - DNA, 998 bp, Homo sapiens
tgatgtaaatgccatggctggttccaggcaggggcactcatcctttttctccagcttctatcgaatggatgaagacacaacgcggctgtgagagggggcagaagtcacagctcaaatgatgggcatcccattttccaaaccactggggtgggaagtcaacgaggcagctcagcaggtgcctcggggagaaagaaccggctggcgtggctccgtcggggctcttcaggcatttggactttgcagtggcatctcccatgggggaagccaacgcgatcccactcacaatgggcctgagggggtgctgcccatccggattcacctgtcctccagggtccacgaggggctctcagagctttcatcctcagatccccggatccgtgctgcccatcacggattcacctgtcctccagggcccacgaggggctctcagagctttcatcctcagatccccggatccgtgctgcccatcacggattcatctgtcctccagggcccacgaggggctctcagagatttcatcctcagatccccggatccaggcggtggctctgtctggggaggggctgactgcagagagaaccccctcgccatggagctgcagcctccaagatccgggccctcacccagccccaggctgatcctcggtccccctgggcatgaggacccacatcaggtccccggccaccccagaaccacaaggaaacctccagaaccccagcaggagggtggcatttacaccttcaggatgaagtccggagaagcctccctgaccctccagatgcccacgcaagtgtagaccccgcccccaccccacacaagtgtagaccccgcccctgccccacgcaagtgtagacaccacacaagtgtagacgccgcccctgccccacgcaagcgtagaccccgcccccgccccacacaagtgtagaccccgcccctgccccacgcaagtgtggaccctcctgctccctgccccctgccccccacgcacgctgtgctac

SEQ ID NO: 477204 - DNA, 3601 bp, Homo sapiens
gccaccaacatcaaagaccaaaggtagataaatccacggagatggggagaaaccagtgcaaaaaggctgaaaacttcaaaaaccagaatacttcttctcctccaaaggatcacacctcctcaccagcaagggaacaaaactggacggagaatgagtgtgatgaattgacagaagtaggcttcaggaggtgggtaatagcaaactcctccaagctaaaggggcatgttctaaggcaatgcaaggaagctaagaaccttgaaaaaagggatgggaagtcgctcccacagaaatccaggggagcttgcattggctatgacagtgtgatgggaacccacgtttccacagcgcagttccgctgcaaggactgtgggttggttcgtggtctgggagatgggagctcccgccagaatacagactctggaatccaggaattcccatcctgagcaataacaaaatcaccccaaaaaagaaggtggcttcaccatgccttcccttggaaaaggcattttgctgacaaatgtgtgttttttagttttccctcaatacctcactgctctaaatcatcataaagaattttaattgctgtcaataagtagttttgaacatggcttcccagaatgactgtgtattttgacaagtttcaaaaaaatgccttaccctttctgaccttaattttttctctactcttaataccttaaaaatagctatagttttattactattatatcagtagttctgttatttatcatcagatcaaaagcaaatgttctttgggaagaagtccttgatgcatttattaagtgaaaaacttactttacaatagtttcatcatccagttcctcatttgtaagtatgcgcatgcttcagtgtttgagtattagtacctagagcaaaatgggagctgctgtgtcttctctggctagtgagaccacagaggttttccttttccttccttctctccctttccattctcttctcctccttctccttctccccctttccattctcttctcctccttctccttctccccctccttctttgcttacctgtactttctaaatcttctacaatgattacatattcttctgtaataataaaaaatcaaactgaagagaatgtttacgctgaattgaaaaatagaaaaagagaatcaaaatatccgggactttaaggaagtggcgtttttcttttaatcatgtaccttttctcattctttctgttgatcatcatcatcttaatgttttgtagttataactatttaattgttcaatctcttagcaaacttacaaaactagattgcacctcaagtgacaaagcatgacctaaattctttgaattctctttcaatcttttgtggacaaaattgagagagcaaattaaatggacactcagggttctggagcattgccttcccatcaaacactttatagtaggcattcgatctttcaatatcaccaaaggttttgccctttatgacctgacataagacttcccaaactctcatactaagagtttttaaggatttagggagggagagtttatcagaggcttgggctgcttctgtgtttctttgttgtgcttctttgggagggagagttgtgcctttctgcagctgcaggcatacaaccccccaccccacccctgagtatgcctttagcttccctatcttagtgcaccggaagggaaagcaacgtgcttattaaggcccactgttttactggggcccattgtatgagggtgaagtttggccgttacccaagagactttcccccacctcccttggtgccagagctgtcttatctgtgttttactgtctgctctttctggctgcttgtagttagaagagaagtgatttccttgaaatgcaggaggctggaaagggaactggaactaaaaggggcagggcttgtccgagatgatggtgcttctcctgctctgacactcggaaatagcaacttgaggtgaaatgacataaaacaaaaccaatttgccatcggttaattgacagaaacaagagttacattcctacaacgtatttctggccaaaaaacattatcaccatacctcgaaacaaagaccaaaacactcctcatatgaaacatggaaataagtgtgagctatacagacatttaagaaagattgagaaaaacaagtaggacaatgatttccctctgactccaggccagggtgatgggtggctggagcctgtgcacatctgtgggatgtgggaggaacccggagagccctgagctccacccagagagtggccccggtggcaattcgatttttttcacatcaacgttacaccaaaatgacattgaacaaaatgacatcatctgaggacctgctgcatctacactgcaggccatggatgggccttctgggtctccctagtccagctctgttcccacaagcagcacgatgaccaattcctaacatcgcgtcaggaagcacaagtttccaaacataaggaaaagctgtgtttccctctctcccccaggggctgtgaaggacatgaacggccaagctgaaaagcaccaatcaggagcagtgtgcccctgttgtgataatacaagttaggcatgtaagtcacaggatatcagggagatgattaaatgccactaaaggactttgcctcctcttctggggagggagtttgtgcatacttggttgcatgtaggatggttgtaccattttaggcaaaagtgtagccttattattgtttttacctggagattgggcatggtgtaaggaaatgtgtctggtgccaagttgacatgggatggacttgtgacagttaattttatgtgttaacttggagggtgattttgcttattgaatatgtatatttggccaccttgctcaatcaatccctgtcttattcttcccaccttctacatgtctgtttctagcttctgactggaggctaccctttccaagtggtcagaatggccacctacaggctacagccctttatgagaaataaagctttcctttccaaacacaatttccacatccctggatgacccacgcagattagcacgctctcaggttagtaaccccagggaaagacgattcttttttaatctagaaaacgtctgtttaaagaattcttaattctgccaggatcacaagtttacctgtcggggtgatctatacagttgtggaggactcttccatgatagacgaaggtctaaacatggcggtggttttagggcgttgtgcttgttgagggggcgacggaaatggtgaggaaaagagttcattcaacacagcgagtttgtgtcactcagaatcatggtgaggacctgcaggcatgcacgtggacgctgacccatggagggaattggtgttctctgaccatcccttcagtgcagaacatcagtcacaatttaagttctgtttaggtaaacaaatgaccttttcctatggggcattttcattttataagggacatacctaaagaagatagcatccatggtgcatggagcatgtgcctcaccaggcatcaccatacccaccacagctcatgcgtgcggatgcctttgctacccaggacggccatacaaggaagccattgggtcagtcctgtgcacaaac

SEQ ID NO: 477205 - DNA, 850 bp, Homo sapiens
tcccccaaagcccagggcagccccacgttgagcgcagaccatcctggcgccatggattttcttagaactgccgttccacgccgggtgagtccccggggctctggaaccgtggattttctgggatttgccgttccacgccgggtgagtccccggggctctggaaccgtggattttctgggatttgccgttccacgcccggtgagtccccggggctctggaaccgtggattttctcggaattgccgttccacgcccggtgagtcccggaggctccggaacacggtttctaacgcgcaggctgatgatttctaacactcacgtgcgtggccccacggatccgccggtgcccttggcggcctcttcaccccccggggctctggggagcctcgctcctctgcagttctctgttaacacctttccgcttctgaggagcttcacacggagaatacggcgattttctgacctaatcgcaccccctccgcggccgcagcgcgcgaccccgagctcacacgcgggcatcgccgagtcacacgtgggcatcccgggcctcacacgcagcccctcttccaggacgttctgcctccccgcacctggccgggaccctcaggctcagccctggggatgcctccccgacggctcctgtggctccgtgccccgcgcgcccctggatcacctggagttgtccccaccgtgttccctgctgcagtgagtcccatgcaggggtggtgtcttctcttacgtgggcaggtgcatctgggacaatcagcaaccattctcttctcagaggaaagaggagaggttcagctctcctctgcttcagcttcgaggttttaagactttaaattgtcttt

SEQ ID NO: 477206 - DNA, 1611 bp, Homo sapiens
gagagtcttggggccgagaggcagcaggtacaatgtttgtgttatggcgtatggacagacgggcagcggaaagagctataccatgctgggacgccattcggacgacggccctgttctgccgcttgacccacagagtgacttaggaattatccctagagtggctgaggagctcttcagcggggacaccacggtggaagggggcgatgtggtgtggcagcacgtcccggacgtcggcttcgcagtgttcccaaaacgagaatcggagcagacacggaccgtgtcctccctcatcacatccacacacgacctggagaggggtgcactgggccagggctgggggctcattttggaaaatacctcaagaagcccaaaggttgaagtctccatagtggaagtttacaataatgacatttttgaccttctggccaaagacagcattgcagcagtgtcgggggtcaagcgtgaggtggtgacagccaaggatggacggacagaggttgcgctgctggcctctgaggctgtcggcagcgcctcgaaactgatggagctcgttcatggaggtctgcagctcagggcgaagcaccccaccctggtgcacgcggattcctccaggtctcacctgataattacggtgactctaaccacagcctcctgctctgacagcactgggcatgcggagcaggtgcaggctcgactacagctcgtggactcggccggcagcgagtgcgttggtgtgtctggagtgaccgggttggccctgagggagatggcgtgcatcagccgcagccttgcggccctggcaggcgtcctgggggctttgttggagcaccgtggccatgccccgtaccggaacagcaggctcacccacctccttcaggactgcctcggggtccgccagagcagctgagggctctctaggctgctgctgcatgtgtggcctgggtccctccggctgtgtagacctgcttaggccccaagttccttgggtcttttgggggcaggtgccagaagcctggacgcaacagattaagcaccagtgccaggtgaggggcgctagtgaccggctgctgaccctcccggacccaggtgaggggtgctagtgaccggctgctgacccttccagagggtgaggggtgctagtgaccggctgctgaccctcccggagggtgaggggtgctagtgaccggctgctgaccctcccggacccaggtgagggatgctagtgaccggctgctgaccctcccggagggtgaggggtgctagtgaccggctgctgaccctcccggacccaggtgagggacgctagtgaccggctgctgaccctcccggacccgggtgaggggtgctagtgaccggctgctgaccctccgggacctgggtgaggggtgctagtgaccggctgctgaccctcccggacccaggaaaggactcagccagtggggctgaaagcagagacatctgcttcaactcatggtttttaatataattgggtagagatgatagacagtagataggtgagatgatggtgagatggtagatgatcagtcagtgaacagatggcagatctgtagatccatggatgataaactcatcagcagatagatcagattt

SEQ ID NO: 477207 - DNA, 607 bp, Homo sapiens
cgggtgtcgggctgggggacggtcaggtctttcccttcccacgaggccatatttcagactatcacatggggagaaaccttggacaatacctggctttcctaggcagaggtccctgtggccttccgcagtttttcagagctcgagcgctgtgcttagagatccgctgctgtcttcagagctggcagacaggaatggttaagtctgctgaagctgtgcccagagctgccccttcccccaggtgctctgtcccagataagcccctgactggggctgctgcctttctttcagagatgccctgcccagagaggaggaatctagagaggcagtctggctacagcggctttcctgagctgcagtgggctctgcccaactcaaacttcttagcagccgcccattccaggggagcaaatggttctgtcttgctggctttccaggagccactggggtatgaaaaaaaattcttgcagctagctcagtgtctccccaaacagccgctcagttttgtgcttgaaacccaggacgttggtggtgtagacacatgagggagtctcctagtctgcagattgtgaagaccgtgggaaaagcatagtatctgggctggaatgca

SEQ ID NO: 477208 - DNA, 689 bp, Homo sapiens
agcagcaaccaggatggaacgagctggaggccattattctaagtgaagaggatgcaaaggcataagaatgatacaatggactctggggacccagggggagcgtgggagcggggcaagggataaaagactacatattggttacagtgaacactgctggagtgatgggtgcaccaaaacctcagagatcaccactaaagaacttttccatgcaaccaaataccacctgttccctcaaaactacatttgggttgtgtccagtttggatttactgtgcataaagctgctatggatgttcttgcacatgtccttttgtggactgcgccactcatttcccatagttagagctaggagcaggatttcgggtcataggataggcatatctttaaatttagtaaatattgctgaagaatttttccagaatggtggaaccactttatattcccagagcaatagtatttttagtgctttgtacaccttaaaatatattagcttcctgaaggtcatgaagataatttataagacaaatttctagaaggaggtagtttggtttgacttggcaaagatatgaggaagcggtaggaagaaaatcgagcttactgtatatgactattttcttttcattctattgactttatttctcagtctctcagttgactgataactgagaggaatgttggtctgaatgatac

SEQ ID NO: 477209 - DNA, 520 bp, Homo sapiens
gactaagacactgcccagaccagccactgcaaaatatcagccttgaggcagagggtaaaactgctagttaccccatcacggccatgaacaaaaatctcttatacatatttttaggcgaccaaatggatgggttgctactgagtgaatgttgggagtacaactgccaagaactaaaactggggccttccatgaagaagactgaagccttggtccaggtctatacatccaaggtgcacgagcaatttgctaagaagagcaggcagacaacatgggtgataactcgggccctaacctttgcgaatgctggttgggctcaggagcagaaaagctggtgccagcaatgttcccatgcatggaagcccctgaaggctgtggcgggttcatcagagtggggaggtgaccctcacggaacacagaaatgcattctcccggggcttgaggaccccacctcgtgtggcctgtccataccagcggtgctgccctgccagccatggcagagccgaggggagctttgctgatc

SEQ ID NO: 477210 - DNA, 1194 bp, Homo sapiens
cacatcaacagctgctgaaactacaacacgcagcccccacacttagggctctttagccctctgctttcccaggtcacctttctcctatccatggctaaaagggtccaaggcatagcttaggccatgacttcagagggtgcaagccccaagccttggcagtttccacatggtgttgaacctgagggtgcacagaagtcaagaattgaggtttgggaacctccacctcaatttcagaggatgtatggaaacacctggatgtctaggcagaagtttgctgcagggggaccatcctccagaccccggaatggtagatccaccaacactaccaacaacttgcaccgtgctcctggaaaagccacaaacactcaatgccagcccatgaaagcagctgggaggaagcctgtaccctgcaaagccacaggggtggagctgctcaaggctgtgggagtccacctcctgtatgagtgtgacctggacgtgagacatggagtcaaaggagattattttgtagctttaagatttgactgccccactggatttcagacttgcatggggcctttagcccctttgttttaccggtttcttccatttggaatgaatgtgtttatccaatgcctgtactcctattgtatcttggaagttatccaaatgggcttcccataggaaaggcagtcatactgtaggaggcttttcacttacctttcaagtaatcagcctaagaaacagatattttatattttaagataagttcttgtgcttggtgctgtctttattagttttttactacttagaaaaactaggtcatctctagtacaggtctaagttttttccctctgaactatgtaactttttatatttgcttttgaagtcttttaataatcactctgattaaataattatctcacaatgacatctgattatattttaattaaatgttttaagtttttttaacatctttaacaaacttccccaaaatcaaattctaatttaagtacttttaagcttaaattgactttgggatttttcagttgggccccaaaaaaacatcaaacgatgcatctcccatgatgcttattcgatgggttgtataaaggcactgtcaaataataaagtgacactagctcttactaaaattatatttagatggatgcattattgatgtgaatgctttaacatttataaaatttataaagg

SEQ ID NO: 477211 - DNA, 526 bp, Homo sapiens
tctgtggcacaccggggcaaaccacaggatttgggagcatctgcagggggcaggagggagaaaatgccttttttatgttatcatgctgactctgcaggctcatcctggggcctgcctgagcagccgtgtgggcaccgggactgcagtcctttcccctgcctgccccagccccaccatctcttgcctggaggtcatttggccaccctcttagtgtcaaaggcagaagctatgagaaagaaggataggagagggatgcggaccagttttcaaatccggcaggaggagcaaggtcctggggagcatgtggtggaagctgccagcggggagctttggtggtgccaaatcccctggagagaggaggctgcagccccaggcagcagggagccctggaggaagctgcctctgcagactcgcgggaatgccagctccgggtttcattcctttgttcactgctgcttcccaagtgccagacggagcctggaactcagtggctgctctaaagatactgttgaatgagtaaatgaac

SEQ ID NO: 477212 - DNA, 699 bp, Homo sapiens
tcatggcttctctctgtggcacagctcttgataagtatttggaaaaacccatgggcagaggccacggtcaccacacagaacccacgggcagagaccacggtcaccacacagaacccatgtgcagagcccatactcaccacacagaacccacggacacagcccatgctcacgacacagaacccacaggcagaggtcacgcttaccacacagaactcatggtcagaggccacgctcaccacgcagaacccacaggcagaggccacactcaccaagcagaacccacagtcagagaccatgctcggcacgtggaacccatgggcagaggcctcaccatgcagaacccacgagcagaggccacactaaccatgcagaacctagggaagaggccaggctcaccacgcagaacccacgggaagaggccacactcaccatgcagagccatgtgcagaggccacgctcaccacacagaacccacgctcaccatgcagagccatgggccgactaatcagaagaccagagccagttaggactgttaactgctttattttcactgcccaaaagaaattctctcttttttcttccaactctaattatcaaacaaatactatattatgttttattgaaagatattttgttttaactttaccaaattctgtgcagaagtactggacgccatttccattttcccaatgaagggga

SEQ ID NO: 477213 - DNA, 771 bp, Homo sapiens
cagcgtctgtttccgcttagcaacatgaggacgtttccatcgggaagttggagcacctgggttctcatctgcctctgctcctggctgctccttgactttgcacgaatgaacggaacatctctgcatctgcaccaggttcacactccaaaagacgattatgctgccatccccaccgaggtacagagggtgcaggcagttcacttgagctccgtgactgggagctctggcttgcgagtctgtgttgctcccacctcagtcacagtgctgtctgtgtccccttgttacatttgctccctgctagcctttaagtttgtttttcacaaagttaggaaaagggaaaatggttggggagttctcctttatctgcaaaacaaacagaatgcagaagtattacaggacaagggggtttcaatgacatggctggtgaatggcactgccaggattcaaatccaggctgctggacccagtccggtctgctcagaattgctgtgctgccctccagtacccatgggcaccaggacttgcttagggaataatgaaagcatgaaggttctcaagaatttggattgtagagaaaatcctttgagaaatctccagactgctttccacagtggctaaactaatttatattcccaccaagaatgtatgagtgttccctttctccatagcctcaccagtatctgttgtgttttggtatttttcttacaaaaaaaaaaaacctttttaagttcaggggtacatgtgcagatttattatataggtatatcatat

SEQ ID NO: 477214 - DNA, 538 bp, Homo sapiens
cgggaccctgcgaatgtggtcggctcgtggggcagagctcgcactgcttctggtgccctgcgctcggaatgggcactgcatctgcctgcttctctcatggagggacatcgggttgggacctgccaagggttgggcttccatccgatcgcatctgatagatgggcttgcaaggaatccccgatctcaccccgatctcaatgagagcatccccactctcatctatcctgtggcacagcatcccaggaaagagcaagtccaagctgatttgcaggctctccacgacgggtgcagtagacatgaccagtttatcggcagtcaacgacttttattcccgtatcctttctcccggatcctggtagggttttacgccctgagtgttgttcctctggcagaggcatgtgctgagcatctcacatcgtactcgcagctggccggaacaggaccgtggaagtgtttgacctcaacgccggctgcagtgcagcggtgatagcggaagcccactcacggcctgtccatcaaatctgccaaaataaagtga

SEQ ID NO: 477215 - DNA, 803 bp, Homo sapiens
acaggtgtacgaaataaacactgtgcctcatcgcctaccttagtttaatatcagagcagcacacactgctgatattcagacacctgaagaccagcattggcgctctcagaaatcagcatccaagcagccattgtcacgacggggcagtgaatgccgtgtgctggagccaggaccggaggtggctgctctctgcggcccgggacgggaccctgcgaatgtggtcggctcgtggggcagagctcgcactgcttctggctctccacgacgggtgcagtagacatgaccagtttatcggcagtcaacgacttttattcccgtatcctttctcccggatcctggtagggttttacgccctgagtgttgttcctctggcagaggcatgtgctgagcatctcgtcaagtttatgaagcacgtcacggtcacctgccgacatggcactgtctgggttgtgtctcccatcgtgaagcctgccccagacatcgtactcgcagctggccggaacaggaccgtggaagtgtttgacctcaacgccggctgcagtgcagcggtgatagcggaagcccactcacggcctgtccatcaaatctgccaaaataaagtgactaaccaattttctaatattttcaagagaattattttggaaaatgatatgatgctatttggtgtgattttgtaattttatttcctttcctctctgttcccacttcataatagaagagtttctaaccttttgcatatataaagcttttctctgttaaagggttaaatgtatgtaaatctcttagtatgtgctaagtccatt

SEQ ID NO: 477216 - DNA, 569 bp, Homo sapiens
gactcgtactcgtgtgggtgcatgtttgcagttctgcgcagcctgtgtgcacgttgaggcatctgtgcaggtgccatgcacaggaggtgctcagcgggaagttggagcacctgggttctcatctgcctctgctcctggctgctccttgactttgcacgaatgaacggaacatctctgcatctgcaccagggtcgggaaatgacatggctggtgaatggcactgccaggattcaaatccaggctgctggacccagtccggtctgctcagaattgctgtgctgccctccagtacccatgggcaccaggacttgcttagggaataatgaaagcatgaaggttctcaagaatttggattgtagagaaaagtcactatttttagagttagatgtgatttactcctccttttgcaaacttggaagatggctgtcaatgaataaagaaactggtctcagtgcctgtgaaaacatcgaggaaaaggacagctttaaaaacttgccttctggccaggagcagtggcttatgcctgtaatcccagcactttggggggctgaggcgggtggatcatgagg

SEQ ID NO: 477217 - DNA, 898 bp, Homo sapiens
tgcaactctggtagcagtaccctcggatcactaggggtgatggtgagtggtgccgctgccacttccacactttgattcctggacccctgaatcatggctatggaagaaacagtaccatatattgacactgattcagagcatacacagcattctggaaactttgccccaggcctgcaaagtattgtcacctaccgtaaagttagtgccttggtcagaggcaatgctgtgtggaataccatgatggtggataaggcattccgtgagtccccggatggtagggttggaagaagcattgtgtgcaggacaggcaaacccgtatctgccctttacatcatggaagaagtccaatataatcaacctatcacaagcaccattggatctgctgggtcatgtggcccaaatggcagagcagctgcacagcagcctggacctgttgcagagccttctcctatcctggaccccactcaaagctggcagtgttttgggtcactcaataaacgggcacgagtaacacactgaattctgccagattttcttttacgtattttgcagctctgttcttaagcacatcacttatgattgctatgtgttcttgatgaattggcccttttaatctaacctccatacctttgtagtaagccttattttaaagtatattttctctgatattagtatttaacgttccaaatttcttatgtttacagtttgtgtgatacacctgttgttctattgttgttctttgctttcagcctatctgtgccttatacttttaaattcacttctttaaccaataatatagagttgagtcatgctttttcatagtcttataatttctgccttttaatttaatattatttaacttatgcctatcattttgttatgcatttttcattttccc

SEQ ID NO: 477218 - DNA, 763 bp, Homo sapiens
tgggggagtgagtactgattaatccgtgggtaggcctggaaaaagcaccatttgattggacaaaagaaaactattatcatatggttcccaagcaaagatggccaaataggaacagctccagtctacagctcccagcatgagtgacgcagaagatgaatgatttctgcatttccaactgaggtactgggttcatctcactgaggattgtcagacagtgggtgcaggacagtgggtgcagtgcactgagcatgagccgaagcagggtgaggcattacctcacccgagaaatgcaaggggtcagggaattccctttcctagccaaggaaaggggtgacagacggcacctggaaaatcgggtcactcccaccctgatactgtgcttttctgatagtcttagcaaacggcacaacaggagattatatcctgcacatagctcagagggtcctatgcccacagagcctcgctctttgctagcacagcagtctgagatcaaactgcaaggtggcaacaaaacttccagaggaacgatcaggcagcaacattggctgttcagcaatactcgctgttctgcagcctctgcagctgatacccaggcaaacagggtctggagtggacctccggcaaactccaacaaacctgcagctgagggtcatgactgttagaaggaaaactaacaaacagaaaggacatccacaccaaaaccccatctctaaaggaggaagtctgaacccatagcaaagaagttgaaaaacttgaaaaaaga

SEQ ID NO: 477219 - DNA, 1005 bp, Homo sapiens
atttacacttcttttgtggtggaatgttatcagttaaggtggggcagggcatattcacttcttttgtgattcttcagttacttccggccatctgggcgtatacttggtgcaagtcacaggggatgcgatggcttggcttgggctcgggctcagaggcctgacaaaagggctgcggtttgctgggagttctctccagacccaattcagctgggtccctccttcacctgacgatgtcaccagtggaggcagcagaatatcaaagatggctgcctgctccttcttctggaagctctgtcccaaagggacaccaacctgatgctggcgggaatggtcctgtgcagtctgcagctgagtggccactgagaatctgcacagctctgtgcttgggacccaaggccctggtgccgtgggctcacgaggcagatgtcctgatccatgggttgcacagatccatggaaaaaaacgtggtttcccagattattgagaagggcccatcatgccacacagtagagtgcatgtcatgtctggaagtagaagagaagaggcttgatgaaaaactaagtcagcaccaagaaagacggcatgtttctgtttgcatgaatgattgtgaccctattcatatgcaaaaaagtgggatccattcactaaatagtttttcttaagcaagaacacaagataagagggcccataactcactgtcacgctgtagtcctgacttttctaaatacccctgagtaatggagagtcattttgattcttttcatccttcactgtacaacccaaacttgaatatcccagagcattccataaagaaaaaatgctagagaaacactgaaaatatgtctctaattttgctttaagatgcaaaatggtaaaacagtatagaaaataaggtgtctgtccttgaggaaattacaattcacctgcagacatgaaatactgttacagtgtaagaatactggtgattaggtgaaaaatctagaaactagtacttctgcgttatac

SEQ ID NO: 477220 - DNA, 864 bp, Homo sapiens
aagtattccaccaccgaattgaaaaccttagtccaacgtggaggccagtggttctcaagaaaaggtgattttgtccctcaggggacataatgtctgaaaatcattactttctttcaaaatttttctccaactatgaacagttaactctcatgttcttaagagaatttcttattcatgaaagtaaagctcacctagtctccctaccgacccatctagactgcagtgtgctggagcctgcttgcaccgcttgcaaaaagttattggtaaaatttcaggaatttggcaatgtcacattgacatcagtcaaggtctctgtacccttcaaacggaccctcttttttgctgcagtgttcattcagtttctcctggtttcagcaaaagagcaaagcatatccccaaatggtagaattcaaataggcacaagtacgaagctttggtcttcttgtgcagcagaactcatcctgggagagctggctgggagcaagcaggaggcatgctagagtcagcaccagaaactggtgaaggggagggggcaggacagtggcaagaggatagggcagtaaagggagggggaagcatgtcacacaagggaatgagagtaagtattataattgtatatatatttatatatattttctttcaatttaaaaaaatgtctccatatttatgatcgtattctttccaaaaaattcttaatgtattttatttgttcttttattttcacttgaatttgtcagattttatattctcaaggaaccaactgtttttttttgttgtttgttttctgtgtggttgatttctgctttatcttcagtcctttaaagaaattttttgatttatctaaacagaaagaaaaaagctggc

SEQ ID NO: 477221 - DNA, 516 bp, Homo sapiens
tgcaatacggttatctgggttactagcagcgagtgtgtacagggtgggctgcctgcatgcgcaatgccttccttgcacttgggaggtcttaaacattcctcaggatggtcttctgtaagcttccgcaaccccacttgtcaatgtaacttgaaatttgttctttgtgccctttgcaagaaaccgtacctggagaacagccttaggggagattttttggctgcaggatatcagagttctttccataaacctgtggctggagttgctgcaattcctgcagggaggaccctcctgtccaaactgcccagtcttcctgataccagcagagaaaaatggctgattggagccacagtgatggcggccacccctctgcctgggaactcagtagccttagacagtgtccagcctgctgctgctggctgcagcccaagcaggttgcacagctctgtgcttgagacccaaggccctggtggggtgggctaacgaggggatttcctggtccgtaggatgcacagatcc

SEQ ID NO: 477222 - DNA, 1038 bp, Homo sapiens
agcgacactccaaagatcctgatttaccatcaagtcattgtgtcacttcctatggaccctatgtgatggttaatattgattgtcaacttgattggattgaaggatgcaaagtattgttcctgggtgtgtctgctagaataaagcaggcagaagaaggtaaaggagcagacttgctgagtcctccggccttcatctttctcctgtgctggatgcttcccgccctcgaacatcagattccaagttcttcagcttttggactcttggactctggacttacgccagtgatttgccagggactctcaggcctggcaagactctcaggcagaccgaaggctgcagaggacaaaggagcacatgctcaaaaagaagtagattgggagtgcctgcggacccagagactgaccatcaaagaagatttattttacaccttctggcacatgaataacggatcaataagtctagagcagttactacttctcactcactatgtccatcaacataatgtcatcaatgtaatggatgagtgtgatatattgtggaagggaaaggcaataaagatccttgcaaactaaattatggcatagggctgaaaagggctgagggaggatggtgaagtgtactgctggccttgtaagctcaaaccaataattttggtgggccttatggacagatatggagaaaaagtgattttccatatcaatagctacataccaggtgaagtgtgttttttgtaggcaacagattgttaagtctttttgtttttttaaaataatccattcagccactctatgtcttttgattgtgaaggtgattttctctggaggtatgatttcatttattgctttttatatatcctgtgattggttcccagttccttattaagtttgcttgctaaggttgtgttttcctggatggtcttgatgcttgttgatgttcaccagtgtctgcgccttaaaaagttaggtatttattatagtcttcactgtccaggcttgtttgtacctgttcttggaaaggctttccaggtattcagaagga

SEQ ID NO: 477223 - DNA, 628 bp, Homo sapiens
gcttcaggggcaaggttctcatggagaacctctgctagggcaatgcagaagggaaatgtgggttcagagcccccacacagagtccctactggggaactgcctagtagagcaactgtctccagaccaccgtcctccagaccccagaatggtagatccactgacagtttgtaccatgcacttggaaaagccacagacactcaatgccagcccatgaaggcagctcgaagagagactgtaccctgcaaagccacaggggtggagctgcccaagaccattggaaaccagcttttacatcagtgtgacctggatatgagatgtggagtcaaaggagattattttggagctttaagatttgactgcccctctggatttctgacttgcatggggcctttcccagagattaccactactgatatgttagaatggaagaaaggcaagaagcaagatggcagaatagaaggccccagattgtgccccactatgggaaaaccaaattcaacaactagctagataaaaatagcaacttcataagaatcaaaaatcagatgagcactaacagtacctgcctttaactttatattgctgagaaaggcactgaatagggtagaaaagaccgtattgaattgct

SEQ ID NO: 477224 - DNA, 500 bp, Homo sapiens
tcatcagacttaaggaaaggcacgagccctgtcatcaaaggcagacatgaagaatgaaagactcaggaaaaacagtcaatttttatgcttgggtttgttgaagaatggacagccttgcagaaatgtgactggactaaaagtggcagaagaacttttccccatcactgcttcagggttacatcaagtactgcttggctactactggtgttccctcaaggcccaaggcctcttcagtcagcttgtggtaaatgccgccaggcctaggattctcctttcagggcagtgggctcctctctgtcccacagaaggtccagaaatgctgtccaagagctcagacctgaaatcaggtacccaaaaagcctgtttggtgctctaccccactgtggctgagctggatcctaagctgaaagacaaaatcctctttactcttccctctctttttctcaagcagaaggggtctctccctgtagccacttgagctgggaatgtgctggttcaca

SEQ ID NO: 477225 - DNA, 1826 bp, Homo sapiens
ctctgcttaggtctgacaccatgagctggtacactctcaggcagctgctcaagtctctgcacctgttaccttgtcccacacttgaagacaccctggtcatcccacttgagcacccagatctttccctggactgctttctgctgggtgtttccaccactctgtttgagctcagactctctggaatagaccattcctctgtgaggccccctcacaccctggttgggctccaaaatgatgcagcaggctgcactcccttgagggtactcccccaaccccacacagctacctttccatgggatgccaacgtggagataccatcacttctcagaaatagctcctctccccagtcagcctccctcactcttctcagcatggactccttatttggcttggcacctcctaatagtctttggactgtgtcttatctgacttcctttccttaaataggacaccacaatgaagattatataaaggtaacaacctgtgaaagtcaaatcaagtattagagctggaacaaacagaatgcatccagacccagtgtggtcaaatgacttgcccacgggcattgcattcttagagtcaatattcggaaacgaaatttacttgacatgacacttctctacaccatattagaattcatgaaaatataaatatgtcttaaacacttttttacgttaggcgctccacacctgcctctgtaggtctacttgtcggggtcacatattgttgccgaccatctctgccagcagatgtcagcaccacatgcatatactgacatttttattaggctaagagacacctcataaataaaggcaagaaaggatggttaaaactcatgaggtaaatctattttcatctataatacatacagttagctttcatgtggattttctaattataaattttgataatttatgtttaaaatgttaaatgcttttatcacttgcctattacgtatgtatgtctgcatttgtacccttaattttcagtgtttaaggcatgtttatgaataagacagtagaaaaaaaggaagaaagtgataggtattgggtcacgcaccttgtggggatactcatatatagtatctccaattaaaaagtgaaatatcacaaataaattagtcatcttccaacttcgtgtggcagttttacctttaacatactattttttaaatctacttttttgttaatataaagaaaattatgaatcatgactttactaattcatacatgttaagtgtttggctaaatgggggaatgtaataaagtatagtgagtttttcttaaagcaatttcaaggtttcacatgaaagtttcaacatagaggctttatatgaaaaggagctcaaacaattttatttcaccagtgtatacaggtaacatgtaattttatactaaaagtaaatttagagatttttctaatctattttcatattatagataaggaaataaagcccataaaaggttaaagactcttaacaaattttccaaattcccaaatcatggtatctgaagggggcagagattagaatttatttctcctaggtccctattctgagtccatccttgtgcaccaagcctcaaggccaacatattacctgttaaatgaatcattctatgtcatattaaaaagtattgcacaatcacctctttttcaggaaagtgtgtttttagaatcaagaccatgaattgtatcttattaaaagctatttaatagcaaattatattgcctattactttaatatttatattataggcactttatcacttgtaaataaataaaattgtatagcactaaataaagatgcctattctcttaggcaatcc

SEQ ID NO: 477226 - DNA, 636 bp, Homo sapiens
aaaagtatctggaggcaacaataatgaggaaagaggagacaaattcacctctaaaatggatggcaggaggcaggtggggaaaaacctatgattatttgataggatcacataggaaacagacacagcagaaatctggctttaggttagagaaaaaaggtgaagactgttcactgaaaatgacacttcagaaagagaataggccgtcaagtgactcaaagaagaaaactgagaaagagggagcagaagattgtcttgacatcaaaggtgctaaagaaaatggacctaataatattgcctatttgagagagttgttgtgcaaattaaaaacaggaaaatgttgtaaaagttttagtgtatttgctggtactagtgagcactcaataaatgtgaactattgttggcaaagcaagggttaaaaggagaaaaggaggagacttctaagttaaaggaatattataagccaataacacagcagcagagcttagccagtttcttagctctacccagagtctatggatatgcaaagtctcagaaacagctggaaaaaccatctcagctctacctgtggtttgaaaactatttatcccttaggatggatcttcatccttctgtgcattacttcagctgtgatcacaa

SEQ ID NO: 477227 - DNA, 586 bp, Homo sapiens
tataattaccctgctaatgctgtacgtatggctcacacccagactcactcctggccagagagagagtaaatcaatgtcgaaactttctacgattcctcaagtgtttttccagctacctgccactcgcccaccaactccccttgggcctcagttagaacctgacattagcatttggatcagtaagaagtcagtgtttgctgactttcagtctctgaaattccagtcaggcagtcctcagcacgaccaaagtttcttcattgtaaaaggtaatggacttggaatagaactaccactcttccagcaagggcctcagccctttcgtgtgaaaccctggctcccaagcaggtctctgatccttagagctgccagcgtgaggagtatgctgatagggagacctctgggattcagggagaaaacaggaggagtcagtggacttcagatacaagttcctggtgagataggattaaatagatcagaggaggctttgtaatattatcgaaggctccatggagaaggatggctttcattttaatttgaatgctggaaaaacatagaccaaggcatggatgcaggtcatttcatctct

SEQ ID NO: 477228 - DNA, 1535 bp, Homo sapiens
cagcgatatttctcttacccatgttcaaaccatcagctctcatgagacttattcactatcatgagaacagcatgggagaggcttgccgccatgattcaattacctcccaccaggccccttccacaacacatgggaaatcaagaaaatttcagcaaggactggctgcaatccatgagtattcatgtttccaacaggaggagaagccaacaactgaaagaaggaggaaaagtcactcaactgttcatcaagaatgcactgagcaactgctatatgcatgcactgacagccactggatgggcacaaagagaaagcagcaaaaatacctgctgtgctctcttcccaggactgttggacaggatgaaggctgtgaaacagcagtgccctggactcagcagcatcagagaggctggaagtagacacagcatcatcaagtttatgattgcagagaagaaaatcaaggttacaaaacagcaagggggaatgatcccagttctctgctcctcctgcacatgtattcccatgtccatgcagcccgaggctcctacggagtctggagggaaaggcagagccacggggaacacagcagagcttttggataaattttcgatcctttttgtctctcttgctccatcccatgtcagagctacaaaattatccaagaattatccaaggcatcttttatcaaaagctgagaagctacaacttacatcaccagaacccaactcagctagaattccagatgtcatttatatcctaggtagggagaaggtttattttatcttggtgaagaatatttggaaaaactttgatgtgcatacttttaagaaagcaaagaatctgggcaagtctttgggaataatactcaccacctaaaccacgaggatgcctatattttcacaataaaatatctatttaagaacttttaacttacaataatgattataatagccaacatcaaatggtgcttactatgtgcaaagactgttctaaagctttccatttattaactcatttactactattaactctattagataggtactattattacccctattttacagatgatgaaactgaggcacagaagtaacttcagcaacatcacttatttagtaaatggcaagtccacgttttgaatctaggcagtttagatccagagtccctgcttgtaactactgtatattgtttccttttttaataaattaattcattgaactttaattcatttcaaaattcaaacgactggttttcataatcatctagatttattagcaacctctttaggccttttgtttctaagtagcatggtgcaaagcaaaggactgaaaatagaagtgtgctagaaatctgtaacttcagatttatatgatgtgctgactatcaaggggttaagctaggtactgaacattcaatgtccttgtaatagtatagtgctatcatgaaacaaatgcagatttttacgtacaagccttttgtaaattaaagagatctattttttaaagtggtcctatgttatttatgtatatcattgtttt

SEQ ID NO: 477229 - DNA, 1341 bp, Homo sapiens
tagtgtctacaaatcctcttcggaataatcccttccgagtaccggctcgccatgtgtagtgtggtcctacaaggacttcttcagtccagacttggtggatcagatgatacatagaaatggagaatgggttgcaaagtgcttcccacagcactgccctggagcagagagggtatagagtacagggagacaaagtagggagcagaaaacactgcacagatataaaaaccccactcctaggaaaacaagcagctacagcaggcattttgctgaacgtgttgtcagggagaaatacagctgataaagaagcaaatactgatagaaaggcttcccatgctctggaactgacaataacagctctgaatgttccagaaacaggaggccagtgtgagtggagtggagcaggccaggaggatagtggaaggagaggcagtcagggcagcaccatggaggatcagaacagcagggctttgggagcccttgtggtggcctcttgctgctgttactggaagggtgctgtggctttaactgtaagccctgaaaccctgagcgtgttgtgacactgttgtgacatttaagaagagttacaccagacaatttagatttcactgtgacatatgctgtataaattctttaatgtttagcttatcttgcactaaacagcagaagaatacttagaaaaggttgattgaggaaaaaattatagacatctatatttggctatattcacaccgatctatgtaaataagaaactgtctactcgtattcataaatatttaattcagcaatattataaatttggattcttacctgattcttgcctgctcctcacaatctctgccctcaatttgcctgatttcctcaagaggtgcatggtagggaggatgcatctcctcactcctgatgtttccttccaggtggaaatgttccatgagtaaagccgtcctggtccccttccctcttctcacttagtcaaccctttggttggcagagtaagttactaaacaggtatatgattatatagtcaacatcccttcataacaaaaatcctcaacaaactagcatcaaaggagcatacttcaaaatactaaaagccgtctatgacaaccctacagccaacatcatactgaacgggcaaaactggaagcatttgccttaagaactggaacaagacaagtggtttaccagtaacacctgagatatagtttgactctccggtgttctttcagaattcaggaccttgaagtctctatgggaataattcattgtgacaagtgagggatctaatgtagatgtcacagtcactgatttaatcataaatcgtaaattgcaaggtatctcagg

SEQ ID NO: 477230 - DNA, 662 bp, Homo sapiens
gaggcctccccagccatgtgaaactatgggatggccagagaaattctctgagaagtggatattggagcgaaggcctgaattatgtataggagttgtaggaaggatgggctttccaggcagagggcacagcaagagcaaaggccgtaaggctggagtgtgcttggcatgtgagagctttttcaatgaggccagggtggctgcagctgaagacaaccagtctgacttttgtactagttatattatgatgaccccatcagaagcaccactatcacaaacagaatggcagttaatatcattgagtccatgtttctatgagaaaacgagccctgaggagtgtatgcagcttctagttaagacaccttggatccactttgaaaacctttggatccactttgagaacctttggatccactgtggtattcttgctaaggtcacgttctctccaggttgctcctaaatgatgattgactttattgaagtataaatgacaaataaaaatgtatatacttaaggtcatacaatgtatatgcacatagtgaaatgattacatcaagctaattaacatatccattacctcacagttacctttttttgtacctgtggtgagaacgcttaagatatattctcttagtaagcttcaagtatggattactattaactat

SEQ ID NO: 477231 - DNA, 733 bp, Homo sapiens
tttctgcaaagcttggtggatttactacggtttattttcattctcatcagttaggaggaaatggaagaaagagcagccaactctgaggagcttgcagccccgccccctgccggggtttgcacttcggggcccacaattcgcacattaccacgggataaccaggaagatagcagtgccgcgcctctctgcctcgggggggggggctgcttttcctgtagcggaaactatttgtgctccccatgccaagcaatagatgttgtccagaccttaactctaaggagattctatggtatttctattccattaccagatgatgagaaaaagagccctattgacacggggctgtccatgcaccatggtagccctggggaggaaagctggggacctgttcctactggctgtcagcatttgctcaatttagagactgtcagtgaggaagggagaagggtgtgtgagcaggtggaagctctgaggggacagacataaaggagaacttttaaatacttgggactgactgaaagtagagtaggcttccttgagggatgatgagtacctaaacattgtccattgacgattttggggaaaatattgaagagagaatccttgtgcattaaattcacctaagccacatatgcttatgatgcaatctgttgtactgaatgaactttcttccttgttgtcgtgtgagtgttggcaaccaaggtcagaccatgaatgcaaattgcaggtgacc

SEQ ID NO: 477232 - DNA, 703 bp, Homo sapiens
tcctaagccatgcgttcctgcagctggcagagttttgaagggaaacagagcctgttaaccacaggaaagagagagaagtggcagggttttggaagggaggtggacccaacagattcacattcattcacactcaccttccaggatgccggggcgaggccccggttgaaacaggaaaggttccctcgtccactctcgcacgccctgcgggatgacaggggagcctttcccgtttcaggcattgccaaccacagattgggtgctgactattttgcagccaatgattcagatgcgggtattgctgcatctgttttgcgtaatgaagttgagctgtgtgtgatatgtgtggtagctagttatagagaaagcaacaataatatacagggtgctgatttgcatgacttgtctgaggagagagcaattcaaaaacaggaatttcaagaggatggagcaagccataggcccaactggatccagtggctttatggatatcaatagaacattgttgctctcccagattttctttatttctttggattcattttcaggtttagtttttctattttgtggcaaaagatatgcctaggtagtttcaaacttagatattactcatgaatagtgattgaaagtaaaaggtatgaaatcttctctttctgtatctataggagttcctgaaaaagatttgaattgactgtgtttatgtcac

SEQ ID NO: 477233 - DNA, 654 bp, Homo sapiens
agcagcagtggagagagagatgatgaaaatgaaggtaatgcttaggctcctaccccaggagactggggatgtagtgatgctgctgtcagacatgggaaatgtggaggaaggggaatgggtttgcagggaaaatggagtttcagctgtgacactcactgtgaaggtctgtggcttcactcctgaaatcagcgagaccatgaacccaccaagaggaatgaacaactctggacgcgccacctttaagaactgtaacattcactacgaagcaagaccacaaacccaccagaaggaagaaactctggacacatctgaacatctgaaggaacaaactctggacacaccatctttaagaattgtaacactcaccgcgagggtctgcggcttcattcttgaagtcagcaagaccaagaacccactggaagggaccaactctagacacattttggtgacccagatgggactattgcctatcgccaagcagatccctcctcagaaaagcaggcctaacaaaagctattcctgaagctaggatttggggagcctcagaaattgtatccttcctattcgtataagtgaggacaaaaggcatcactcttctaactctggagatcccttccctccctcagggtatggcccttcacttcatttttgggg

SEQ ID NO: 477234 - DNA, 3497 bp, Homo sapiens
ttttctgcatctgagtagtgctttgaaaaccccgaaacaatgctagtatacccagcattattaaaattcttgctctggttccttctcatctgcgatactggcacttgtaatttttgtaaatttttcatgcaggaatataaaagggaactaaaaggaagtaaggaaatggaaaaagaaggaaggaaggaaggaaggaaggaaggaaggaaggaaagaaggaaagaaagacagacaaacaggaagagaaagaaagaaggaaggaaagaaaaagaaaaagaaaaagggagggagggaaagaaagaaaaagaaagagagaaaagagaaaaagaaaggagggagggagggaaggaaggaaggaaaaagcagaaagaagagaagagaaaaggggagaagaaaaggaggagaggagagaacaagaaagaaaggaagaatgaggaggagatgagagagaaagatttaaagtcagagtgacaacaaagaaagattcagaagagatggcaattttttgattcataattatagttatgccttttttaggagattctgttggaatgcctggactggggaagaagagagatatagaaaaagacttgcatagaaacaattatataaaagatagtaaatttcttaaacatataataattattattatacattatattagcaagcatattaaaacttgaaagaaaatcatttatgctgaataaaaatcaatatttagtggtagagataagatatgagaaaacttgattatattgattgtaacatcaataaagttaaataccaatcctttctgctaagttttattatgtaattttatcttttgaatactaccttccagtaaatatggatttttaaaagaacaaatcatgagtcattgtctattgataattgccaaactgaacagttattaatttaacaatacaaaataaatgtaattttataattttaaatatgttaacatggatcccactgagaaagcaaatattttttctttgtacattgtctttttggagaagcatagaaaagaagcgtttaagtgttcttttgagaatcttgtctaaatttacacagtaattgaattaatagcaaacattttaaggtgggcaaaggcatgaatctatttagcacagaagaaagaataaatgatgaatacacataaaaataggtaacaatattactaataaacaaatgcagcattaatagtattttcagatcccttatgttgtgtattaaactggaagattatttacaacataataatcatcaattttgttgtaattcaagacaatgacatacttctactcccacaatgttggagggagtctacggtggtatagacatcctggacggtgagttggcaataagtgtgtctcaaattcctggcaggtattaactataatatttaattttaaaaacgtgacagtggaataataataccaatttaatgaagcgggactaatctaggaaggaaacctgaaaatatgattccaaattcttctgattttgtctaatatgacgatattaaattgctagaaagattgttttatatatttttcaaaagttatcaagtcattcactttaaatatgtgtggtttattcaacgtcaattatacctcaatgaagctatttttaaaaaataactagatccagctcctggggaaattaatatctcaccttagtatctgtgaaataaaatattttttaaaatatttatctatttttgttgctttttaatagcaaggtttttcaggatttgtagtttgtcatattgttagaaatggaaacatcttcctagatttttttttctccacaattttggccatgagctattgacgaaatatggctttcaagcctaattataagagcacagttgtacctgtcattttttttctagtttttcttcctcatgaatatgtgccctggacttttgaaatctttattattttttaaatcacaactcattaactaatcttaccactcttgggaaccacctctcaactaaatattccctctgtgcttgtgtcctgttcaccagaaaaatgttaaacaggacagagacatggagaaaggctaaagaattccaccaactattaccttccattggaactgaatcatcagaatgtttgtttaacttaattccaaattgcctaacacactattgccatatcctttatagaaatttgcttatctatattaatatgatgatataccaatgtattaactctgaaaaataggaagaggattcgattattgctttaacagcctctggggtaccctacttaataataaattccagaatttgggaaatcttatttgctaaatcattttccacaattcatgaatattttcttctgccattaccctataatctttgcttaaagattttcggtagcattgctcttattatcgtgttatttgcctggaatgaaactagccaagaccaatatgtctactccatggaattaccttagtgccccagatttcaatatcatgactccctgaaaactctttagttatacttaatggtcaacttgctatgcttagactaaaattctcctatgaattggggggatatttaaaaatgcaacacaggtgcagaaaatattacaagtttttatcacgtgggataattcatttagatatgaattcacatatctaattcaaatttcttaagtaagatttttgatttgagatggatttttccagtattaattatgtctttcttctttagattgaatattgacattatttattttaaaatctttgttcacacttacactcacattccatgaatataagttatggaacttgagatacagcatttttgtgtttcctgtctaagaaaatctattgagtaaaaggaactatctggaaaataacatacatcatcttttgttattttgtaaaacctattttaacactcagccccaagcagagatggtatctacatttaataacagctacttcaaagatatgcagcaacatatttgcatatgctaccactagaataatttatctgcttaatttacggatattaaaattaattgtaaaatgccactaagggaatttgtcttttgatgttctctgtaggggcaaatttacattttgagattagacattaaaaaaagaaaaacaaagcagaaaagaatgtatgttatgtttttatcgtgtgattagtgagtaaggcacccgtatatctcaacatattattaattgagtgttcttagggatctgtgtttggaatataccagaggaagatattttcagtactttatgaagagctcaatttcccttcttaatacataatgctatggctgctgcattttgctctaaaggacattatgccaggcatgtgaatattatggaggtatttgctggtaatttatcatttaaaggttaaaaaaccttttaattagtaagtatgtaataagaaacttaatgaaaatgtctaatgaatttcatttcacataaaaggatttttttgtccatgagag

SEQ ID NO: 477235 - DNA, 579 bp, Homo sapiens
cagataacaatggcgggtggaggcccaagggctcttaaatccccttgtgttgaatgctgccttgcctggagctcgcccttcaggaaagtgggctcccctctggcccaggccaggtccggaaaagctgtccaagagtcaagccctggaatcaaggaccccaagggtccacttggtgctctgccttccgaggtcatgctgatacttaaggtgcaagacaccaccgagttcagtgtttcaaaattgctatgttcgttctccctcagtgctcaagagacactctctgcaagctgtggctgcctggtgttggggaggtgtggcattggcaatcacaactgtgtttgctatctattcagtgcctctttcagtgataggaagaataaagcaggaaatgtgggctgcagccagattactaagaatctagcatgccagccgaaggtgtttgctatttattgagaagctattgaaattttagagtgtaaaaaatgacacaatcagaacagagtttcaggtgacactcatcattttttgtttttgttgcaaatacttttggaaatagtcacaaattatttgccaaggttg

SEQ ID NO: 477236 - DNA, 589 bp, Homo sapiens
tcttctcgccttagcagctgaagactgacactgcccgattgcctcagaagccccctagaccatcagggacgcggagcttcagcttaacccacaagtataggacatctctactccttccctggcaaccgatcacatgcccattaccatcccattaaaacctaatcacccttaccccgctcaatgccaatatcccatcccacaacacgcattaaaaggattaaagcctgttatcactcacctgctacagcatgggcttctaaaacctataaactctccttacaattcccccattttacctgtcctaaaaccagaaaaggcttacaatttttcaattcatacaaaaccgtatccaggccatcaccaatcattctatacgacaaatgtttcttctaacaaccccacaatatcaccccttaccacaagatctcccttcagcttaatctctcccactctaggttcccacaccgcccctaatcatgctcgaagcagccctgagaaacatcgcccattctccctccataccaccccccaaaaattttcaccgccccaacacttcaacactattttgttttatttttcttattaatat

SEQ ID NO: 477237 - DNA, 2595 bp, Homo sapiens
atacacatctgctgctgattctgctacttaaatactcccaaaaaggttccactcctactccccctggaccatgggagtccctgaacacatccccttccttcactcctttcacaatggctccaccataggctgccatgctgcaccggctcaaatgcctgctgccttgaagaacatggaacaaagtacaaatctgggcagtggcttctgtggtataacactggtgactagaaagaatgaggtggtctcagatggagatgaggaacttgttgagaactggagtaatggtgactcttgttatgttttagcaaagagactgctggcattttgccctgccctcaatgggtggaactttgaacttgagatgattcaggcactctctgtacaacttcacttggagcacaaaactggacgatcacacgtggtttctctggaattctgctatatgcacattttccctttgcttattttaatatgtatcttttaactataataaccagcaagcacgagtacaatagttttctgagttctgtgggaattgaacaatgagaacacatggacacaggaaggggaacatcacactctggggactgttgtggggtagggggaggggggagggatagcattgggagatatacctaatgctagatgatgagttggtgggtgcagcgcaccagcatggcacatgtatatgtatgtaactaacctgcacattgtgcacatgtaccctaaagcttaaagtataataataataaataaaattaaaaaaaaaggaaagaaagtggctttcagtgggaaggggagctggaaaggagaacatttcgcaaactagaaaagatgtaaccagacactttaaattcaaaaattgtatgatggcttaaggttacagaatattttctgaacccctatactttacacatgaattcttccataaataatttttatctcagaaaagagcctcaatataaagctccaatataaataaaacagagaaattatcttccactttaaaagtttattataaaattttatattagtgtacctggtttgacattgaaacaaatgcttatattttaagaactttattatatatacagttgtaactgatattagaatttatagtatataataaaaggcaatacacatagaaggtagcatttttaatatatattttatctaaaatttactgtaagtacttgattattaaaacatttttcctctttgtgatgcaaagatagtgtcaattctgtaatttttgttttgctagtactctaatatgttatttaaagatgttgtaatgagtaaaagaacaaatttacacataaagggtaaactttaaaaatcataaatattcaaaaatatctctatcagcacaaaattaaatgccaattagtatacagattataatacaaatatattggtaatttaatataaataaataaataataaaaagatgatggtatttggaggccagaatgtcttactctacatcaacatgatttattaccataacattattcaataaaataagtcatctactatgtataaggctttaaagctttatatagttgctttaagtaacaaaaaaaatttattatataatccctactttttctatgttaaagctgcttgaagaaatgatatggattcctaaaactttaataacagaaatatgtatactttgcatacacatttgtgtaattttatgaatatttatcagtttttaaattttcataagagccttatatatagttaagattatcctgctttactgaacactgaaatttggatctatttgttagggcaattttacctactgaaatacatacaacttagagccttaaagtgttaatttaaaggatgttcattttttgcttatgctgttttgatagcagcttggaggatgggatatgagaggatgttttctggttcacaacgacatttcagaatgcagttttacagagtctctgctgctttcaatatgtggcttctggatttatcctgtaagttaacatctaaccagcagataggataaagaaggtaatggaggacaattcatgggaagattctattagccagaactggaagaggtgtacattactattgcacatatttctttggtcaaaacttagtcacataaatgtaattaactacaaaagatgctagaacatatgtagtctaactttatgccaagaagtaagcaaaataaatttttgaagccaaatatcctacattgcagaaatagtgactcactcaatgacatatagttaatagagacattcagaacccgtaactgtcttctgatccagtgaaaagtgctgcatccacatcttaataatttgttatttggtcattttagtgctttctaactcataaaaattcactttcattattctgtttgaaccatacaaccattccatgtgaaagtgatattctcatagaaatttttattgtaaagtattactaacacaaattgtacaggcacacaggattgggcataaagccttgttctatcattttccagctgttaattttatggagattagactttatcagttactattttcttagaggctaaaacactaccagcatatgcat

SEQ ID NO: 477238 - DNA, 2166 bp, Homo sapiens
tctcatcacaggcagcgaaaataccagtatgtctggagctatggtggcagaggaaattgtgatcagagaagttcagctggaaacctctgcagccagtggcgcttttgctggagttttgctcggtcccactgggcccagttggcctggcaggctgtgcttggcttatgctaccggcctgataagctgccaagagcaatcggagcggctagtggtgtgtgagcgagtgagtgtggggtctggccactatacacagccagggatgcagtgggcagctctagaactttgtgtgggggcaagagggaagtatgctgcagccacaagcacaggaactagcaatggcctggccttgcagagatacagggaggagagtggcctgaaagccgtgattactatctctgcgatgaagtgtatggcctgcggcaggagaggcagttatactctcttctcaaacattaaccccagtggcctgagaaccaactctatcccccacagggaccatggcctgctccgccgaaagagagtctgagctcagacccgcctaaccttgcccccatctgggaaacttcaatgatataataattaacagcatttcatgatgctacaatctttcagcacatattttttaacattttaaatgttagcctctttccaactcagaggagattcacttgcttaaagagaaatactcagaaattatgatacttttgaggtgattaatactattcatattaaatatctcttaaccagaatgaaagtagtaatttggaaattatatagaaagcattatttttgtgtttgtgagaacagattaactatttacttttctctaaaagcaataatttattattttaaactaatcaaatatttctaacaatgtattctatgggaatgttaataaatgttttacagaaattattttagaattgattttttcaattgccaaataaattatgtacacttattaaaatactaaacacatatgtagtcagtcattagtctttgtttataaaagccttttttcccattatagtcacctttcttagaagtcttttaaaacattattttctggacttcctttgaaattttaataccagagatatactgcatacatatacagaaattatattaaatggatgaatttctgtgttgactatacacttatgagcgttccaaaatgctgggattacagacaaaagctaccatactcagctaagaatttttaacttgaatatatgctgaatattgtctaatacttttttatgcattaaatactgtgatttaattatgtgaatatttaaagtctattaaaatgacaaattatattacattttaaaatgaacttaattttatcatagttttagatttacaaaagcattgtgagttctcatatgctccaaacttgtttttctgtattgttaacatatcacattagtatgctaaatttgtcacagctaatgaatcaatactcatacatcattactaattaaagtttgtactttttcaaattaccttagtttttacctaaggccatttttgtgttctaggatcctatccaggatgccacattacatttaattatgttaaatctcagcctcattttggctgtaacagtttttcacacttttcatatttttgatgaccttgatggtggggaagaacactgctgaagtgttttatggaatgccccacaatttggatttttctgatgttttcctcatgattaaatggtatgagggatttggtaaagaaggccacagagataaagtgccatactcaacatgtcacaacaaggatacatgctatcaatttgacttttcatgttttatattctccttattccattggctgaaatagtattttttcaggtttttttactctaaaataactctctccttccccctttttaatattgtactcaagaaggaaatcacaatgcccagtccacatttaagagtggaaagttatgactcacctcctagagtggggaatatctacatattttatttagaatttttctgctgtgttttgtaaatattctatctttttaaaaaatttttctgtagtcattttttatgtcagtatgggttaatggatatttactttatagcaacatattaatataaggtagtacaatctaataccatattacatatattgctgttcaaa

SEQ ID NO: 477239 - DNA, 912 bp, Homo sapiens
ccagcaagactatggacaatttcaatagcgtactaacctttaccaaggttagcgtactaacctttaccaaggttagcgtactaacctttaccaaggttagcgtactaacctttaccaaggttagcgtactaacctttaccaaggttagcgtactaacctttaccaaggttagcgtactaacctttaccaaggttagcgtactaacctttaccaaggttagcgtactaacctttaccaaggttagcgtactaacctttaccaaggttagcgtactaacctttaccaaggttagcgtactaacctttaccaaggttagcgtactaacctttaccaaggttagcgtactaacctttaccaaggttagcgtactaacctttaccaaggttagcgtactaacctttaccaaggttagcgtactaacctttaccaaggttagcgtactaacctttaccaaggttagcgtactaacctttaccaaggttagcgtactaacctttaccaaggttagcgtactaacctttaccaagggtagcgtactaacctttaccaagggtagcgtactaacctttaccaagggtagcgtactaacctttaccaagggtagcgtactaacctttaccaagggtagcgtactaacctttaccaagggtagcgtactaacctttaccaagggtagcgtactaaccttttccatgtaaaatgttacatgaagcaaagggttgataccttcagtattttttaatatacttctcctcatctgtgtttttcctgttgtttttattcccccaattgattgcccatctagctgcaaattcagctctaattttggacatctattttcttctgctagctattggggacactaatgagtcataggtttggtctctttacatgatctcatatttgggggag

SEQ ID NO: 477240 - DNA, 719 bp, Homo sapiens
cggagatggggggtcaagaactgtcttgattctcactcccctctgctgtgccttggtgtctgtacttggttccttcttggcttgatcacaatgagagatgttaacttttctttaaactggagtcgcttttctccaaatttcagaggtggaggtgaatgtggaggtgaacgtgaaggtggagaacgactgaatgaagccacaattgctcagaagactagcaaggagccttccttgagtgccttcactgatgacagtgtgctcatgcgagcagaggcctcccaagctgctcgttgtgcgatcagacttagatggctttctgcctcgtttgcaggaccattttcagtaatactggaaaagaagaacctgaaagacttctttaaggattctccaactcttagactagcaagccatgtcaagaacttgtcgtcaaactttgccagcaatacctatacgtttaggtacctatgtttgtttgttcattactctgagggtctccatcagcaccctggtcctcacttatgacaccagaattgttaaaagatctcacagcctagtggggagaaacagtattaaacatagaattttcatacactaagataaacaaagcagtagagttatatataaaaggtataggggaggcagcaaaaaagggagtaatacatatttccttttttattgattatttgattgtattactttacttcatttctgctgaagaa

SEQ ID NO: 477241 - DNA, 1654 bp, Homo sapiens
tcatcagttaaggcaggaagaggccattttcacttcttttgtggtggaatgtcattagttaaggcaggaaccagccatctggatgtcattccgcaagttacttcctccttcctttgttctcctctgcctttgcctcttttaaaaagttctaagttgctagccatcaggacaaatacagaatatgaggtcccattccagccaatggaaaccggacacagcagtaaggtggatgcatcaaattataaatgaccctgtctcctttgttcggtgtactctcatggcaaaactgctggcgagtgtaccccttctgcagaaaacctttctggtagctctctatcgcatcgtcaacctaattaatcttgccattaagaaaagagatttgtggaactttgaacttgagagagatgatttagggtatctggtggaagaaatttctaagcagcaaagcattcaagaagtgacttgggtgtggttaaaggcattcagttttaaaagggaagcagagcataaaagttctaaaaatttgcagcctgactacgcaatcgaaaagaaaatcccattttctgaggagaaactcatgctggctgcagaaatttgcatgagtaatgaggagctgaatgttaatccccaagacaatggggaaaatgtgtccagatatatccagtgcattggcggcatcgtgggactagaaggcagtgacccccctggacccagctttcactatcttgtgtgtgtctattatttctcgacctgccgatccgcctcggaaggaagagaaagccctgttgcattgcgggctgctggccagatcccgcaatagataacaatttaaaactcttggcacaagcaaacaaacaaacaagcaaaaagaaaactaataaagattatacaccttcactttatccccctgctttttaactctttgtttttactatttatatcttattgtactatgttttgaaaagatgttgtagttattatttttgattggttcattgtttagtctttccacttaagagtagtttatacaccgccattacagcattattatattctgtgtttttctgtatacttactattaccagtgagttttgtaccttcaggtgattatttattgctcattaacatccttttctttctgattgcagtacttcctttagcatttcttataggacagagctttaaatagccacttctttccttgcctgtaaggtttccactgaaaagtctgctgccaaacatattggagatccattgtatgttattagttccttttctcttgctgcttttagaatcctttctttatccttcacctttggaagtttgattattaaatgccttgaggtagttttttgggggttaagttggcttggtgttctataaccttcttgtacttagatgttaatatcttcctcagggttcaggttttgctgtgtgtgtaatgaccaaatttatcaaattaataaaaataatccttttaactatttagaaagtttataacaattagtatgacatgcaatatttgtaacatttttcatggattttggtatttttattgcatattgaggtataacatgaacacagcaaaatgcataaatgctaagggtatattcaatggattttaacatacatatatatatatatgcctgttgaa

SEQ ID NO: 477242 - DNA, 659 bp, Homo sapiens
tttgaattctagagggatcaggtatgtcttgcaagaggtattccagaagaagccttatcatcataggagacagcagcttcatgcatgttattaaccatgaaaaacttccagtgggacaagatgtggaggtggaagacagtgatcttgatgatccttgccccgtgaagcatggctgcagaggcctcaggaaacctataatcatcgtggaagacaaaggagaaacaggatccacccctctttcccaactagtagaaaccatccttgaatatggtgaacagctttgctacaggaaagcatatttcagttcttataatcgggccacagaagataccagaaggtgggagagcattgagccacactttcctccactctccttgccctttcaattaccattggaggtccttcagggcaagggctgcatcttcaatattgcgactttccctcccggcatatttgacagtctttgcacacagtggtaaatcaagcctaccctcttaactactgccctcctgtatttggtccagactttttctaatctattatagaaggaagagggattttggttggagggagagggatagataattttggaatacagaaacttgattcctggaaggcttagattgttacttccctttactccatcatactgtgattac

SEQ ID NO: 477243 - DNA, 3448 bp, Homo sapiens
acagctcctcttctagatttctgagcctctttatagttgagatttctgtgctggccagcagcctgtgaggtagcttgatacgcgactcctgtccaagatgatgcggggcaccagtgactttgccaacctgtttagatcctgtcacgtggcacgtttgaaggagacgcacagagaaggagtctggcaattgggtcaacggcagcaaaaaggaggcagtagaaggaatggtgaggagcagaagcccttgctactatcctcctccttgtctcctgatgttgcgtcaggaaagcctaaatttaaaccctggggaaagacaccttcatggaggaggagggccaaggagaaactgagtaaggaagataagtgcaaagaagatgaaaataaaaatctttgttttactgttaaagcctatactggagaatgcagcccaagtgcacaatgcaatgatttcctaacactgagccctcaaattgggcatatttaccaacccagacataggcagctcaaacagccacaggcctcccagcactatgccttccctaaagggctcatgacctggtggagcagatctaaatgcgctgcaggcagatcctaagcgaaagctggacaagggggctcagctgtactggacacagtttctcactaaactcacaaattaggcaactcaggttagtaaacagtgggcaagaatataagaatgtttaggaaaaacccttcctgatggaagcaaaagagagtggcaataacatccccccataacctcaacattataaatgtatcataatttgattagctcgtcacttattgatagacatttaaggtgcttccaatcttttgctattgcaaaaatgtaacaaacatgaatattcaaaaatgaataactgtatacatacaaaatttcatgaatatgaaatgataaaatcctgaataactttgtacatataaagtttcatggatatgaaatgataaaatcctgggggtgaaattgctgggcgaaagagtatgagcatttaaaatcttgctagatgttgccaaattgccctatctatcaatctcctaagaaatttgtgaaaaggccaatttctccacacactttccaacatgaggtattaataaggtattaacaagagctttcatcatcgccagtctaatatacagaatctggtatcattatgatcccataatttgttttctgttattatgagtaaggttaaatacttatcttaaatttaagataagtattttcattttttaaaaaatgtgaactgccttttcatacccactgtccatttttctattgaattgctgtggggtatttttatattaatttctagatttttttatattttagaaacattttaattatcatataaataccaaatctttttttctgagtggttgtattcttttcatattgcttatgttggttttgccatgttgaatttatttttaaagtaacctcatttataatacttttctaatatgtcttctgaattttgtgtcatttctagaaaggccttctttactcgcaattattcaatatttttcccatatttctttaagtacttttatggtttcattttttgtttatattaaaatctttgaactatttgattccaataagtaagaatttgactgactgttttccctcctgaatgactatcccatatcatttattaacaaatacataataattttttcattattttgaaattctaacagttattgatcccaggttaatggagtcaggtaagtgaatgcagttgaaacttgcagataaaacctttcaaactggacatcatctacctgaaaatattgtccatatagattttttctttacacttttaaacgtaaagaaatttacctggattcaaattcttactcatcttcttataggttatgcaactctcggcaagtaaatttttctgagaatatggctttgggtttgttgtgagggttatatgagacaatatgtaaagtttgggagaatatagcagtcatttgtattaatttattgtttaatattataaagatctattttagctcatcctgttaccctccccctgcaatgacctctgatcatggtaacagtgctatcaattgtattgcacttagcaaaccttaaagaaggaccaaaatctttcagaaatcttttccatgggcatactgaaacagagataggtctgctccaaattttgggggggaatgcttacatgagttacatggctgagcttagatatagcttagtagaaactgtgtttaatattcttatttaagacacagactcagcagcagagacttaacttttgtagaagtaaatagttagaaaggtgtgtttggttacctattaaatataccaagatagtttgaaggtaggaagtagtgaagtgatactggaaaatacaaaacagaacttgtgaaaaatattggtgtgccccccaaccccctacctctcatttctcaaataaaacaagaaagaaacattaggcaccacaaatatatctcccatattctgaaatgcatctagaacaataggtttgccaatttttcttagtatcagattctagagaggaacgatggtgaaaactcctttggtaatcacaaccttgcttcctgtttagatttgttttctctcctttgtgtaaatgcaaaatagctgatcataatctgtggcttcatattccagaaaataattactaagtgtatctcagtctttcctcataaaaataacaggttttttttgatgttcccctcaaatatttgttggagattattctgctagggaagaacgagggaattagaacaaattatcataatgagacacaaggtgagttaatcacagcaaaacaaaaatgaatcatcattagtgtttggtgagtgtactttgtaatgaattcaatattcagaatttttaattactcctcgacagtgactcttgacaaaatatagcacttgtggataataccagtagatgttgcattaattatgtgatataatttggtgaactaaagattcaaaagctttgagatatatattaatgatgaaaggcaaaatgaatattttgctattttgatgcttaatatgttttctgttcaaagaaattcagtgttaatggaaaagtgactgacgtagaattacaaaatcatagaatttcaatactggaataggctttatatatcatcctgttctacctgcctagctttacccattagggagtcaaaactcagattcaaagaggaatttgctcaggtcgtccagtgtgttaatggtcatgattaaagtagtatctagtcctgagtcttagtctagtgcttatttcatatcatattgtgtactttttaaagcaaatgcttatttgaatgacagtggcgtagtatatattttgcactaattttttgtcttaactcctttacttatgataacaggtttcaatagcattttctgacac

SEQ ID NO: 477244 - DNA, 799 bp, Homo sapiens
atctgaagagtgggggagtcaggagaccccttgaggcctccaacaggactcagctcaggccatggtcatcttcatgctggaagaagctggtgagccgcccggatgtgacactactgcatggcccaactgtgagggcagaggtgccgccatctgccctctgacaggcactcctgttttcatgcccaaatattgcattttccaagatcactctggcccaccacgcccccaatcctgtgcctataaaagccccgagaccctagcaggcacagacacaagcagctggacatcgagaagaacacacgggcagaacacactagcagaacacaccggcacacaccagcagacaccagcaggtcatatacagtggtgccatgtgaagttcagccagaggagagcgccactactgggtggcctgactccaggggaagaccactttcccactccatccagcttctgtcttcctcatccacctccctgggagctattaccactcaataaaaacctcgcacctatcctccaagcccctgagatcctgcagtctgctcaggctttaaaggatgatttctaaatattgtgcattaggcaaagagaagactttgttaccctccttgggaagaaaaaaagaggaaagggagaaaaaaagagggagagacttagccattgacatggtaaatggctgtgctttgaaaaaatgtgattatttcttacgactctccctgtttggtcactgtagccaaactcaaaatactttgtgtggatagaattttattgaaaccagggagctgtttaaatcttttgt

SEQ ID NO: 477245 - DNA, 1757 bp, Homo sapiens
tgcttttttctgaatataaagaaaaacagcatgaaccctggaggcattggacaccaggcctatagacgcagctggcgttggtcaatgggttttcaattccgagagctaaaaaaatttgttcacgtggatgtagagagtggagtgatagacactggagactcagaaggctctagcgtcatcttccctttgaagcacagccagaaggatgtcactggaaatgctgaattactgtacatgaaagacacaaagggaagtatgaactgggacatccagtctagaagagggaaggctaaagagaagaaatgtggtctaatggctttgatctttattgcaccatctcaaccacctcatcagaagtacagtgagggtgaggtggatgcaactggagcttttatgagagatcaacaatgggggagcttttcctatcatcagagattttattttcaagagaaatcagaagaagagaggaagctgagggaaagtctggaacttcctagagagttgttgaatggtggtgaccaaaatagtaacagtgatatggaaaatgaagcccaggctgaggaggtctcagatggaaatggggaacttattgggaactggagtaaagaagatgtatggaaaagcttggatgtccagcctgctgcaggagcagaggctttagaaagagcctctaccggggtaatgcagaggagaaatgtgggcatgaatgtttatgatataaagattccctgctatcctactctatacaactgataaagcaagtcaaaaaacatgtagctttacaaataaaggctttgggcaatattctaagaatgaaagaataagtatttgaattcattttgccagtaatttatgagtgggcttagaatgcctgtatgcagaaaaaattatttatacttctgttattatctttagcatattaaatgaaatcatctttacctgtttgctttccttattagatttgatatttctgaaaataaggaagccttacttatctttaaattcccagtatataacacaatgttatataaagaatatacaataaacattgactatatataacttaattaataagcattttcccaaatctaatttattctgaaaatttacctcagtatctcttcttttgtgggtctctgaaagacaaaagttaaaaagtagatatttaattttgttcaagtgggaagggaaaagccgagacagaaaaacaaactgaatattgaaagtgtggttaagcatccacactaaggaggaaagagtgctatcagcatatactagattcaaccaataagacaggtagcctggaaaatacttctaaaaatgcgtatattctttatctgatataatttgtaggagaaaaattctaatagtattttctaacagtgacttatattggcttcaagtactttacccaactataccaaaggggaacgtgaaaagttaatattttagacattcttaagatccagatgacccatggagaactgagccaagcagcagctaaaggaatttggtgctagaagacagaatcaagtaatttggtcttaaattttggcatgaaatcataaagatgtgaaaagacactagcattaagagctctgtggcctaagtagcatcttttcccttggtggtcctcaggggcaggtagagcatcttgctcgcattctccttatcctccttacttatcagaagcctaaataatatcccaatgtagtcattcgtatggaaaagaaatctgtaattaccccaggatagac

SEQ ID NO: 477246 - DNA, 2517 bp, Homo sapiens
aagtccaggattgctgtgagtttattcattggctggaaggtagcatgatggacgataggcaaggggtgtctggcttggggaaacaggaaacacccaacgtgagagactactaccatccatggacggttgctcagaaactatgggatttaccacgtagaatacataaggagaagtttgcccagtttgctccaataacttcatgtccacgcattcagaggcctgtgggcaaaggcttaattgcagcttgccagagaggtacaaagcctgttgttgatccgattcccagaccagccaggcatccccctcaccatgctctggctaatgcctgtgctgtgatcctgctttctcactatacagcaacctcaatccacaagcacagcaaaatcaatgtactggagatccggtatctctactttgtggtgattgcaggtttccttgcgtccctgaatctatttccatacatataagtctggaacaaacaaacctaccaccaaggttggagttggacttaatgtaataatgcatttgaggcacccacactcagagactgctcccagctctcttctctgcttctctcagcacaggtctgtgttttggtggtacatctcacaaagcttatcaattctttatttcttgtgtcccactagaagaaatttccagcattaaaacaacgtagaggatcaatctgtataacactatttaaggaaccctaaacttaaagcccaggtccgtgagctctactacttactctactacttgccaggcaaatttgggggaacattggcttgtctccctgatagggttctcatgaggagcataatagatgatatgtaaaagtttgaaaaaatgtgatatgcaatataaagataggatgttatatttcaagtactaaaataaaaacacaaagcctgtgaaaaagaacacaagactgctttgtgcttagagttacctattttctctaaatactacaaaagacctttgcaatgggaaagtctctgaatcttacatttttctttttaaaagcaggaaagtttcttctcctatctgacatctggattataactataaatcaacctaacccaataggtgctagattgtatgtttgattaattggcataaatgttcaaactacaaatcgaaatttaaactattctttgaataagtttatcattttttaaaaaactatttaggtataagatctaatgtaaccaaaagactaactgattggctgactgaaggactaacatcatgaatgttgagagcctaactataaaatttcagctaaaggcaaataggaggaagtgaactctattttctattttttgtgcatagagcttagttcatacagctcagtctttcaagccaatcaactaattcacaagagaataaagttcttacccaagaatacagaactttgttcctgtagcacaccataaccacctaagccttacatttaatgtaacgttttcttttataaagtaatcctaaaatccattattagaaaataaccatatattttcttttgttctacataatcattatttgttatgtggtgcttattttcttagtactacctactgtaactaattttcacagaaagaaaaagtaaaaagtcttacactgtttatttttttcattttgttatttttgtttgtttggtttttgtctaagcatggaagaccagtttatcctagtagtacaagaaggcagaaatggtttccgttcagcaaatccacaccagcaatcctcttacagcaaatttccaagaaacatggttggataacagtgctggacctaaaaaaggtgttggcccacgagtgcctctctctccctgcctgagctccctgaccagcatgcgtgtggcctccaggtgtgttgtctaccccccaggacctgccaagcacggtggctcatgcctgtaatcccagcactttgggaggccgaggagggaagatcacgagctcaagatatcaagaccatcctggccaacatggtgaaaccctgtctctactaaaaatacaaaaattagctgggcgtggtggtgcatgcctgtagtcccagctactcgggaggctgaggcagcagaatcgcttgaacctgggaggtgcaggttgcaacacactactaactccagcctgggcgacagagcaagactgtctaaaaaaaataaaaaaagaaaaacacatgagacaaagtagcaaatgtaaaaagtcacgtttgttcatttttgcttgccaagataatttcacaaagccgctgactctgggacgtgcagatctctgaaaagacgctttgaagacaaaaaaggatagatcacaagacccccccatgtctcttgcctgaatcactgtattctttaaaagataaatgacgctattccttgcctcttcctacacgagataatgtctgatagggttagtgattgtacctctgtattctataacctttatacccagaccttcatgtgattctgcattaatgtaacttctgagcaagtttgatgtgattttgcatgta

SEQ ID NO: 477247 - DNA, 920 bp, Homo sapiens
aagcatccagcacgggaaaaagaaggaagccagaagattcattaagcaaagttatcccatcttcttctgcatgctttgttctagcctggttggcaacccaaggagagggaacaaaacggccttgttcctttggatccataaaatctccctgaagtcagacccaagttgctggactaactccaggggcagtggcttttgtcctttgaccctgcccctctcctgccagccctcggagtctccccataataccaaaccctcccccgacataagactcctgcttcaaggtaaaaatacttattttcaagtgagatatcaagaactcggtttccctggtaactcgggcagggaaagagaatttaagatgatcagaaatattcattctgaccagctagatccattctcctccttactcctaaggctttatctgcaacacaaggcagggtcccaagcctctccaagtcactatacatttaaagttaaacgaaaagtgaagtctgccactaagtttagctctcctgctgaaatccttgggagattattacttccttctggctatatcagccccccttttcccatacctatcagacggctttgaagttttacttcatttgaaatactgtacagatgttcatttaatagagttgactacttgtagaagatgaagaaaaaaatgtctgaaaaaaatcttgactttcttccctgtggaggaagctaagatctcccacagtcatgaaggaaatgggttgcatggctctctaccttcttaggtctttcctgaaatgtcaccttttctgtgacatcttttccggcttttctacttaaaattttactcatcctttcccacccttcctctccaacacaaaatataaatgtattccctatttcctttctctgccttatttttcttcaaagcacttatc

SEQ ID NO: 477248 - DNA, 908 bp, Homo sapiens
cgatagactagttgaaaacatagtcgtttatacgcaatgcagactggaatgaagatcgatagtaaaactcctgaatgtcgcaaatttttatcaaagttaatggatcagttagaagctctaaagaagcagttgggtgataatgaagctattactcaagaaatagtgggctgtgcccatttggagaattatgctttgaaaatgtttttgtatgcagacaatgaagatcgtgctggacgatttcacaaaaacatgatcaagtccttctatactgcaagtcttttgatagatgtcataacagtatttggagaactcactgatgaaaatgtgaaacacaggaagtatgccagatggaaggcaacatacatccataattgtttaaagaatggggagactcctcaagcaggccctgttggaattgaagaagataatgatattgaagaaaatgaagatgctggagcagcctctctgcccactcagccaactcagccatcatcatcttcaacttatgacccaagcaacatgccatcaggcaactatactggaatacagattcctccgggtgcacacgctccagctaatacaccagcagaagtgcctcacagcacaggtgtagcaagtaatactatccaacctactccacagactatacctgccattgatcccgcacttttcaatacaatttcccaggaaggaagaatagttaattatatatgcttagtctaccatctagaaccagaaccctagaattctttatctaaactgtcaggcaggtgttagggcaaaataatttttaaatatgtaagaactctcacattttgcctagcacataccttttttaaggaacttaactcaggatgtactccatcaagataagggtggtaatcaagcaaaatagaaatatgaaatat

SEQ ID NO: 477249 - DNA, 599 bp, Homo sapiens
agattgacaaacatgaacttttgcaaagcagaaacgtttagtccattgcaagcagccaaagtaaatattaaatatattaaatttaaatttattaggcttatatatagtataacttacatagtttatgtagtatttatgtatgtatgggccatgcagaagaaaaatgtggagttggagctcccacacagagtccctactgaggaactgcctagtgaagctgtgagaagagggccaccatcctccagaccccagaatagtagatccactgacagcttgcactgtgtgcctggaaaagcttcagacactcaatgccagcccatggaagcatccaggagaggagctataccactataccctgcaaagccacaggggtggagctgcccaaggctgtgggagcccgcctcttgcaccagcatgacctggatgacgtgagatttgggagggggtggttggaatgatatggtttggctgtgtcttcaccaaaatctcatcctgcatggcagctcccttaattcccacatgtcatgggagggagctggtgagagataattgaatcacggaggggggtctttcctttgctgtacttgtgatagtgaata

SEQ ID NO: 477250 - DNA, 538 bp, Homo sapiens
cgtaattattagtaaaatgtctctcccgtgacacatggggattatgggaactacaattcaagatgagaattgggtggggacacagccaaaccacatcaccaagacctggaaggttgcaggtctaccaaacattggtattaaaatctaccaaacatttaatagagcagtcattaagaagctagtgaccagggctcagaacttgccccaggctacaagtctcataactgagaagcaagccaactcgcagttccttggctgttccacagagcttacagaggaaatccacatcattcaaagggtctgtgaattcttttggctttcctggtatgtttctgcagtagttcctggagtaaaagttcacgaccatgcaagcaccaaggaaagaccatgtgaggacgtaaggagaagacagctgcaaactaggaagagacccctcaccagatctgctggcatcttgatcttggacttcccagactccagaactgcaagaagtaatgatctattaattaagtcacccagtctataaaattttgttgta

SEQ ID NO: 477251 - DNA, 652 bp, Homo sapiens
gaaaggaaagtggaattgggccatgaccccatttgaaaatgttcatgctgttctcactacaatctttatgggccacttatcatgtccaagaccctcaaggcaagacctctatgagtctgcaaaaatcacagcattactgggcttggggtgtcccttaaataaaaacagcttagatctcaataccaagtctttgcaaatatctgaaaagcctttccaaaaaggacaggcacacgtggcaagctggcggtggatctaccattccggggtcaggagtatggtggtcctcttctcacagttcatactaggcagtgccccagaagagaatctgtatgtggactctgaccccacatctcccttctgcactgccctagcagaggttctccatgagggccctgcccctgcagcaaacttctgcctgggcatccaggtacttaaccgagagcaatgaggacacatgttcatgtaaaacctgtatgccaatatttagagctgctctattgataatatcacatactagaaataacatgaactggtggattggccaataacacttagttttgcccttttaagtatattttttagatcttgtaggtgtgtttcattttttaaaaatctttttcattttgtctcttctgaatgtatattttcaaat

SEQ ID NO: 477252 - DNA, 897 bp, Homo sapiens
tagtatctgggccggagtgcactgttcctcacagcacagtccctcacggcttcccttggctaggggatggagttccctgatgccttgcacttcccgtcatggaggaaggcaaaggagaagcaaagtcatgtcttgcatggaagcaggcaagagagagaaaaagagcacatgtgcaggggaactcccctttatgaaagcatcagatcttctgagacttactgtcacaagagccacatgggaaagacctaccttcatgattctattacctcccaccaggtccctcccacaacacacaggaattataggagctacaattcaagatgttatttgggtggggacgcagccaaaccatataattccatctctggctcctctgaaatctcatgccctcatatttcaaaaccaaccatactttcccaacagtctcccaaagtcttaactcatttcggcattaactcaaaagtccagagtccaaagtctcatctgagacaagacaagtccatctgcctatgagcctgtaaaatcaaaaaatggttcataagaaagaaatacatattcaatgcagtcatgattttgtttcatttcctattatgtctgcatttggatctaaaaatattaatgttattctatattcaaaatcttcagtaaatgatgagagaattctcatttccatgcattatttgtacatggaaatatattgaaaattatttttaaaaccaggcattaagttgaaggaaatggaaatggaaattagcagactaaaggaaaagagaaacccaaaaccaggaagacatccaggaatgaaatctttctttagttagacatctaaagcattcattcactcatccatcatttagtcattcatatagtcatatattttttcaataaatacttatt

SEQ ID NO: 477253 - DNA, 986 bp, Homo sapiens
aggaaaaggactttcacaaggtaatgtcatcacttaaggcaaggaccggccatttacacttcttttgtgttacatcaggccatctggggatatacgtgcaagtcacaggggatgctggtggcttggcttgggctcagaggcctgacaccctgccccacttcttatttgatgaaaataaggttgcatatcatatctgcagctctcttggggaagaaaacacatgcacaaatcctggtgttaggaatattttaagcacatatcttcgatattattcatccaggaccgaaactttgacagcattgctgcaatggctcattgctgacaaatcaattggtattcaaacatccaggaagcaaccagctacaaaagctgctaaaagtgtgccctctgctggaatggtggaggaacctcattctcgtttggtagttgggtgctttctgaaatctaatacaagaattccactgactaataaactttacttctgggatctggtgcaaaaacattgcttgggttttatagtcatgcttgtagaacactattgttggagctccacacaagaggaagaaaaaatagtgggaacagatgatcctgaagggaaagtgaagaagctgcttctggtgcaggtttggaacggaccttgatccatttggagaagtggtttaagaggattgggatggggaaaaatggttcatctctgtattccttctcatccttcccacctcacccccctccacctttttaaagcttttctttggttaaagccacttttaaaatttagtcattgagatttcataagctttgtcttgggagaacattccctgggggaaataggagttacctagtcatcatttaatctcaaaatctcattcataattttattataagggatggtgccaaagtaaatgacctctgtaggctaaatttactttactgaaattagtttgaatgtgtaaacaagttggtatcactactgaacttaatttaac

SEQ ID NO: 477254 - DNA, 574 bp, Homo sapiens
cctcacaatcatggtggaagacaagcaggaactcgcaatgcaagctatgaaaacagctgaagcagggagctgtaccctgcaaagccacagggttggagctgcccaaggctgtggaagcccacctcatgcatcagctgaggtgggcatgattagatttcagacttgcatggggcctgtagcccctttgttttggtcaatttctcccatttgcagtgagtgtgtttatccaatgccggtactctcattgtatctaggaaaggatgacccaaaacagggaattgtgaaatcaagtttagccaaaagctgtttccttatatattttaaggttgacataaaggtttctctgtacctagtgaactatcacctgaatagaagtgtaaacagactggaacctgctcttgtgctaatcattgagactggtccaatcaaagaggcccaattattcaaaccatgttcaaataaggcaaatgctgatctataaccaatctggttgtttctttccttcacttctgttttctgtatatcacttttctttttctgtccatataattacttgctgattttcatggttggt

SEQ ID NO: 477255 - DNA, 780 bp, Homo sapiens
agatcaatgtacagaacatttgcataatgtcagaaaacatccttgtgttccttcccaatgaaaactttccagccccattcccactggaagaaaatactattctgcttcctgtcaatatagcggaggaaggaaccttagcagtgattgtggccaagggtcttttactggagctctaccccagagagatgcagacctgcaggttccccagtcgggatgtatgtttggggcagatgatctccctttcccacttccacagtttgggcactcatagtatttggggtgtcttcagggtcctacaggagcaatccacttccttcagaggatctgtggttccctcagttttcctaatatattcctacagtcgttctggagcaaaagttcatgaggcaagcctccacatgctgcatgttgtccgagccttctctggatgagagaagccccaccagttactaaataaacagtgggtgagaggaagcaagacagaaagcaggatcccagaaaggacatgatgtggaccgacctaagatttggggatggagaggaatagatttacttaagtgggaagtcactgagttcctattattaagcatgtgggggttatctagtcaacagtgcttttgtgtcttgatgtgagtcctcagagaaagggccttgctcattctatgtaccacagagggcttagcatatttttggcactcattaaatgttaacatcaacaagaggatcatgaagaatgattacacaagagggaagtaaacagaaaggcaagagttggcaagc

SEQ ID NO: 477256 - DNA, 932 bp, Homo sapiens
cggcgggcaacaccctcagagtccctgtatataataacctaaacaaagaaaaatgatccttaaagttaactgtcagactatccagacaatgttcctgctacaacgacacgatggataccaacccgtctctcaagagtacccccaaaattaagtttttctttttccaagatgctcatgccaccccctacgtcacgactgaaaagcaggaagagagccgctgggaagacacctaccctggatggaagacacgtacccctgaagatcgagaaagaagccgtctggatattcatcactcggatataaccaatatcgatccacaaaaagatgactgctttaacccactcacaatcatcctctgctccaggccctttctgttggactctcagatccatgctcttcaagagcactgggtgccccaagggacctgcctccatgtctacatcaaagactcccttgtcacctggcttctgttggttcagccacaggaggcactggcaggaagtcagggtgagaaagaagactacggccaggcaaacctcagtaacaactactatatcttctttagttaacttttctcctatcccctttgccccttagctctaaggttgaaatcttcattgtcctcattatccaagaggtgttgcctctttcatctttctaccttttattcatatatctaatcaattactggtccctacattcttattgatgaaaagttcttcaaaatagctaccatattattgctgataaaggctacaatataagaagactgtttcatttttaagaggcaatcagccagtgtgccattctgaaaactgtcaagaacagcattccagaatcttttaaaaataaatattagctgccaggataataatatgcatgtgacatattgataaaataaaataatttaaaatgaatattaaggtttttta

SEQ ID NO: 477257 - DNA, 615 bp, Homo sapiens
tgccaatttgtcccctcaggagtgataccagtctctgcggggaccatgaggctagccggagcttgggggaacatcctcttgggagtgagaaggcggtctagagtgagagccaacattgtggcagggaaagcagtgcccgtgagcaaagggcaatgcaaggagaggaccagaggatgtatagccagagataaggaaggttttctgcactgttcagagtttttagatagaccactggaattttgcacaagatacagagcctgcagtcctaggcagaacagacaggaagctgttcttaaggtgtcatcagccactggaattgtttgtcaggacctgggaaacttagatagtcgagattgctttgtgcacctgatagaggctgctgtgtctgaatggcgcctgattgggctcccagcttccacgtttgcacaccctggagaacattgtctacagggtagccagaaggatcttttaacatcctgttattactttgtgaaaggcaagaaagaatcttgaaatgatggattggaattggaggtactgatgtggattcatgatttgtaaaatgtgtgtttgtgtatacatttgtatctacatgcatgtaaaatgtgaacacac

SEQ ID NO: 477258 - DNA, 592 bp, Homo sapiens
gtctgttcaggtcagttgagttgagattgccgaatacttcaaatggattgtgcattaggaaaattaaaatggcactaacacgtagagaattgtacagcaggggctgccgatctacagtgaatggatcccttggaccctaccaaagatcactcctcacacctggggcacacaaggaaaggagcgagggactgacaggaacatccgtcagcttctgcaaggtctcaaaaagatcatcacccacagaggcagatgtctcaaggaaagactgtcctttgaatcgatgctgggaaggttgtgtgagtggaaagggggatgaagagagtctggtcaaagggtacaaattacggttggataaaagaagaaagctatggggcacaggcagctgtcagaataatccattcagatcagactcccaagtcagagaacgggtgggagggaggtggaaagtggattggaggggcaaaaggagatctctgacacatgctgatactatacaaatctagaatttattttctctcattattatgttcacttatggtaacaggtgtttacaaatcagagtagtagctttataaacatgcattagacaaga

SEQ ID NO: 477259 - DNA, 694 bp, Homo sapiens
ctgcatcgtctcccttcagccgccatcatgattatctaccgcgacctcatcagccacgatgagatgttttccgacatctacaagatctgggagatcatggacgggctgtacctggaggtggaggggaagatgcagtgtgagagcagactaatacactatgcttgggtaggacccaactggagccattatgagctgacccctgctactcaaaacaatcttttaccaatggtgagaatgagagcagtcgtgcacttgaaggaagatgagtctagcttggatgccatctgcccagggacgttgcctactcatgctaacagcacgtgggaatcttgggtgatgttgacactctgtcggctccttatcagtcaaactaaagagggctgccagagtcataagcagtcaaccatctctccacaaaggtttgacaattatcaggataaggcccaagcagcagtcgacctgcagggtcagcttcagcagggagagaacttgcagctccaagcaagggcagtttagggtcctccattctctccttggtcttcaacgcttgtaggaaaagaagacccttgctgttactgttctgcacaatccacaggctgttagacatttttgtattgaactgaccgttctcctgcatgatctgcttcttcccaagcagtctttctccagtcccatgtcccctcccctcaccaag

SEQ ID NO: 477260 - DNA, 622 bp, Homo sapiens
tttgtcaaagatctggtagttatgctgacaaagcaatgtggggggtggccatgggcccagaggaagctacagtgcagggaaggagtgggtagactgatgtgtggccatggagaccaccccactgcagctctccactagtcaggcatggtccaccagtgcaaaagctatagagtgggcccccagggcacccgaggctgccctgcaagcagacattgccaggttggggttccagaagggaccagaagaccaaggattattcaggtcagaccagtccagtctaatgggcaagaccaccctgcagagttcaagtctgacagttcccctaggactaaagtctcctgtgggagctagtggggcctacagagatggctatccctggctgtgctccaccacagatgctccctcaccaaacactctgggctgcgcatcagctggctgcccctaccagttctctaagcagctctccttgccaattcaggcgtccatggtggttgaggggtctctaacctgctgggattccagaggctgtgacaaaagcaggttgctccttaccagttcagctcacccattaccccagagttgctgggggccagaaacgagccctgatgcttggtagcctcat

SEQ ID NO: 477261 - DNA, 1954 bp, Homo sapiens
gttctgctttccttttaaatgtgcagtgccacaggtcaatctcagactgctgcactagcagtgagcaaggctccatgggcatgggacctgttgagccaggcatgggagagtatctcctggtctgccggttgctaagactgtgggaaaagtgcagtatttcatcagaagtacgctgtttctccaggactgaattcttcccttcaatgcagaagtttcctttttgccttggggtgtgtctagaaatggtatctatgagcttgaccctggaacaggggcctcacgactctgctgggtgctctgtcatactgtggctgagctgctatccaaaatgcaagacaaagttttctctaatctttgatcttaagcagaaggaaggggtcaccttcattgctatgagctgtactgcctgtgattgggggatgagtggctcaagcactcccttagctgccctagctggtgtctccctaggtcaaatacaaccctagtttactggctctgagcccatcccagcactaggagtttcctaggagttgcagtttttgtgtcctagactgcctttcaagtttacctagaaccccagagcacttcggcccatggtggcaaagctgccaagaaactcaagttttgacctctgggatgggcacattcccctctggctaggtgtggtccaaatgcttgcttcatgcatgggtgctggctgaacccagcatggctttgctctctgctgtgagagggcatccctgagttcaatgtaaagtgctcctgtcactgtgttgtcccttccccaactgcctagattctgtgctgcatggctgctgctggaggatgaagaaggggtggcatcagcaattcaaggctgtctgctaccctcttcaatgcctctttcagtgatatgaagttaaaccaggtactgcgtgtgttcacctgatttttggttcttgtgatggtgcttttctttgtacagatagttgtcaaaatttggtgttcctgccaagggaaaaaatggtgtaggcttcaattctttcctcttactccattctccaatgctttttaattgttaaattaataccttatcatcttttgtgtctttaaaaatctcttaagttatggaaataaagttctcctctttacttatttttcacaggtgaatactgaagcttcaaaagaaagaacatagacaagatttctacatcttttacactggttattgtataaaatgaaagagaattcatgctgaatacatattgactcctggtaagcatcactttattttcctaattgctcatggagtcttttattcataggagtaatagtactagcaatactactaataatgacaaacacaatttttggcgcttactatgtgccaggcattattaatccatagaatttttgcaactatcctataaagtagttaccattattcttatttacagacaaagaaaatgaagcacacatatgttaagaaatatgacaaggttatgcatctattaagcggttaatttaggatttcaactcatgttgtctggtaccactacactatatatcactgcattctcaccttttatttataatgaattttataatttagaatcaactttttcatgcaattatgtgacattgccatatgatgatactgcatttggatttaagtctttgtcttctggttttaatgcatattttgaaagctggaagaagagctaaaatactttgtttaaaaatttgtcaagatatggagaatttattacatgctatctgggttctgagagaaacttagggtctccttattggttattatactagaaatcaatttatatttactgctatcatgacattgaattcaacttcattgaaatgccaagcaggaagatttttgcctcttgcttttttatgaagcaggagtttacacaattttatgtgattgatactcatcagcagtaagagagcctgaaga

SEQ ID NO: 477262 - DNA, 1152 bp, Homo sapiens
ttcctctagagtttggaaactctctctatgccctgcccccagaggtggagtctccagaggcaggcaggcttagttgagctgcggtgggctccacccagttcgagcttcctggtggctttgtttacctactcaagcctcagaaatggaggatgcccctcccccagccaggcttgcggccttgaaattcgatctcggactagcagtgagcaaggctctgtggccgtgggacccactgagccaggcacaggatataatctcctggtgtgctgtttgctacaaccgtttgaaaagcacagtgtttagttggcagtgtcccaatttttccggtacagtctgtcatggcttcccttggctaggaaagggaaatccgctgacctcttccacttcctgggtgcaagccacttttacacccatggcagtgcctgccaaggtcaccaggacttggggatgcaaggacagaagagggaaagaggatgctcctccctctctccctcatgtacccattatctgcaaggaagagaagggaaccagagatacctgctcccctttttctagatgggtagccattcatcttcagtctgtaattgtgtctccatcctataggtcactcccctcagatgcatcctccaaactagaaagcgctaatttcccaaaccataaactggttggcttaagattgggctcaggtgaagggaacccagaagcccaacatgtcggcaaaaggggcatcaaactccaaactctcatgcaactggagcctctgatgatgcccctttctgctgggaacccttaaataggcctctgagaaagctctgactaccatttccccaaaacttattataaatattactgagatatatattcttattcttataactttgtgcatttcactgattatttcttaggatgaaagggaatatgaaatatttaaaaaaaggttttagtaaactttgttaaaatctcccccccagttttagatgtatttatactcagttctgctttatgttaaataaacttttctctgaatgcttgcttctgaacaaagacttctctcattgttgttaaaatttgctaatttgacaatcaaaatttggcatcctgttttataatttatagttatttaatacatagtattgaatacagttacgcacc

SEQ ID NO: 477263 - DNA, 567 bp, Homo sapiens
cggcttaggaggaatcctgggctgcaggcattccttggcctggtggtttatcaaagatcagatggttgtagatgtgtggtgttatttctcaggcctctgttctgttccattggtctatatatctgttttctatcaatactatgctgttttgcttgcatcttgcacctggaaaagctgcagacattcagcaacaatctgtgggagaagccaaaggaactgcatcccacaatgccacaggggcagagctgcctaaggtcttgggagcccattccttgcaccagtgtgccctgtatgtgggtcatggagtcaaaagacattattttggagctttaagaagacaaatcgaaaaggatcctaagcagcttgtggtcagtcagcgtagctggagagaggaaagtaaagtaatttttgagaacacttggatagtaagttgtaaagccacgaatggaatcctgatctatctgactccaaaatccaagcttgtaacaactatgttctcatttgacaaactaatacatggaagcactcaataaatattctattcagttaatcattcaacaattatgt

SEQ ID NO: 477264 - DNA, 673 bp, Homo sapiens
actagagctgtgagaagagggttaccatcctctggatcccagaatgatagctccattgacagcttgcattgtatgcctggaaaagccacagacactctttccgctgtccaaggacagctgcagtgtgttatcagctcagtgggccccttgccatgtggcatggggtggctgccctccaccattgagggcaaagggccaatgtgacagcctcttttgggtacccacaatttgtgggccccaagctcttgtccggcatgcaagaagaacgaggttgcccggatacttgaaggataatttaacggtcattagggcacacatggctaccaaagaatttgatgataggtctgagctcattaagctacttggatttttgttgaccagggaaaatgtagttgcaaataaattctgtcatggagagatccgttcttccaaagatttgtgtcctactataacttttctataatgttcccagaaacttaaaatggaatataacaacatgtgttgccggtctgaaataattaaattgtttttagatcattctgataactggtgaaaagcagaatgttaaataagctgtgttcattttcattcaaacatcatgtccaataagtattcttcctacacttaaattcttacccaaatgggttaagatttattttggagatagaaaaga

SEQ ID NO: 477265 - DNA, 750 bp, Homo sapiens
cttctcaatggcatatgccagtcaaactttcaaaattcaaagacaaaaagagaaaaacagcaagagaaaagtctgtagtcatttataagggaagccccatcagactatcagtgaattcttcagcagaaattcagggcagcacaaaccatcacccccagggcacagatgaagatgaagctagggaaggactaggagatgaaaggcagctgaacttcgttttcctctgtgatagaaactttgatattgccatcagacctggtatgagtcacagttgggtacaccagggagcagcccataaaggccctgctggtaagaacagcaacgaggaagatgctagtacaactctcaatttggtaatggcaagaggagagtgttgctacctctgctacacagaaggttttgtgcagggaatggggagtaagccccatggggtggtaagccccacagttcccacacacttagcaaggcagatctactcccacagtgttctaccggcaacagtgaactgagttgaaacaaatttgcacatatttattagagtaccctaataggctaaccctcaaatagcatttgctttattaacaaaatgtttaatcaataaaaagaagcagttgatgggaagtactgagggttgctcttagaggtattcttgaatagctctcaggtgtgggacaacagaaaacatgagaagtttttttttctttttttaatttatttgacttctgtattagtctgttctcacattgctat

SEQ ID NO: 477266 - DNA, 596 bp, Homo sapiens
ggaaagggaattccctgaccccttgcacttcttgggtgaggcaatgcctcgctttgctttggctcacactcagtgcgctgcacccactgtcctgcacccactttccgacactcgccatttaaaatatcccaacaaagaaaactctagacttcgagggtttcactatcaaattctaccaaaatttaagaaagaaatattaccatttatatataatctattccaaaaattggaagacagagcacttgacaactcattttatgaggccaggattactattattaaaaaaaaaaaaaacagcttgcctactggtggtgactttcgatgtcttcagctttatgtgggtgcctcagctttaaaatttcacattgtacagctaacagcttttgtcttctaccttgtgttgaggcggtcagctttttataatggacatgtatcatttcatgccactgaacatgtcaaattatctcctctggttattctcgtttctttatctgggtgattatagagctgtagtgcataccgtaaagtagaacagatatttagcggtgcctggaatgccaaagtagcaacttagtgtgattctctgtaatggtact

SEQ ID NO: 477267 - DNA, 683 bp, Homo sapiens
atcaatgggtttaattttatgggatacgtttcctcccagttggaggctcaggaacctaagagttctgaaagtacattaacttcgatggaagattctggatgtgatttgtcgaatgagcagagaactgaatcctcagacctgtcccagcactttgtggaaagctgtacccccactcactttccaccactgcctcttgtgaaaagaccttgtgctatcctgcaaaatcctttgtcttctcacatgcaattcttgcaatatctacttgaattaaagaacttgacagaatcaggtaatcttaaaagagacttaacccactttgaaaaagactcttccacagtctctgattctgtttttcaattgctggatggcctgatcactttttaccgtaatcccaaacttcctttttcaagattttggacagaagctgttggtactttagctagtctgatcagtgactataacttatctagtcatattcttaaaaagtgttccaagaagttggaagaatttgagaaaaccctactacatgctattttaggaaacaatcatataaatcagttttggtaagttgcatatttttaggaatttatccatttcttataagtcatccagattgttggcatataattgttcataatacttcccttatgatccattttatgtctaaaccatccattgtaata

SEQ ID NO: 477268 - DNA, 3037 bp, Homo sapiens
gaggacaagtcgacgagagatcccgagtacgtctacagtcagccttacgggtgataatggggcaaactaaaagtaaaattaaaagtaaatatgcctcttatctcagctttattaaaattcttttaaaaagagggggagttaaagtatctacaaaaaatctaatcaagctatttcaaataatagaacaattttgcccatggtttccagaacaaggaactttagatctaaaagattggaaaagaattggtaaggaactaaaacaagcaggtaggaagggtaatatcattccacttacagtatggaatgattgggccattattaaagcagctttagaaccatttcaaacagaagaagatagtatttcagtttctgatgcccctggaagcggtataatagattgtaatgaaaagacaaggaaaaaatcccagaaagaaaccgaaagtttacattgcgaatatgtagcagagccggtaatggctcagtcaacgcaaaatgttgactataatcaattacaggaggtgatatatcctgaaacgttaaaattagaaggaaaaggtccagaattagtggggccatcagagtctaaaccacgaggcacaagtcctcttccagcaggtcaggtgcctgtaacattacaacctcaaaagcaggttaaagaaaataagacccaaccgccagtagcctatcaatactggcctccggctgaacttcagtatcggccacccccagaaagtcagtatggatatccaggaatgcccccagcaccacagggcagggcgccataccctcagccgcccactaggagacttaatcctacggcaccacctagtagacagggtagtgaattacatgaaattattgataaatcaagaaaggaaggagatactgaggcatggcaattcccagtaacgttagaaccgatgccacctggagaaggagcccaagagggagagcctcccacagttgaggccagatacaagtctttttcgataaaaatactaaaagatatgaaagagggagtaaaacagtatggacccaactccccttatatgaggacattattagattccattgctcatggacatagactcattccttatgattgggagattctggcaaaatcgtctctctcaccctctcaatttttacaatttaagacttggtggattgatggggtacaagaacaggtccgaagaaatagggctgccaatcctccagttaacatagatgcagatcaactattaggaataggtcaaaattggagtactattagtcaacaagcattaatgcaaaatgaggccattgagcaagttagagctatctgccttagagcctgggaaaaaatccaagacccaggaagtacctgcccctcatttaatacagtaagacaaggttcaaaagagccctatcctgattttgtggcaaggctccaagatgttgctcaaaagtcaattgccgatgaaaaagcccgtaaggtcatagtggagttgatggcatatgaaaacgccaatcctgagtgtcaatcagccattaagccattaaaaggaaaggttcctgcaggatcagatgtaatctcagaatatgtaaaagcctgtgatggaatcggaggagctatgcataaagctatgcttatggctcaagcaataacaggagttgttttaggaggacaagttagaacatttggaggaaaatgttataattgtggtcaaattggtcacttaaaaaagaattgcccagtcttaaacaaacagaatataactattcaagcaactacaacaggtagagagccacctgacttatgtccaagatgtaaaaaaggaaaacattgggctagtcaatgtcgttctaaatttgataaaaatgggcaaccattgtcgggaaacgagcaaaggggccagcctcaggccccacaacaaactggggcattcccaattcagccatttgttcctcagggttttcagggacaacaacccccactgtcccaagtgtttcagggaataagccagttaccacaatacaacaattgggagcccccacaaaaaatccctacaggggtatatggccccctgcctgaggggactgtaggactaatcttgggaagatcaagtctaaatctaaaaggagttcaaattcatactagtgtggttgattcagactataaaggcgaaattcagttggttattagctcttcagttccttggagtgccagtccaggagacaggattgctcaattattactcctgccatatattaagggtggaaatagtgaaataaaaagaataggagggcttggaagcactgatccaacaggaaaggctgcatattgggcaagtcaggtctcagagaacagacctgtgtgtaaggccattattcaaggaaaacagtttgaagggttggtagacactggagcagatgtctctatcattgctttaaatcagtggccaaaaaattggcctaaacaaaaggctgttacaggacttgtcggcataggcacagcctcagaagtgtatcaaagtatggagattttacattgcttagggccagataatcaagaaagtactgttcagccaatgattacttcaattcctcttaatctgtggggtcgagatttattacaacaatggggtgcggaaatcaccatgcccgctccattatatagccccacgagtcaaaaaatcatgaccaagaggggatatataccaggaaagggactagggaaaaatgaagatggcattaaaattccatttgaggctaaaataaatcaaaaaagagaaggaatagggtatcctttttaggggcggccactatagagcctcctaaacccataccattaacttggaaaacagaaaaaccggtgtgggtaaatcagtggccgctaccaaaacaaaaactggaggctttacatttattagcaaatgaacagttagaaaagggtcatattgagccttcgttctcaccttggaattctcctgtgtttgtaattcagaagaaatcaggcaaatggcgtatgttaactgacttaagggctgtaaacgcc

SEQ ID NO: 477269 - DNA, 2173 bp, Homo sapiens
cagggccgaaagaacgagagaaaatcagcttcctgtttggatacccactagacctttgaagttctacaatgaacccatcagagatgcaaagaaaagcacctccgcggagacggagacaccgcaatcgagcaccgttgactcacaagatgaacaaaatggtgacgtcagaagaacagatgaagttgccatccaccaagaaggcagagccgccgacttgggcacaactaaagaagctgacgcagttagctacaaaatatctagagaacacaaaggtgacacaaaccccagagagtatgctgcttgcagccttgatgattgtatcaatggtggtaagtctccctatgcctgcaggagcagctgcagctaactataccaactgggcctatgtgcctttcccgcccttaattcgggcagtcacatggatggataatcctatagaagtatatgttaatgatagtgtatgggtacctggccccatagatgatcgctgccctgccaaacctgaggaagaagggatgatgataaatatttccattgggtatcgttatcctatttgcctagggagagcaccaggatgtttaatgcctgcagtccaaaattggttggtagaagtacctattgtcagtcccatctgtagattcacttatcacatggtaagcgggatgtcactcaggccacgggtaaattatttacaagacttttcttatcaaagatcactaaaatttagacctaaagggaaaccttgccccaaggaaattcccaaagaatcaaaaaatacagaagttttagtttgggaagaatgtgtggccaatagtgcggtgatattacaaaacaatgaatttggaactattatagattggacacctcaaggtcaattctaccacaattgctcaggacaaactcagtcgtgtccaagtgcacaagtgagtccagctgttgatagcgacttaacagaaagtttagacaaacataagcataaaaaattgcagtctttctacccttgggaatggggagaaaaaggaatctctaccccaagaccaaaaataataagtcctgtttctggtcctgaacatccagaattatggaggcttactgtggcctcacaccacattagaatttggtctggaaatcaaactttagaaacaagagatcgtaagccattttatactgtcgacctaaattccagtctaacacttcctttacaaagttgcgtaaagcccccttatatgctagttgtaggaaatatagttattaaaccagactcccagactataacctgtgaaaattgtagattgcttacttgcattgattcaacttttaattggcaacaccgtattctgctggtgagagcaagagagggcgtgtggatccctgtgtccatggaccgaccatgggaggcctcaccatccatccatattttgactgaagtattaaaaggtgttttaaatagatccaaaagattcatttttactttaattgcagtgattatgggattaattgcagtcacagctacggctgctgtagcaggagttgcattgcactcttctgttcagtcagtaaactttgttaatgatgggcaaaaaaattctacaagattgtggaattcacaatctagtattgatcaaaaattggcaaatcaaattaatgatcttagacaaactgtcatttggatgggagacagactcatgagcttagaacatcgtttccagttacaatgtgactggaatacgtcagatttttgtattacaccccaaatttataatgagtctgagcatcactgggacatggttagacgccatctacagggaagagaagataatctcactttagacatttccaaattaaaagaacaaattttcgaagcatcaaaagcccatttaaatttggtgccaggaactgaggcaattgcaggagttgctgatggcctcgcaaatcttaaccctgtcacttgggttaagaccattggaagtactacgattataaatctcatattaatccttgtgtgcctgttttgtctgttgttagtctgcaggtgtacccaacagctccgaagagacagcgaccatcgagaacgggccatgatgacgatggcggttttgtcgaaaagaaaagggggaaatgtggggaaaagcaagagagatcagattgttactgtgtctgtgtagaaagaagt

SEQ ID NO: 477270 - DNA, 775 bp, Homo sapiens
ctctgtctgaggtcacatagctggtgggtcctacaggacacaatctgcaagaaggcgttatcaaagtacaggtccatgcattttattgcccctgaagaccttccggtgggacaagatgtggaggttgaagacattgatattgatgttcttgaccctgtaaaaggcattcagaggaagggatatggaaatggactgtggaaatggctgaagtcaatgggctcagtggaatttgggaaagctgatcaggaagctgttgttgaatcaatggtgtattttacagttgaagatgtctcagaattgcagaggatggatgttcaaaaatggtatttgagaacttcaaagctggctctggccttggcaattatccgctcaaaaccagcagacaaaagcagcagagaatacacagagcaccttgctatgttgctgtctgaggagcagtcaaaatggagatcaaaagttgaaatcttggaagctgaagttatgcaattacgtcaaaaacttcttgtgagcaggctttgttcaggatcctttaagagtgatttagataaatggagtaactgttaaaggggagagaaaaaatatacaaaaggggagcatacactgacaggaaaataaaggaagaacatggcagttatgtaaggatgacatgaaatagtgataatccttgctctaagaaaactccatacctgaaaatcaaaactatattaaagtgtatttatattattacatattttttctagaattttcagtgttgttttatatgtgcaactgtcgt

SEQ ID NO: 477271 - DNA, 604 bp, Homo sapiens
gagcttgctcgtctgaaagtcttcagatgaactctttcaaccaactgacaatcagaaaacctttcaatccactgagccagcagaagggagaagcatctggatgtcagggactacagctggaccttagagagagaagtggcttgacttcagagaaacaacttgatgggataacttcagagaagaatccagccagagacagccgaacttcaggaggagattacctacccaccccaccccctttccagcactccttcccactaaaagccactttcacttgcaataaaatcccccacacttactatccttcgattcgttcgtgtgacctcatttttcctgggcgctggacaagagcttgggagccaccagtgcggataaaaaaggctgccacgctggccctttgcccttgctgggtagagggcagccgccttgcgtgaaaaggcaaagggcttttcactgaaaagccatccaacttaggttagccttaccatacatgtataactttgctattatgtctatatttttagttttcaaatccatacagagcacaaaatctgtggctaggcattgttataagcactttacacatgctaatacatttaataat

SEQ ID NO: 477272 - DNA, 719 bp, Homo sapiens
atcagttaaagcctttgtaattgaccacagccagacctgaaaaatcgcacatagattttaaccggaagccaaactcctcatagataaggcttctaaagtcagctccttgatctgtcatggcactaggaaactctctggcctgtttcctgtctctcccagctagattcctaactgttggattaaggatttataatcctttggaggagaagaggtgttatggtttctggaattttcagcctttttgtgctggtttttcctcatcttcatggatttatctacctttggtctttgctgttggtgacctttcgatggagtttttgcatggtctcctttttgttgatgtcgatgctactgctgtagcaaaggctgcagaacagcaaagactgctgcttgctccttcctctggaagctttgtcccagaggggcacctgccagatgccagccagagctttcctggagatgaaagttttgtctataagctgctgactggggctgctgcctttctttcagagatgtcctgcgcggaaaggaggaatctagagagccagtccggctaccatgactttgtggtgtggtggtgggctctgctcagtcaaaacttccaagtggctttgtttacactgtgaggggaaaactgcctactcaagcctcaataatggcagacacccccacaacccccgaccaagcttgagcatttcaggttaacttcagactgctgc

SEQ ID NO: 477273 - DNA, 556 bp, Homo sapiens
aaggaaaactggatctgagggatccagaggaagatgacagcagaagtcaaggggcacagcgtaggatactttaacatattcagttcttgttttataaaaaaagcactctttgtacaaatagcaaagacatgttggtcagatcaattgaccaaaataaaacgtacatttacatattatcagttcttaaaagaaaacaatcaagcatcagttaaaaataaatatcaaagaatagaggtacccggaaatacagaaggcctttatctgtttttgaatcccctcctggaaatagctggcactgtggacttcaaagctccgggagagctttccattgttttagccctggactcacctcttcataatttaaaccttggaacctccatttgtcctggagttagttatcatattagaccaagtaacagattcctagcttttcagctcaacagaatttcactacgcttacctgaaaaatgactaggttatgtttactttatgtgactgattaagaactttgaatcagaaattagactgattaataaaaaataaagttacctgtaat

SEQ ID NO: 477274 - DNA, 1443 bp, Homo sapiens
aatcaatgtgtcagcagcctcctgcaacactttcccagcaggtaatgttacgaggtgatgttgcaaattcaggctttccactgatggtagtgacggaggagtgggaagcttctctgcaaggagaggagaaagtggaatgcacatcccataccccaacgtctgcagctgcatttcaagatactggcttctatcacactacactcaaggggaagaagatgcaagtggctggtcatggagaggactttttgacgagcgccggcaaaagagcacagcgaagaaatcccaggatacggaaagccctctgtacttgcaacaagggcaaggagggggatcctgctggcatccagtgcatgtcagccaaatatgctgttaagctgtctacaatgcagaggatggtcccctacaacaaagaattatatggcccaaagtgtcaacagatctggagtctaatgacagaagattcaattagttcttagattgctagattactgtcaaagggactgatataacgatatatcaactttaacataaacatgtagaatttgggtccagtggtttttcttccacaaactagggcatttgttgtcttaaatgtatgccactttttgcttgctatagttggtggactgagatttgttacatttgatgtaatgatacattctaattattcaaagattaaacatttccctaacctcaaggtggtaaattatgtcagagctaatattaaaaccccaatctgacacataattgcccgttatcttggtagtttataatcaacctttggaactttctctgttatccctccaacctcccagctactcctttcccattcctaaccagcctaccttcagctgtgacttctttcagaatatctgctttcattgttgcactatggatgtcctagggaaagaaaaatataataattcattcagtgaaccgtaacaatctgagagcatgttttgcctaaagtgataaagtgaaaaaagttctgtttttattctattaacataccaaactaatgaaacaatccaaaaaaggcctaggtaataccagccacttgtataggtaaacgtttatatgtgtataatatattgaatcaactgtgtgtttggcttcatgaagaaacagtgacagagcagtaatggaatttggttgtttaatgcataatatacatattgctaatctttttaaattaacatatgcttcaaatgcatatggttgttttagaaatagtacagaaagttcacagttaaagcacatggatggattttactttagttttaattgacattttgcccaaaagcacagaacggtaactatttcaatggtttaatgttacaagattacaaaattcttaaacagttacagtattctacatcaattatttcacattaaatacctgattaaaaaaatcagtgcttgaatgaagcacaagataaacac

SEQ ID NO: 477275 - DNA, 920 bp, Homo sapiens
acgcccccctgaaacatgcccttcagctcactgtgctccaggcagcaagaaggagagaagagctttggcccttctggggttccagaccttggggcttcccaagcctgggctgtgacatactgtaacactgtctttgggggtctaccatcctggagtcttcgagctttggggcatgagcaaacccaagcagaggtgccgccagccacagaagtttctggctgggcagcaagcttcctctggccccagtcaagtccagagatgatgactggcagccaaggattagaatcaaaaaccttagaaatttacctgatattctacgttactgtggctaaactggcattcaaaccacaatacaaggtccttcttgcccttcccttccctttccacaggcagaggaacctctccctgtggccaccacgaccagcagcccatgggagcttctgccatgacactgccgaggttcttcagtcagctcgtggtgaatgccaccaggcctgtgattcacccttcagggaagtgaaatcccctctggtccagggcaggtccagaagtactctctaagaggctatgcctggactcagggacaccaagagcctgcctgttgctctaccccactgtggcttagctggtacctaaggttcaagacaaagtcccctttacctctgcaattgtcaaataggagtctttcacaatcaccacagttgggaatgtgatgggtcatacctgaaataagcatgtctcagagtccaaggtctatggtgtactaggtctatgacgtccaagacctatggtgtatagtccaaggtctatggtgtatcccttaaagtttatttaaagggataataacaaagaacttcccaaaactagacagcaatatcaatatcgaagtacaagaaggttatagaacatcaagcagattt

SEQ ID NO: 477276 - DNA, 872 bp, Homo sapiens
attgctagcacagcattctgagatggaactgcaaggcagcagcaaggctgggggaaggggcacccgctattgctgaggcttgagcaggtaaacaaagcggccaggaagctcgaactgagtggagctcaccgcagcccaaggaggcctgcctgcctctttagactccacctctgggggcagggcatagctgaacaaaaggtgcagaaacttctgcagacttaaatgtccctgtctgacagctttgaagagagtagtggttctcccagcatggagtttgagatctgagaattgacagactgcctcttcgagtgggtccctgattcccaagtagcctaaatgggaggcaccccccagtaggggcagactgacacctcacacggctgggtacccctgtgagatgaaacttccagaggaacgatcaggcaggaacatttgctgttcaacaatattcgctattttgcagcctctgctgctgatacccaggcaaacagggtctggagtagacctccagcaaactccaacacacctgcagctgaggctaaaggaagaagttcaaacccattgcaaagaagctaaaaaccttgggaaaagattagacaaatggctaagtagaataaccagagtagagaagtccttaaatgacctgatggagctgaaaaccacggcacgagaacaacgtgacaaatgcacaagcttcagtagccgattcgatcaactggaaggaagggtatcagtgaatgaagatcaaatgaatgaaatgaagggagaagagaagattagagaaaaaagagtaaaaagaaatgaacaaagcctccaagaaatatggtaatatgtgaaaagaccaaatctacatctgactggtgtacctgaaa

SEQ ID NO: 477277 - DNA, 807 bp, Homo sapiens
agccagactgtggcctgcccggacctgtctttccgtaccagggatggtcaccctcacctacttcaatggaggccaagccatacgacacaaaagatctgtgcccttcagcctctgccctgttgttggggactccaagaatgtgaaagaagagagatataaaagcagcatgagaagcaagaaattgctaagcccattttactttgctgagaatgacggtttccggcttcatccatgtccctgcaaaggacatgaactcatcctgtttaatggctgcatagaattccatgctttccttctaacaggcccctctgctgcaggtctgctggagtttgctggaggtccatgccagaccctgtttgccagggtatcactagcaaaggctgcagaacagctgcctgttccttcctctggaagcttcatcccagagggcacccaccagaggccagttggagcgctcctgtatgaggtgtctcagagctcaagcactgtgctgggagatctgctgctctcttcacagccgccaggcagtgctttgtcccagggagatgagagttttatctataagcccctgactggggctgctgcctttctttcagagatgccctatccagagagaaggaatctagagatacagtctggctacagcgactttgctaagctgcagtgtgctcctcctagttcgaacttcctggtggctttgtttacactgtgtgaggggaaaaccgcctactcaagcctcattaatggtggacgcccctccccctatcaagcttaagcatcccaggtcaactttagacttctgtgctg

SEQ ID NO: 477278 - DNA, 582 bp, Homo sapiens
gaactaatttgcattctcaacaacaatgtccctcttctataggactgctgtggtttgctgggggttcacttcaggccttattcttctggttcactcccatgcctggaaatgtcactcagtgaggctggaggacagcaaaaatgggtgcctgctccttcctctgggatctctgtctttgaggggccccaacctgatgccagtaggaaagctcatgtataggatatctgacaacccctgttgggcgtctcacccagctgggtggcatgggaagcaggacccatttaatgaggtactttggttgtccactggtggagggggtgtgttgtactgggggaaactcactcatctgggctgcccagattcctcagagctagcaggaggaaagagtaagtctgctggtccatggggactatggccacccctctccctagaggctcaggcccagggaaatcagagttctgtccttgagctcctggttggagttggagttctgcagggaggccatgcagcctcagtgttgtctgctgccccgcaccaacatccccccaccgtcaaccgccaaggagctcagatggcttaaac

SEQ ID NO: 477279 - DNA, 848 bp, Homo sapiens
agccacagtgaacgatagatgaatgattggaagagagcctctaaaaggcaaaccccatggaaccatcagaggacctttttagaagcaagtcttcaaagcattcctttagcagagggtgtcagtctcataatagggactcctaaagtccctcacactcgatactcaccctatctgagacttcaaaggggactcttgacccagaggaagaggaggcagaagcaaagttcctgcaaagacaaaaaggcaggaagagcccctgacctgttagccagagatgacacgagctctagctcatgtgaggcagctccgtggggtcaccttgaaaccactttctacagcgaaagaagtcagtgcccttcgcccctaaagagaccctctgaccttcgccagtcctccgctctgattccggctctcatatttctaaaatgataggatacatgtttctgttcattaattccattttagttgtgtttatctgatgttaagcacatttattgagtttttaggtccagtggttatgcattttcttttacttctacaagttttatttacgtttccaaagctttttattatttgcatgtaatgttttgtgtttgtttgatgttttgattcctttctttaactctcattcatcttaaataagattactttatgttctttttcaaactgtcattcaaatacctcaagtttctatgacactaatcccactgttattttgtgtgtggactctaagccatttaaattgtttcttcatatgctttcttataacaagctcatcgttaggtgatatattttgttattgttttaactgagtattttgtgtgacctgaattctagaagtttctttc

SEQ ID NO: 477280 - DNA, 700 bp, Homo sapiens
gaatattgtggcctgaatataccttgtgtgtgaggacaaactcccagcagccataggcctgcatggtgtctgcgtttatgctggagctcagagggaagcagcaggtgtctaataggcctcgaagcaggagaacctcagcagccaacaacagatactccctggaaagcacaggggacccaatttacaacagcttcagaaactgggaaaaggtttacaggaccaaaagatgctcccatcatctaggaaattccaagaaatataggagctctgtgtcagacactcctatcacctcctatcactcagggaatgacaaagatgttaggagctctgtgtcgggaactgggggtcaaagaccaaatattagaacaaaagattctcctagcacccctatctacaagggttttaggaactgtatatcagaaaacaaggacaaagaccaaatatatatttcacaatgtcagggtagtattacaagagttttcattgcataattacttgtgtatttcttttgtatatacctttcatctgtatccactgttctattaatatttgctttgtgtttctttaaataagcatgatgtggcaattcatccactgtgaagcaaaggacagaattgctaccccttcctttataccactgatattaaaaggtggacacattaatcatgatggcaataaataccagggaatacaagcatgg

SEQ ID NO: 477281 - DNA, 1088 bp, Homo sapiens
cacagtgtttgtgactcgatgttggtcagagatgcgtgaaagtggaagacattgcagggaacttgaagaacagttctgctttttagcacttccccagagtgatgtagcccagatatatcagaatggaataagtaccagagcatctacattgaagatactaggaaatcctcttcttggaatttatatgtttagacatgttgatattgccttgaattattctcatagtcaaagcattactgtagaaagtattttaatttttaaggttctctttggaaaagtgaagaaaatccaaccttctgtggataaaaataaagtttctttggatccttctcctaactttgattgccatatgtcaagaaatgcaccttctttgaaagataccattgaactgcaagcctacagttcagcagtgtacttctatgaatacagtgtcctttcaaagcctgtagataaacctaggcaatgtcttccatatgctgtagtaacagtaaaatttcttggttcaaaagtagataatggacgccttatgacatctttgagattcctctcaacaggatttcctaagagagctggttattagctgaactttcaattaaaattactggacacaatgtacctgtattaatagttgtctatagaaacactttttttcaaatttgtcttccttattatttccacagaaaggacatgctctctgaataactgtacagtggccaaaagatttggaaaaggaaaagatgctactgtcacctttgtgcatttcaagaaacctgtagatccatttgttcaagaaaactgtttatgcaatgcactaaattcagagataaatcctttcatctcaaatatttctaactcctatggaaatgtacaaaatggaaacatttctatacctgaaacatacagtggacagacagagcacagtttagcagaaattagagacacttctcaagtacttgcacatgattcagacatttcacttatgcccagtgatgccaaagacagtgttaatggtgaccttttgttaaattggacaagtcttaaaaatattttaagtggtcttaatgcttcttttcctcttcacaacaata

SEQ ID NO: 477282 - DNA, 702 bp, Homo sapiens
gtggttattgttaatgaggcctgacccttctctcacttaatgatttctgagtccctcttgctggatctgcaaaatgaaaattcgacttacctcccagaggctttacataccttcacatctgctggattctgtggccacagtggaagagcagcttgcacagcaactgcgcttgtggagctgcctctcactccaggcgtcccaaacctggcagctttccggatcctgcagggagctctggagcagggttggcccttcacttgtcctaaattgaagcaagaagagaggggtgcagctgtgaaaatcggcaggcagtgtgcccagcatctggaggacagggcaccggacctgaagagggattggaggtggagcaccacagcatccactgcacatgagcgtttcactctaaatgaaggaaacagcaccgtgctggagaacggggagggcactctgaaatttgacaactctcctttgaggaaacttattactagatgagctataaatccagtaatgtcataactgttgccaaatatctgcttctctttctcctcagtatttgttctaagtgagggtaaacatagttctgctcgggcatcatctgatggtttaggttccctttggtttatttattcacaaggactctgtttctcatcctgcctgtaggcgataatggatgctttggcctggagcgtgtagttcatttag

SEQ ID NO: 477283 - DNA, 768 bp, Homo sapiens
gtgttgatgatggtgaggggggtcgtggtgatgttgatggtggtggtggtggtggtgatggtggcagtgctggttgtggtggtggtgatgactgttgatagtgctggtggtggtggtgttggtggtggtggtaatggtgatggtggtcgtggtgttgttgttggtggtggtggtgttggttgtggtggtgttggtggtggtggtgtgctggtggtggtgatgatgatggtgatgatggtggtagtagtgatggtggtgatgactgttgatagtgctagtggtggtgatgatggtattgatgatggtgatgtgatggtggtggtggtgatgactgttgatagcagccctgcctctggggaggcttttgtagcttccagcctggccgagggtccaccccgcacccctgctaacgtcacacagggcgcactgaccgctgtgctcaagtcactgtgactctccagcaactcccatgggctccctgagtcggggcttatcccgcctcatctccagtgcctctacaggcaggcccaggaaagcagacaagtgtattgtgtgttttatgagggagtaacagtgcattatatagtttccttatttactacttttttgtctctgttactggaactgtcccactaattacttcatactctctttcatgttttttactttctctttaaaccaacccttctccagtgtactgtataatttccttatttatgatgttttgtgtcttccactagattgtaagcttcacaagcagagattttc

SEQ ID NO: 477284 - DNA, 1681 bp, Homo sapiens
taacttgtggaatttcttggcacacactttcattgagtctgcggctgaacgggcttgctgggcgctcccaggagttcagcttcgagggcagccacatgtccgcatgttaggactcagagcacgcgaccgactggaccccacggctgtgaacatcctgcagcagatcattgagctgggcgccgagacccatgacgccactgcccttgcctcggtggttgccatggcaccagggacggtgactgtggttaagcagggaggtggcccagggacccaggagtgctgtggggagcaccaggggcccgtgtacctgggtctggggtgggggcaggtgctgagcagggaggccttagtaatgacttgcctggttgtaacatgggccaaggattccaagtctcggaagtatctcagcctggtctctcccttccgcccttctgcccacttggagtccaagcagtttatagccttatggcatgtcctagggcataatgtcctttggccatgggcttcctgacctatgttaccctcttgaagtcatgttggcgtttttaacaaatgacaatttcttggttcttgcaaatagtgaacctgcactgagcattcctgccccttgatatttagcagaacaatcagtgcctgtctaagactgtcactgacatttgtcttggcctcttgttcctgggttcaccgagccagctactgcaccgtgccctttcttctttccctgggggtgttttaagtaataagtacaccttatgatgacacagcatcttctttttaagaaggtcaggatgattgaacagtttgcctttatgataatcttcggtctttctgagttttgtgttaattttgtattgtttttactgctgagggtttgccctaaacagcagactgggggtgctagggcattgtggggtgtcagcctctgaggtgggggagggagttgggctcccagtgaagtggtgtgggtcattcgttcattgtacaagttacttttcagtccatgtgcacatacgaatggccaggacactcccctgtgtacaagagcttacctgatgcagtcttgtccaagtgaggctgtccagcagcatgcactttaccaagcctgcttctctgtgactcggccaccattcctgctttactgagacctgataagaaatacgttgtgtttgtcagagtttcttagagaaacagaactcataggggtgtgtgtgtgttcgtgtgcgtgtgcgtgtgtgtgtgtgtgtgtttgtgttcaaaagaaggaattggctgatgtgactgtggaggttgacaaatcccaatgtctgctgtcagcaagctggggtcccaggagagccaatggtgtgactccaatttgaaggctggcaggcttaggacacaggaagggccagtgtttcagcttgagatcaaaggcaggaaaaaccagtgtcctggcttgaaggctgtttggaggaagaattccctccttttcaaaaggggagggtcacctttttaattctatttaggccatcagctgattggatgggccccacccacactagggagggccatttgctttattcagtctgccagtttaaatgttaatctcatccaaaaacaccatcacagccatacctagaataatgtatgaccgaatatctgggcacccatggcccagtcaagttgacatataaaatgaact

SEQ ID NO: 477285 - DNA, 1082 bp, Homo sapiens
gttcatgaccaagctctgcaatccttccttgccagtgtttctcaggtgagtaatgatttgtcaatgtccttcttaaaattgggacctgtagttgatcacgatattccagggctggcaccaggccagcaactttgttctctggtccctccaagtcaagcacctgctgtgctagaggcatcaaggtgttcacagtctgctggcaacaacactctgacaggagatgctggcaaaagcactctggcagggtctgctggcaagagagatatggcagtggtcactggcaagctgaggctgcactgcaagcagatgtggccacgcagggaccctggaagaggctggaagacagggggtgctcaggtcagactgtccctatcccagggacaagacagccctgttctgcccaggtcagacagtcaacaaaggctagaaccacctagaagaatatggcaagcctggggaatgggtgcccatggccgtactctctactccagccactcccatgccaaacctttggggctatgggcaggctggagttctgtctctgccaactctttgggcagttcctcctgccagctcagatgtttatgggggtcttggggtctcctgtggctaggataccagaggtccattacaagagtgggccactccacacctgtttcactcaccttttcagtaggagttgctcagggccaggaaagagtcctagcgctcaggaatcttgtgcgaggttcccagcttcccctccccacccttcagcccacggtccatgtcctcccactgtccactctcaatgccatccctctaaagatctgtgcagagtgtgccagtctactgggcagtcttgtctctttttgagggagaagctcttcctggctgcatctagtcaaccatcttggctccccctctaattatttttaagtaattaaaaaaataaattcaatctgcaaagttttctttgtagtttagggcaaatgtatctagacctaaacatttgcatgtattttaggagctagatgccttttgaaatgattcacctatcttgggcttcagtttctcctttacagtgtttattttatccttcc

SEQ ID NO: 477286 - DNA, 646 bp, Homo sapiens
aaaaaacttcatgtaaactaaatgcatggcttgatcctcccatgtaccagaaggggagcagcatctttgagctctcttcccaaatcctctgcttggtctgggcgtatcctgtgaatgaggagagaatctaccccacagccagatgcttgcatttggccacagttcatttccaggcagcctggaagagagcatcccacaacattgaacagaggcagccaagatactgtcgggtgatcaggacagctcccgcctctgtgttcctgtggagcctccttcctctccaaggaatttgtcgcatgggactgcataattcagttgtccattcagtcaacagtgatttactaacaacctactttgtgttaggcactgttccaggggagcccctctggctgctctgtgaaaatagggcaagggaggaaataggagacctcctgggagataactggagtagtctgggtgagatacttcagtgccagcatctaagtgatatgggaagaaaacgttctgatacacagaacacagaaatggctcagaaatgagaaactgactgactactaaattgttagtaaaagcaacagaataaaatttctccattagagtttctcacctgcaaggtgttgactttccagttacctggcatttcatt

SEQ ID NO: 477287 - DNA, 528 bp, Homo sapiens
tattgttaggcttaaaggacgagacagatgcaaagtactaagcatgtggcctggcacaggggaatttatccctgtgccggtgttgctcccaaacacggtgaccgtggggcacatccatgcctgtctcacataccaaggcactgtcagcatgtgctcctgctgcaggacccttcggccaagggattcatcctgcggcacaggctcgagtctaagtttacccgtgacctgtggtcattctgtggacggcagaccaggcatgactgcacgcctcgtatcagaactcggaagcctggtggtgacaggaaacagtccgactgctttagagaggcctacagacacgtgggtcttttcacagaggcataacgaaccatgcagaaaggtagaatcctcagatgctttatctaataatcacagaactgaagatccagaaggatccttgggggctgcgtgttgcactgtggttgtttaatagaagtaggccccatgaggtgaggggacctgcatgtcgggtgagttagggctgactgt

SEQ ID NO: 477288 - DNA, 508 bp, Homo sapiens
ctgaacagacctggcttttttttttttttttttttttgagacagaaaacaatactatgacaagcttacccaggaggaatgtgttcacagagaagaggacaagcagggacacagtggccctgaagacaaggacaggcccctggggacgaaatgaagcccaaaggacaaatcgaaagcaggatggtgactgtcaggggctgggaaaggcagaaatggggattgctgttcagtggctaaaagcaatagcaggaagtgctggcaagtggagcccagaacaaggtgggcacacaggaggtgggtggccgcagcatcatccgtcttgcttacagctgccctggcataaaaagcagagcctgaggcaaggattgagtcttgatgcttcacttggcaggagcagtcccagagtagtgagagtgaaagaggaaggaaatgaatccaagaaggaaggaaagcaatgcaagctcttgcatgctacagtactggccaggcctcacaacgagctgtgatga

SEQ ID NO: 477289 - DNA, 662 bp, Homo sapiens
ggtccagggcgatgacttgtctgggaaatgtggaatacaacaaaggagtctgtgtagacaacttgcctagtttggtgctgatttttagatcccagagaagcttcctgacaaaacataagggctggctcccagcagggcacattcccaaagcaacatccatccaggaccgggaaggcctggctgtgttagaatgggactgggtgttgattgcattgtgtttcctttctctgcttgcttccaatccatgggctagaaaacgagggcagcccttgtggattctgattagaagcttcacaaatcaagttgctaaatttgcagaacattttgacctgaagtttgcctctcccacctccctgcgggatctcattgcagcgggagctaggatagtcatgattagactagtgatgggaactgaagagaggccatttgcactgcctgggcagagtggcctgggcacagggccagagggcacccatctggctgcagacccgcaggtgccctgtgagaaatctagacaggccaggggtcagagccagagggtctagcagagtgacacggtttggctgtgttcccatccaaatgtcatcttgaactgtagctcccacaattcccatgtgttgtgggacggacccagtgggaggagccatagctgtgcctgctgc

SEQ ID NO: 477290 - DNA, 833 bp, Homo sapiens
gctggcttcaggagtgaagctgcagaccttctcgattagctagatacagagtgtccacacaaaggttctccaagtccccaccagagtaactagatacagagtgtagattggtgcattcacaaaccctgagctagacacagggtgctgattggtgtatttacaatccctgagctagacctaaaggttctccacgtccccaccagactcaggagcccagctggcttcacccagtggatcccgcaccagggccgcagatggagctgcctgccagtcccgcgccctgcgcctgcactcctcagcgcttgggtggtcgatgggactgggtgccacggagcagggagcggcgctcgtcggggaggcttgggccaagcaggagcccacgagggtgggggaggctcaggcatggcaggctgcacgtcccgagccctgccctgcaggaaggcagctaaggccctgcgaaaaattgagcacagcagctgctggcccaggtgctaagcccctcactgcccggggccagcgcggccggccggtggctccaagtgcggggactgcccagcccacgcccacccggaactcgcactggcccgcaaacaccttgcgcagcccaggttcccgcccgcgcctctccctccacacctccccgcaagctgagggaggcggctccggccttggccagcccagaaaggggctcccacagtgcagcggtgggctgaagtgctcctcaagtgctgccaaagtggaagcccaggcagaggaggcgccgagagcaagcgagggctgtgacgactgccagcacgctgtcacctctcactagcactttgggagtgtgaagc

SEQ ID NO: 477291 - DNA, 2174 bp, Homo sapiens
cccccagtgggtcttagagactggtgcttcatccatgtccctgcaaaggacataaactcattttttatggctgcgtagcattccatagtgtatatgtgccacattttctttatccattctatcattgatgggcatttgggttgcttccaagtctttcctattgtgaatagtgcctcagtaaacatatgtgtgcatgtgtcttttatagcagaatgacttataaattttgggtatgtacccagtaatgggattgctgagtcaaatggtatttctggttctaaatccttgagaaatcgccacactgtcttccacaatggttgaactaatttacgctcccaccaagagtgtaaaagcattcctatttctccacatcctgtccagcatctgttgtttcctgactttttaatgattgccattctaactggcgtgagatggtatctcattgtggttttgatttgcatttctctaacaatgagtgatgataactttttttcatgtttgttggcagcatcagtgtcttcttttgagaagtgtctgttcatatctttcacccactttttgatggggttgtttattttcttgtaaatttgtttaagttctttgtaaattctggatattagccctttgtcagatgtacagattgcaaaaattttctcccattctgtagattgcctgttcactctgataacagtttcttttgctgtgcagaagctctttagtttaattagatcccatttgtcaattttggcttttgttgcccttgcttttgatgttttagtcatgaagtctttgcccaggcctagatcctgaatggtattgcctaggtttttcttctagggtttttatggttttaggtcttacgtttaagtctttaatccactttgggttaatttttgtaaggtgtaaggaaggggtccagtttcagttttctgcatgtggctagccagttttctcaacaccatttattaaatagggaatcctttccccattgcttgtttttgtcaggtttgccaaagatcagatggttatagatgtgtggtgctatttctgaggcctctgttctgttcctttggtctatatatctgttttggtaacagtaccatgttcttttggttactgtagccttgtagtatagtttgaagtcaagtagcatgatgtctccagcattcttctttttgcttaggattgtcttggctatgtgggctcttttttggttccatatgaaatttaaagtagtttttttctaattctgtgaagaaagtcattggtagcttgatggggatagcattgaatctatcctatccatgagcatggaatgttgttccatttatttgtatcctctcttatttccttgagcagtggtttgtagttttccttgaagacgtccttcacatccattaatttccaatagtatgttgaataggagtggagagagggcatccttgtcttgtgtcagttttcaaagctggtcatgcaggatctcacatacagtcagagatgatgtgatgaatgacaagggagtctgcactacttgcttatatagcttactcatgccctctgggccaggtctgctcttcatcatggatggccataactttaaatacacgacggtaatttacaatcaaacacatccagatggacggctcccccaaagccaaatctatacccaggacgcagatttctacaggaaaatgcagccaagccagaaaaaaaaacaactcagggaacaaacagtccctaccactgtaaagccatggttccctctgctgctccgaatggagcaccacatgaaggaggctgcccttgtttggtaacatcccttcctccaaaccttcacttctgtcttccaccagcctttattcaccccgtgtccacattgtctggagccttctcttaggggctaaactactggttaaactgataatgaattatgatggggagagtcaaaaataggttgtttctttcctaatagcaataccaatagttaccatttattaagcaattatgcacaaagttggggcatcagagtagctggagatcacgctggagatatggatacagttgaggagaaggggcaggctaaggtgaagtcttggaatcttatctttataagtcttcataagagacaacattgaaggactgcaaaatacaatttagttttttaaaggcttatt

SEQ ID NO: 477292 - DNA, 490 bp, Homo sapiens
gaggggctcctcacatcccagatgatgggcggccaggcggagatgctcctcacttcccagacggggtggcggccaggcagaggctgcaatctcagcactttgggaggccaaggcaggctgattctggagcctgcactggcctactggaagccttttggagagaaagatacaaccaacagtcattaccaaccaggacgagctgacattgacagactacaaatgtacaatgagcccaatcagcaccacttggagcagaagaactgcctagtctctccagccctttcctcctcccacagaggcttctgccccagaagggccaaacactacccttcagctttgtccccaggaagggctatgcccatccctccttcctccccctatggagagagggtccagcagtttcaaaggcaactggtgaagaacaagtcatgcgaataagaaataaacatttgttgtaattgtaagccttcatgatttgttacaggagcac

SEQ ID NO: 477293 - DNA, 647 bp, Homo sapiens
tgctaacggcagccgactaatatagtctacttgccatctgtgtgctggttcttcacctctgggaatatgttccattgcattttttcagtggacaaagtgataaaagaaaatgatgaacttggggattctgtctcccagcttcagcagcagttactgagcctcaaatctgctatgattgccctgagagagagtcttatctcctgtagagaagaagctgaaattgtgggaaaacagacacaagctcttatcatgcgagtggctgacctgcaacaaaagatgcaagaacagcctcaccaggtgtctactgttaaagcagagaacccaaagaagaaagaagttaagcttttcaaaaaagtgggggctaagttccatatggctcgcctggtgagaaccagatggccggggccatgtgctggaagagctgacgccggccagcaggcagctagcgagagtgaaataaagtggcatgagaacagatgtgaaaaaaaggtagaatcgtctctcaataggcctactggtgccagaagcctaagggaacagctctggttgctaaactagaattccaacatctccagaataaaagctaatgtttgtgtagtgccttctatgccagatttttgaaacgtcaccatcgtattagggtgggg

SEQ ID NO: 477294 - DNA, 708 bp, Homo sapiens
ctccaacagacctgcagctgagggtcctgactgttagaaggaaaactaacaaacagaaaggacatccaacaccaaaaccccatctgtacatcaccatcatcaaagaccaaaggtagataaaaccacaaagatggggagaaaccagagaagaaaagctgaaaattctaaaatcagagcacctcttctccttcaaaggaacacagctcctcgccaacaatggaacaaagctggacagagaatgactttgaggagttgagagaagaaggcttcagacgattggtaataacaaatttctccaagctaaaggaagatgttcgaacccatcgcaaagaagctaaaaaccttggaaaaagactagacgaatggctaactagaataaacagtgtagagaaatccttaaatgacctgttggagctgaaaaccatggcacaagaactatgtgacgcatgcacaagcttcagtagccgatttaatcaagtggaagaaagggtatcagtgatcgaagatcagatgaatgaaatgaagcaagaagagaagtttagaggaaaaaagagatattatccaggagaacttccccaatctagcaaggcaggccaacattcaaattcaggaaatacagagaatgccacaaagatactcctcgagaagagcaactccaagacacataattgtcagatccaccaaagttgaaatgaaggaaaaaatgtt

SEQ ID NO: 477295 - DNA, 959 bp, Homo sapiens
aagccattcagactcatgggccctcggctgggtgatggggacccaaagtttaatcttcacacgagaactaggagggagaatcctggaccacacaggtaccacacgagaactaggagggagaatcctggaccacacaggtaccacacgagaactaggagggagaatcctggaccacacaggtaccacacgagaactaggagggagaatcctggaccacacaggtaccacacgagaactaggagggagaatcctggaccacacaggtaccacacgagaactaggagggagaatcctggaccacacaggtaccacacgagaactaggagggagaatcctggaccacacaggtaccacacgagaactaggagggagaatcctggaccacacaggtaccacacgagaactaggagggagaatcctggaccacacaggtaccacacgagaactaggagggagaatcctggaccacacaggtaccacacgagaactaggagggagaatcctggaccacacaggtacacgtaagaaagaaagggaagaattacacaggaaaacacggatttgattctctcctttagagctgggctcccaaagagttccataaaagggaagacatctttgcttccctgccccttatctctcaagccttctggacactctgtttcaagttccaggaaaggaaatcttcggcctctccttgagaagcaaagagaattcagtgacaatgtgtacagaaatgtctctgactttccttagatgattccatctttcttcctgcaactcacctcctcacaaacaaacgtcctctcctgcatttgggttaatttattttcagtaaacactcatcaaatgaccaccactaagcacaagacctagcagggtcctagaaatatagtttctgtcttctagatctttgaaggaaagacataaaataaagtaaagtgaaattcacaccaagt

SEQ ID NO: 477296 - DNA, 3415 bp, Homo sapiens
gactccgtgctgatggactgcagggtggcggtagatttgctctacatgcagcttcggccaagtcatggaatggtcagccggtgctgccgccaacatacacacccaggtcaccagctgccccaggtgttcacactcaccacaccgccatcttcggagacctgatcttttccaggcttggctccacaattctgggaagaaagctcagaagcttctttcacagtttttggagctggcccgggaggtacggcactatggatacctgcagctggatccttgtacctgtgactacccagaatcaggctctggagctgttctttctgttggcaataatgagatcagctgctgcatcaccctgcctgacagccagacccaggacatcgttttccagatgagcagggtgaagtgctggcaggtcactttccttggaactctgctggatacggatgggccccagagaactctcaaccagaacttagagctcagatttcaatacagtgaggatagttgctggcagtggtttgttatttacaccaaacagaattggaaccattatcctagaacaccagttctcagtgtgtggtccctggaccaacagcatctgtatcacgtggatcttattagaaattcaaattctcaggccccaaacctactggatcagcagctctgggggaaggccgcagcaatctctttaacacgcccaccagacaaatctgatgcatgttcaagtttgagagccactgtcctaggacaacagataacactcagcacaactgtgatcagttcagttgtcctctcggatgagtgcccctttgggccctatggagggaagcatgtgcaggctttgattgaagagctgacagcagagaaacatgctacagggagtggcagtgcccagaagagttccccaataaaatggaaattgtttctaggggatcatgccacctggggaatgcaagaaggagatattcatgagcagggagcctctttacccccaggactgacacagactgcacagaatgccaataagaactgtcctgtttgtcagcaagagagacagaaacttccagtggctatggggcagattgcctggtgggaaggccctgaccagagctggcaagtgaaactgatgctgcttttgccacatgaggacacaggaagaaggcgctaccttggaagcagagagaagacttcaccagacacagaatctgctgatgccttgatcttggacttttcagcctccagagctggagattattctggattatccaagtgtgcccaatataatcacaagggtccttataaggagacaggagagtcacagaggaaatgcaaggacagaagcagaagtcagaggggtgtaaaaatgctctacactgctagctttgaggatggaaaaaggagccatgagccagggacccacagttttgatgctttccctaattcagagcaggctttcccggagtctctgactcagagcagcccgagccaccgtgaggaccgcccacctgcagggggcgcgccgggggctgcagcgcgagaccgctctggcccagcggggactccgactacccctgtctggcccctcccctccgcccgtcaccgcctccttgaagctgccgctgtcgctgctgctcgttcgagtcgcaggtacttggcccggggcctgtgggcagcgcctgggctagagccacttgatatctcctgcaccgtccctgtagcactggaggtccagtaggcctggccggggccctgaggggcgagggtgcccgggcttcccacaccttccgcggcgactggagggagccgggccgaggaagcgaccgcgggtccgtgatggcttcttcgcggtctgtgtgttcacgagggccgggcagaggcctgcgagggttctcgtttgcgcttgcgggttagggctgtggtccggggaacccctgggcagcgcgggcagccctggctcgcggttaatcggggggtggagcgcggaagccacgccgcaggtccagctgctcggccggggcgagacggtgctttcgcggcgtgtgcttgcaggagcgcacagttcaggcgccgggacaagctgttggggtgtgagtgagctctccagaatggcacatggctccggggtgcccgggttaaaaggaaggatttgcacaccttccacttagggctcgggtaatcgcaaacttcctcccttaattggcttgcagtgctaaaaagcagatcgttctctctgaggttttcccaacagtacctcaagaaaataacatctgttttttgtaacgttccacggtattcggaattggctacagaacataataagtatttctacccatggcaaattccaccacaccgtcaaggctgagaatgggaagcttgtcatcaatggaaatcccatcaccatcttccaggagcaagatcctaccaaaatcaaatggggtgatgctgaagctgagtatgccgtggagtccactggcatcttcatgaccatagagaaggctggggctcacttaatgggggagccaaaagggtcatcatctctaccccctctgctgatgcccccatattcataatgggcatgatccctgagaagtctgaaaacagcctcaagatcatcagcaatgccttctgtaccaccaactgcttaatcccccggccaagcccatccatgacaactttggcattgtggaaggacttgtgaccacaatccatgctgccactcctgcccagaagactcgatggcctctgtgggaaactgtggcatatgtctgtggggctctccagaacatcatccctgcatctactggtgttgccaaggctgtgggcaaggccatccccgagctgaacaggaagctcactagcatggccttccgtgtccttctgcaaacgtgttggttgtggacctgacctgccatctggagaaacctgccaaatatgatgacatcaaaaaggtggtgaagcaggcgtcagagggcccctcaagggcatcttgggctacactgaacaccaggttgtttcctctgactttaacagtgacactcactcttccactttcgatgctggggctgccattgccctcagtgaccactttgtcaagctcatttcctcgtacaacagtgaatttggctacagcaacagggtggtggcccatatggcctccaaggagtaagactgctcgacaaccagccccagtgagagcacaagaggaagaaagagaccttcagcttctgggcagtccctgccatgctcagtcccccaccacactgggaatctcccctcttcacagtttccatgcagaccccacaaagagctctatcttgtcgtgtaccatcaataaagtcctctgtactcaaaaaaaaaaaaaagatagaaaatgaacaacctgattttaaaaatgagccaaagatcttaatggaca

SEQ ID NO: 477297 - DNA, 1287 bp, Homo sapiens
tctctcactttctcaggaaccctgacatcctattcaaaatgacagtccctcccccagcgtcttccagggcttcccacctcgcaaagtcaagcagaaagtggtttgtctgtgagtttcaaaatttcgtggccacagcccacagcaagaaatacattttacattgcaagccaaagcctgatccagggcaaagtcctaactctcttcaattctatgaagttgagagaggtaaggaaactgcagaagaaaagttggaagccagcaaaggttggttcatggggtataaggaaagaagccatcttcataatgtaaaagtgcaaggtgaagtagcaagtgctgatagagaaactgcagcaagttatccagaaaatctagctaagatcattgatgagggtggctacactaaacaacagatttttcagtgtagacaacatggccttctattggaagaggatgccatctagaactttcatagctagacagaagaagacaatgtaaatttaaggttgaattgaaattcagcgctcacccagctcgactggcattttacctctactcaaggatattctcacaatttcaccacatgaacaagtttgttcttgtaactgtccatgagtagctcatctggttttggggtttttagctaaagttttctttgtaaaattgttctagttaattcattatgcaaaaggcataagggatacttgcacatgtaatcttactaagaattaatagaagggccagaaccaaacctgtgtgtttatgcagttacatgaactcatctaggcattttcagtgccttactttagtggactgagctacatcgacttatatctagaaaattctgtcctggggaaaaaaactgctaaattatgtgctatgttagcattgggggctcttttggtaatcttagtaagaaaaaaacttttagcctagaaagcctaatttttaattgatgtttggatttttgaaaaatgctttaattaggagttgggttaatgctagatgaacttataactaaatttaatagcatgtgagtatatataggagccttagttagcagtcaatagatacaaggtttcttatttgggcagggttggcaagaataaaagacttactcagatactataagagcttaaggagggtagaggggtttacaaagttaatcatacatggcaggaagaactgcttgtatgtgtctgtgtctatatcttgtttttattacgtccattgagatgaatcaattagcaccaaatgattttatgtgagtaaagaatattccatttaagc

SEQ ID NO: 477298 - DNA, 891 bp, Homo sapiens
acagtgggctggcacacacataggaaacactcaatatgtggtagttatggagaggcgtaaggagtgtggttttgaccaacaaatcctgttgtctgtgacatgcctcccccgggcgccgtcagcctggtcatctggttcgggctgcctgtgctccttacctgcgtgggtactctggctccagcctgctggctacttccagggccccacccaagcctggagcactggcctcaaccctggtgtgtggctccagcttggcattcttgaagctgagcaggacttgacctcactacccagttgtgggaggcgagggcttgggtgcattgaagattcagctgccgtggctgaggggggcattgctattggaggcatcgtgggcattaatactgctttacaagaggtgctgaccactctcatccataatggcctagcatatgtcctgaagcctcatactatcaagatgcaaaggaacaatgcacagctcagcagaagaaaggaaccaaaagaggggctgtgtggggaaaggggacaggatagaatgtccagggcaaaaggctcttcctccaaagggaaggagctgccacctggatgccggagggtcacaatgaagcccttgttagtgagagaaacccaagaagggcaagctgctgagagaggagcagaggagcaactccagactcttggcccctttgcggtctatcgggtgggaatgttcaactcctgggccacagagtgagactctatgtaaaaaaaaaaattaaattttctctatttttccttatttgatagaaagaaattaataaactccaaataccaaaatggttttttaaatgacgtatcctgtctccagaccaaaatgattaaaaaaaaaaaaaaatgtttagagccaggaac

SEQ ID NO: 477299 - DNA, 573 bp, Homo sapiens
gcgggactctgcactgtgagatgtggaagagcacaggctttagagccaaactgctgggggaggagtgctactgccttttaactgagaccaagttaggaatgcttaatgttcaaaccaaaacctttgtcctggagacagtacatcaggcagctccagctacagccacaattcaaagggatccaggtacaactcgggcctctgctctagctccagagggtgtaagcagtaaggcttggcagcttccacatgatgttaagcctgtggatccacagaatgcaagagtgaataaggcttggaaggttacccctagatttcagaagatgtatgaaaaagcttgggtgcccaggcagaagcctgctgtaggggcagagccctcacagataacctctactagggcagtgcagagaggaaatgtggagttggaggcccttcacagagtccctactggggcactgcctagtggagctgtgggtagaaggccactgtcctccagatcccagaatggtagatccaccagcagcttgcactctgcacctggaaaagccacaggctaccaactctaattcatgaaaa

SEQ ID NO: 477300 - DNA, 746 bp, Homo sapiens
ggcctgagtatgaatggcccctgctcctgaaaggcaaatcttcacctccaggcctctaaagcagtgtttctcaaccttttacccatcagggcacactgagaagatacttttgttacgcactgtgacaaactggcaagatttgaagccccaggggaagctgcagaagctgaatgtgaccagctcagggctccagccacccagagtcaatgtcttggggtctgcagtagatcttcatttgttccctggggcgacagaatttgctgccccatactatcacagtgtcacagccggagtgtcagagctggtgtacggaagtaaaggacggctgcagtgggttgtgagagtcaaaggatttgtaaagccagaatatttgatggtagttttcttagaccttgatggagcaaaagataataatggtacagaaattggagggtggaactttggtacctcacattatcctcaaggaatgaaggaatggaataaagagatcagatgccagagattggctcatgatgatgaagatgaagatgaagttgctgatgactgattgattgatgacagctatgctttattaaggacttaccatgtgccacgaatattatctcatttaatctccaccacagccataataataagggctgttattctcattttacaggtgagaaaatcaatgctcagagagattaatttgttcaaggtcacatggttggtgagtggcagaaataggattcagactcagtatgctc

SEQ ID NO: 477301 - DNA, 1425 bp, Homo sapiens
ggcctgtagcctctttgtttcggctgatttctctcttttggaacaggaatgcttacccaatgcctgtactcccattgtatcttggaagctttgatgatctatattggttttagtttcaaaggaaaaaatacttcttccaagagatacaacaatgatccatggacctggaagttgagactgccgcccagtcactttgtgctcctcatggctatgaatccacaggcaaacagttattgtactggctggggtgattgggcacacagtggagaagtcaatggaaaactacaacaacacaattcaggcaggactactaatgtctcagatcctttaggaatgaaggcttgggtcacactaccaggtaaagaactacagccagctcaggtgcttgctaagggcaaaaggaatatggaatgggcagtggaagaatgcagtcataaatactatgaccaggttataacatatcatcgcttctgttttgctagcagacttgttggctttgatgagcaagctgccatgttgaagaagcctatatggcaaggaactgagggtagcctcaagccaacagctaacaaggaacaagcacttagtccaacagccctcaaggaactgaatctttccaacaataagaaagtgaatttggaagagaatcctccccagttgagctttcaggtgagaccctagccctggaagatttcagccttgtagaagttcctgaagaagaggactcagtttttgaaattttttagtattccatttaagtttatctattggctttttgactaaatctctgtgtatcatttaaataaaaactggttgttctaagaattacaatatacatttctaaccttttgttttataataataattaacattttatcactttgggtaaaatatagagacttttgaaccttatagcttcctttattcttcaccatttatgttacaattttcacatgtattaatctatatacattgaaaaccctaccagacaatgttatagtttctacttttgacagtcatgcatattttaaaaacacttaaaaggggaaaattatctattatacatttttatcataaacataacctgatttaaatcgcacaacctgaaattcattgtttcctttctttctgtttccccttcctactttctaagatttgtggaaacactgagctcaacctgtcgttactcaaatctttactatttttgtttcctattttatgcaacatccaagttaaatagcctctctcttatgacactgttgatgggaatgtaaattggtgcagtctcttttgaggacaatttaactctgcttatcctatttgtaaaatgcatagtccttttgatccagcaattctaattctatgaatttatcttacaggtatgctatggtctgaatgtttgtgtctcctcaaaattcatgtggt

SEQ ID NO: 477302 - DNA, 618 bp, Homo sapiens
cctccacatctacagtggtggagaactgatgttgagttcccaccgcctcaccctttggaagccatgatgaccatttccatgccaggccaaaggacaagcagtgagaaccagaagtccattctagcctctgaagtttcttgggaaagcaacaggaagacatttaaagaatatgttccctggacctttggtgctgttccctctgtatcattgtcctcacaattatcaaagacaaagatccacaaagaaaaagctctgatggctcgtttcctcttccagggagccagtgttaaagagaactactgtgaggcatttaaaacacctgaggacttgaccgatgcatatttgataagctcaaatggtcttagagatcttcagtgtcagtgtcctctgtttctaaataactacacttttcagccccaacttctcttcctttgggcatttaggttactcgactggtcaaccaggatctaaaaataaacctagaaactttgagagtatttttccccccttggctgattgatgtgtgtttttgtgtatgccaaactgtgctgtgtaactatttacttttgcattatgtatagcacttagcaacccacagtggaaatgaaagctaagagc

SEQ ID NO: 477303 - DNA, 568 bp, Homo sapiens
gacatcccgggctcaagcgatcatgaagaaatggaatatgaccagcacctcacaagccttcttgatgccccctcctggtcactatctttaccccaagggtgttggtatcctgacttctaacaccatagttgtgaccagtgaaatcatgatgaaagggacatcagcccagccttctcaggacctgctgctgctcctctcccaacaggctctggtctcagtgctcagggcttcagccagttgtgtgctggtggaacagggagtcggcttggcctacatagcctctaggagtctaaacagagaaaagaccttaaccaagatctggaactttacccaaaaaaggaacggagtatctgggacaatggtaaattccacatcgctggatgttcaaagagaagctggtaatattgcaagcaggagggatattgttgaaggagttcaagcaccaaatgagtgatgaggctggatgactttttaaagggccctttcagccctcaagttccataattcaaattcaaataagacaggggcaaaatggtcacccaacgagcgctctgtattcataggaagc

SEQ ID NO: 477304 - DNA, 734 bp, Homo sapiens
tctagccctatgcacaagaacatttttttccccatgagaaacactgcaatccgtgttggaggtggggttcggtgcgaggtgattggatcatgcgggcggatttctcatgaaaaatttatcaccatccgccttggtgctatcctctcaatatctctacagaatggtgcatatattcaagaaggcttttccactctggttggcgagagcttgaacattccctggcccaaggtcttcagcactgtgacccagtcttgctcagattctgacgtctttctctttggtgtgtgggaaggtctgtggttgagtcaaggtcagagcttctttgccttgtttctaggccattcggagaaactacaccttaagactgatctctttacttcctctgctagattctttttttgctaccctctggattcctgggccaacttttcgtgatgccaataattgccaggcactgtgtgaggcacttaacatagagaaggtatcaccacacacatttgcagatgaggatgcatttgcaagttttctttttctattctcttcaagtaaggcaagacagtttggctgccgggattttaggaggtgtgcagggtctccatggagaacactggtgagagaatgcactggtaactttacctcatcatgtgaagaatctcactgaattttaaacaattattagattacctaggtgacttacaagcacttggaaatgtgcatattaaaagtaccagcat

SEQ ID NO: 477305 - DNA, 1037 bp, Homo sapiens
atatctcagagatgcaccttcatgccctaggtggggcaatagtctgcgagaagggcctgatgaaggaggagcttcgaggcgtcctccttggcagcccaggctcagcccatctcttcctctctcccttcatggcagttcactgggcatcacacttggcagcctttggttctccagagcactttccaccatcccgcttgtcaccaccttctttccgtgttgatgttgttcacggactgtctccctcagtagaatatgactctggttacggtcaccaccagagtgctcagtgctgtttactattcaactccgcaggagccagaatccagacgctgggaaatgtgaatgttccaatatggctgaccatcatggaatgggatcaacagatggaaataggaggcttcatcttcttcatcttggtcctgaggctccatcagccaggtttccagcacacattaaacccagagaggacactgtgtgaagacgaagacagagattggagtgatgcatctgccagctggggaatactgaagtctgccagcagccaccagcagccaggagagggacagggtgcaaattctccttcacagccctcagaaggaaccaaccctgctgacaccttcgtcttggactttcaacaatatgattctgttgttgccaccctttccctgggaccagcagacaattgtacccattattttctggttctaaggaaggataaacttccttctaaggcttcagggatgacagatgccttcttgggacaacattcctgccacactcctccccaagctcagacactagaccatgtactccctccttctatcatcacttgaatttcaggaagcaaatcctttgactcaaccagaagaggattacttagtgctttcttcattcttcattttaattttcatctaaatgcatcaacactctaccatctgaggctttgattttcttttaactacaattcaagtgtttttaagatttaaagactcatctttctgtctcctgtttttattttgccatttggattagtcaga

SEQ ID NO: 477306 - DNA, 590 bp, Homo sapiens
ggaggccagtctgaggatctagaccaaggacagacatgctaaggagagagaaccctctctagtccaggctttaagagtcaggaaactttcatttcctgttgctcagagcacgggctctgggagccctccatgaaagaagctcaactgctttgctggagagacaacatggagaggctctcctgggagaagaagaagggctcagctgagcattgccttccagctgtccctaccaaggcaccagcaaagcggaaatttttcaagactgaattccctgacattcagagattctaccctcaaaacggccaagccccagaaccaagggagaaagtgggcaggaaggagctgctgcaatgtaagattcaggaagccacggtcaatctggggcaggcagggctgaagttcaatgcgaagtcattcccagcttggaggcgagaagcgatgccaacatgcagcgacaaagtccaaacaagtccaagtggagaggccacatggggagggactgatgacctcagccaacagccagcatccaccaccagacatgtgaatggacaaaccttcagaagattctagcctgcagtcttcagggcttt

SEQ ID NO: 477307 - DNA, 943 bp, Homo sapiens
aaagtgcccagcacatagagaagcagctattatggcgctgcgtgctctgtgggaacttctccccgtttgtttaggggatagtaaagaatggggggtgggggacccccagctgcgggtctgttggagttttctggaggtccactccagaccctgtttgcctgggtatcagcagcggtgactgcagaacagcgaatattggtgaaccgcaaatgctgctgcctgatcgttcctctggaagttttgtctcagaggagtactcggccattcagtgtgacttggcattctgcaggactttcaatggtactcctatgccttgtgatggatcaggagcaagtgttttctctcattgcccctgataaagttgtggaggccacaatgcggtgtttttcaccaagcacttacatgcatagaaaggccacacggcatgaagatggcaacagatttttcaaatgttttctgttgaactggcacttttcaaggtggacacaatagcttctcattcacatattcatatatggtgccaattattttctattttcagaaagaatagaagagtttaaacattccattaaacagagtatataatagaataaagtgaagagtaaaggctaatttttctctttttctcttaactccaaaacttataaacaaatacactgtacaaaatgatccatcattggcattgcaccagacacataacagatatctatatctatttgagcaaggacattgtgatcttattcactgctatgtgctccggctcctagaatactgcccagcacaatcaataattgaggactgaatggaggtttaaggcacctctcatttggtgatggtttactggtcagtgggtaaagaggaatggcagaaacagttgccggcatatgtaagccattcacagaagttgtggtgagcattttacatgttcatttccttaagctca

SEQ ID NO: 477308 - DNA, 641 bp, Homo sapiens
tatctgcattccttatcactatggtttgaatgtgtcccctccaaaattcagcatgttgaggttgagtggcctgacacaaggtggggaacagaggagaaacctgtgctgtgtccaaaagccccaggggttttccaaggtgtatgcagacctctgtctctcccaggctatcaggccctttgtgaatgaattcacaatgaccctgccagaaatatggaagctgagcaaagacagatcaagtaatctgacggaggtggagccaggattcaatcctagtttcctttacttcggagtccatgctgtaaaccaccatgctcagctttctcctgatcctccattttgtcatcttgacctccacaatggaaaatctgagtcgcgggcagccggggagggatgtgagcgctcgcagcagccgggagatgcagcagaggaagtgggaaaccctcccgctgcagcggcgctgctgcactcacatgcttacatggcaacaaatatgaataaccaactgtacgctgaaagactttccacaaggggatatgaaaatgagggcacagggacaccgcccttttgaaatgatttatcgatgtactgaaatctatgtatttgtgacatcaacgtactgaaatctatgcatctgtgatcac

SEQ ID NO: 477309 - DNA, 792 bp, Homo sapiens
ttatttggctgctgtgcagggaggtgtttctctcccgcgagctctgcccccatcccaggaaaggcagccagaagctgaacgcccagaccctgcgctatacaaatatcaatggctggagagaggttttccttgttcgcctttaatggccattgttaagggacagaaagaaaggccctgggatgtcttgaaggtactgagccagaggcagaactcacagctcacctcagaggtgaaggcctcttcctctccagattcaagccgacaaagtgaaatggtcattgatcctgtatttaaaggcctctggggacaggatttccacagccttccttggagggcttatttcattgccattgcagctcaaaaatacttcctggtgtctgccgagccctctctccctgcctctgaagcctcatggaggacatgtgagggtggaaagcccaagaacatggcaccagcatctggtgaggactttgttctgtgttatcctatgacagaagagcaaaccatctcatggacagagagaggaaactcatccttttatcagaaacccactcccaagatatggcattagtccatttatgagggtagagccctcatgaccaaatcacttttaaaaggccctacctcttaatactgttacagtggagattaagtttcaacatgagttttggaggggacattaaaaccatagtaagagcgaaaagactgattgcctgttatattcccaggtactagagagtctgtaggggttgaacggagaaataagactcaaaaggaaataaatacaaacac

SEQ ID NO: 477310 - DNA, 743 bp, Homo sapiens
agtatctatacacagaacctcagaggctggcacacagatatagagataggagtggccgcagaatgggcgaggagacaacaaaagggcactaagtggatggagccccctctgggccctggtattgttaactgtaaggattacataaatctagagctgctggtcattgcctttgcctttacaaggagtggtgggaaaaatcttcccaagaatggcgctgagaaatggcaagacaattccctgatagtatcttgtgagcctctgggcctctcttttgagggtctgctgcagtctgctggaggtccactccagaccctgtttgcctgggtatcaccagtggaggcttcataccagaggggcaccggcctgatgccagctggagctctcctgtatgatgtgtctgtcaacccctgttgggagttctctcccagtcagtatatacccaaagaaatgaaggtgtgtatcatagacttctgtaaggctgttcatagcaggtttcttgatgatggttaaaagtattagtgactcaaatgtttatcagcaagagaagggtaaacacattgtggtgtattcatgtaataggatactagcaaccagtaggaaaaaatgttagagacatagaaaaaacgaacctcaaaaacatttatgttgaataaaaaagtcaagtacaaaagaatatacatactgtttctatttacatgaagttcaagaacaggaaaaattatagtgatacaagtcagaatagc

SEQ ID NO: 477311 - DNA, 636 bp, Homo sapiens
tgcctggagaccccaaggacagggcctggaacagtagtatgagctcagtaaatggggctgttacaagatctgtgttcacagtctggggaatcccaattcctcggcacacggcttctgcggtgccgtttcttctcatccgctttccccggtcaagttcttccaaccacccccttgattctggaactttaccagaaccatgctatccttcatgtctagaggaccctggcataccagtcaggcctgatcctcaacaaggatatgaagtgggtgaagctcgtcttgtgcctgcccacgaaggaatctgggagtggactgaggagggtaagcgagccaaggcgctggggacttcgtggaacagagaaagggagagaggagaaattcagaagcagacagaagagtgtgttttgaggagtagagagttattagcagtgtcaaatgctgctaggagtgccttaatgctaagactggaaattgtgtgatttagcaagctgttgaaaactttcctgagttgtaggtggcaaagtagaggttgaggacaacttgaagagtgaggaaagagggacacattaagtgaaaatgaattatttgagaagttggtttttcagagatgcaaacttcagccaggaacatagggct

SEQ ID NO: 477312 - DNA, 930 bp, Homo sapiens
gttagaagatttccagttgttttctgaaaaccctcgtgggtccggaattggttccttccggtgggttcttggtctggctgacttcaagactgaagctgcggaccttcgccgcctcaacttccctgagagcctgcagaagactctgtcccaccagggtctccccgctccagcaggtggtctagttctggatcctgaccctttattgccgcacagctacatgccaggccccgataaggagcgtccaccctttccttagtgacaacagaaagtcacagtgagagccatgtcgatgtgtcattgtgagtggtcgggggaggaagtttgggctaagagtgtcagccataggacagccaccttggacctactccccatcccacctcccctgtgcttcgggaacttcaggctcctggcctttatgaatagtagtgcagttcagcccttccagcatcgaactccacatggagagacacaggcgacccctcagttgatgggaccttctcccagggagcatttactgggcactgtcagccctgagttagctgatggtggaaacaaggacagctcagatggccgttcaaggcaggtggccaaggagcgcacaagaatggtggctgatggtgtgcagggggagctgaatgatgagaacacatggacacatgaggtgcagggggaacacacacactggggcctgcaggagtgtggggaagcagatgctggcaccatgcttcttgtacaacctgcagaaccgtgagcaaaataaatctctttttaaaaataaattatccagcttcagttattcctttatagaaacataaaacagactaagacagtaggcttcagtaataaataggcccccaaaactttggtggcttaacccaatcaatgtttacccattgctcatgaaacagtccaaggaaggtattttgggtt

SEQ ID NO: 477313 - DNA, 678 bp, Homo sapiens
tctgtcaacttgaagcggatgagccttaggcttgtttgtggacatgttgccctttaatgttccgtcctttgctttcatcaagggcggacatagaaaaatgccaatacagagaatgtctccatatcttctacacaatcactgcaaagagatttcctcttatattgtcaacctgaatgacagagaaatgctttctaaaataaaatatttatttgggtatagatcattgcaatgggaatatgcctgccataactgttgtaaaacagagtcagttacctacgaaggcctcttctggttggtagcagtaaagccaccacaagggcaagtgatgagagaagggcatggccacggtgtcggggtagaggtggtgactaggacatcgcatagattaggaacagccttcacagtggcaacggttcaagtctattgaaccagcaatgtctcacttttcatgaaaatgagttcctaaaatgcagtggtggctacctgaaacgtgcacattcttaacatttggatttaatctggaaggatgtctaaaccatgtaaggaatatatgaacagctctcagaatcttgttaacctggtatcccacagtacagaaatagcttctgtaattcagaaatgcaataatcacctgttaatttctctgatgggtggtttaggcattttcagtgtttaatt

SEQ ID NO: 477314 - DNA, 644 bp, Homo sapiens
agcttcactgaccaatataggatggacagtgacaaagatgaagaaggcttcgggtggctgatcattcaacaggagtggaagacagaatacagagaagatgaacatgctgaactgtactggaagacatggccagactatggaagagacaaccagactttgggcaacctcattattcctggatgctgggcaagagcttgggacccactgagtgtgggtacccggaaagggcgttacactggccttttgccctctctggcggaaggcagctgccctaagcaacaaggaaaagggccaactgaattgctaacacaccactgtccgcagacagcaaaactaaaagaacactgtaacacactctgggatcttggggtcatgggcaccctcacccaagtgccactacaagggggtcacaggaaccctcacctgggtaccaccaggagccctccatggagcttgcttctgccggcgcctggagcagctgaccggatctcgcactcgctcactcatgtagactttgaaatgggcccccagtttgtttgtgatgagctgtgaataagcctgcattcctgccacgatgaattgtggttgtgtatgcttttggatgctgtgggacagaacattggggttatatttataagcagatt

SEQ ID NO: 477315 - DNA, 622 bp, Homo sapiens
ctgcagagattagtgccaccatcaaggacttgaaagacgcagaatggtgattcccgtcacatccccgttcaactcttccatttggcatctgcagaagacagatggatcttggagaatgacagtagattattgtaagcttaaccaagtggtgactccaattgcagctgctataccggatgcccaccagaagcaatttgccttcagtgggcaagatcagcaatatacctttactgtcctacctcaggggtgtatcaactctccagctttgtgtcataatcttattcagagagaccttgataacttttcgcttccacaagatatcacactgatcatttacattgatgacattaggctgattggatccagtgagcaagaagtagcaaacacactggacttactggcagctcttggcttgttactggactttggtgaaaactgaatgtttgactatgggtcatcaagtcaccatgcgacctgaactgcctatcatgaactgggtgctttctgacccatctaaccataaagtgggtcatgcacagtagcattccatcatcaaatggaagtggtatatatgtgatcgggctcgagccggtcctgaaggcacaaataagttacgtgagga

SEQ ID NO: 477316 - DNA, 807 bp, Homo sapiens
accaagcatacgcctggtactaaataactccaatttaatgggctacgtgacaaatcagatggtcaaagaagccaattttctgaaaaccctaaaatcactacttagtgcatattactacctggatgatctgcaggcaccgaaaatcgacatcatcaaaatgaacctcattgtgtctctccaaactttatattctcagagcccttatctttctgaattgtgctcctatctttatagaccagatgtgtctgctttttgcctctttccactcaaccaggctcctcaactgtctttttcaaatgtgcatctctccatttccacttctactagtgatgcctgtgttagagtctacagctgtaataaggactatgttagtagaaatatgtgtgtccctttatgtttctttgttaaaactctctttgatactatgaaatatatcattctacagcacagatttgcacagatccccaaaagaataaacttcaggcctttaaaaacctagatctgtttctgcttcttggatagtcttcattttcattaatttcttcttcatatataaatgcttcattttgcagaaccccttgtaatccccaaatatgttatataaattatttccctcacactttaattattctatgaaaatcatttaatttgtgtttctctttccacttgcacctgggaaactactttagcttacctgtagtgataaattcataccagttttgtcaaataaagaaaaaaatcttctaaaataattcgacaactttattgaagagaaacatctatttttgaagtcaagaaacattgtgc

SEQ ID NO: 477317 - DNA, 458 bp, Homo sapiens
ggtccctggaaaaagagagcagactatggacaaaatgcaaattcgagtgattttcttattcgagttcaaaatgggttgtaaagcagcagagacaactcacaacatcaccaatgcctttggcccaggaactgctaatgaacatacagtgcagtcatggttcaagaagttttgcaaaggagacgagagccttaaagatgaggaacatagggaccagccatcggaagttgacaatgaccaactacaggagaagttgtcaaggaactcaacatcaaccattatacagtcatttgcatttgaagaaattggaaaggtgaaaaagctccataagtgggtgcctcatgagctgagtgaaaatttaaaaattgtcgttttgaagtgtcatcttttcttattctatgcaacaaaaacgaaccatttcctgaatagattgtgatgaaaagtggatttatatgacaacc

SEQ ID NO: 477318 - DNA, 695 bp, Homo sapiens
tgccaccactgaacagcatctgagagtgatgagggtgacagcagttgtcctttaccctgtgcacctaaggtggccgtcctatcctctccagaggctcaatgccatgtgtcaggcattcagggtagtgggcgcccttgcctgggtgctgccacattcccctggaaatgatatgcctgctctggctgcaagcccctcacagagcttgctcctgtgtcagcagagtggctggctggatcttgcactcgcttactcatatgctgcctcctgcaaggagcctaggaccatcaaactccaaatggtcatgaaactgaagcctcagaggatggcttgccttcactggggactgttagataggcctctgaggagatctgtgggctgctttcccaaaacagcaccccctgccagcaggaagcagttaagatccatcttcgtccctattctgacagcagctagagacatacctcttcagaagggggaattgatagtggctggaggcaggcaaatacctagacagatagggatgcctccccggtgaaatcacaccttcaagccaaaaaacagcttgaaggctgaaagtctggactgctggtcctggatgaacccacaacccagagtgagaacttctgttcctgtttacccactcttttctgatttattctttctgaataatgcctttcaaccaatagaatattgcc

SEQ ID NO: 477319 - DNA, 806 bp, Homo sapiens
ctcttatatttgttccttcttttcatcctcacagcaactctttatggctgctcggcggcccgggctctcctctgactgccccggacaaactctgcgttgttctgccggtaggtggcctgctggcttgctggtgcctgctggtacgctcctctcgacgtccagctgcctgtgtatctgcctgctaggagatatgccgtcacagcgttacttgttaatcaaaacaggtttcccaaatccaaatgcaattaaagccgagtttttagaccgttatctccttcctcctggagaagacggaggagggaagctggcctgtcaattaagcgaaaggaatctgaaacaggagaacagacacagtggcgttctgctgcagggacagaaacctctgccagggagactcgccccacacgctaatagcagattcagtctctcctgtgggacagggacaaagttcacaggctggtgcccatccgcagaccatgcttggagcagcatgactgaggataaggaaccactaggaatatctaagcagggaaataacttcatcaaattttgccctaggaaggttacactggcagcaagatggagaaaggtttttgggcagagactgagtcaaggagacaattcaagacaccagaagcatcaatgcagacaagagatgcgaggatctgacccggggccctgaatatccttagggggagcagattatgcatctaagaaccatttcagagacaatgctgcgcttgttgagtgttgagtatatgagacgcgggaaagggaagattcaagatttctggaaaactgtgggc

SEQ ID NO: 477320 - DNA, 557 bp, Homo sapiens
ccgccatgtatccgccatgggcattccaggggctgactttaacacagacaccaccccagccactaacgtattcagatttcatttccaggaactaaaaatgtcctctgactgtgccatgagacactgggtcttttgtgaatcttgtgttttggcagctccctctgacacaattccagtgggagaaggggaactacctcatttcaccaagtggggttggatgcccagggcttccactaggcctctgttgacagttggagggatgggctccttgttaccacagaccactgtcccgggtaggggtgaattccagtctcccctggtcattggcgcctaccctgtgagtgcagggcgattgtctaacataaatttgcttgctggcactgcttcttctacaccttcttcctcatcatctggcactggtttgaagcacttatttccataaaattttcttctgttaaacattctggggtggtgactgttagctcttgaatttccccaagttttatatcttcaaacccttcactcctcacttgtttgccatatctacaatgtctttc

SEQ ID NO: 477321 - DNA, 746 bp, Homo sapiens
cctctggctagggctggtctaaatgttccttctgtgggtcctggctgagttctgcctggttttggcagcactgcatcctaaggcaaagagctcttataaggcaggtctggtggtagcaaatttcctcaaaattcacttgtctgaagcagatcttatttctccttctcttataaagcttagcttcactggatataaaattctggcctggaatttctttcttaaaacaatgttaaaaaacatcctaacatgcttctggccactcttccacagggctgttgaagtttcctggggatcttcttcagatcctagtcatcttggtttctccagtacttggagggctgatttggggcttctggactcattgcatgtgtttgcggctcgtgcttcctgtagagcatctgtggcagctgctcctctgggggcggtcacaggactgtcccttttgttggaattgctgcttctggcagtagcaatggtcttggggaattatatctcttactaaactagctaaatagcagtttgagacaataagttgtagaatgttaaaatgctgaagtcgattgcccttgaatttctgcagcagagactgattagatttagtggttgtgttttgttgttttttatatcactgcctagtaatctgtgtatccaaaatattttatacttaaagaacagaatttgcaattaaaagtaagacttttaattaattaattatgtatatattaaaacacagggctcgaagggag

SEQ ID NO: 477322 - DNA, 511 bp, Homo sapiens
ctggaacagctgagtcactgaagatggctgcctgcctctccccctgggaaatcaaaactctctttgccagagaatacaagagggggtggctggaggccctggttgggaggtcctgcccactgaggcagaatggatcaggatcccagttaaaaaagcagtctatccatgttttggtagagcagctgtgctgtgctgtgctgggggatccctttgtgcccccagtcttaggaaagtcagttttgactctcctaagcccacaggctggaacagctgagtcatgcaaacagcaaagatggcagcctgcccctctccctgggaactacatcccatcccaggtaccaggcctgcaccagtgccatactagccactgtggactcagattccaggcatacctcaatggacccaggctttaaacccataccagcgcctggtcagctcctgtagactcaggctcaaggcctaccccagtgccaggtcagcccctatggacccgggctccaggcctgccctc

SEQ ID NO: 477323 - DNA, 516 bp, Homo sapiens
gcttctcagaaaccttcgaagtgctaagcagcgcttggaaaagtcaagaagcagctcctcggagccttgctcaagatggcggaaggagattcggggatccctccagctcccctcacagctgagctggcccttgaatttaccatcccactcagacgcggcactgtggagaagtatttctccaaagagaaattggatagagaaggggccccagggtcccatccaagagagctggagttcatggaaagactcccatccaccagagagctagagcacacaccagaaccaatgctagggacagagcacacacagagagctagcaagaaagactcacctcaaacaccagatactgagacccagagcaggacactaaggctagtgcaaccctgttgggagggactgagtttgaatacactccctaacgtgacctgcagcggccatacaggaccgcacagagctgagcctacaggaggcaattcttcaatttttctgtaaagcactacatttgcaaagtaataa

SEQ ID NO: 477324 - DNA, 628 bp, Homo sapiens
aaaacggaccaatcagctctctgtaaaacagaccaatcggctctctgtaaaatggaccaatcagcaggatgtgggtggggccagataagagaataaaagcaggctgcccgagccagcagtggcaactctcttgggtctgcagcttcactcctgaagccagcgagaccaccaaccacctgggaggaacgatcaactccagacatgccaccttaagagctgtaacactcaccgctaagatctgcagcttcactcttgagccagtgagaccacgaacccaccagaagaaagaaactgcgaacacatctgaacatcagaaggaacaaactctggacacaccgcctttgagaactgtgacactcactgtggggaaatcagcagacacagccaagggagagcaggtggctaaagctttatcagcacccttaggctgggttcttctcggactagaatgctcatccagccctgccactcccaagatttaccatcaagctggaatgtatcctccaggaccatcctgagaaaaccttcatgagaagtatttcttaagttttgcatatcttaagatacgcaaaagatgtccttatgcaaaatgaagtttgaagtctactggtgtgaagggtactgtttc

SEQ ID NO: 477325 - DNA, 809 bp, Homo sapiens
aaataatcttggatctcccaatgctaaatattttattttaatcatggctgaaacttctgttctcacctgtttggatataaatgccaaagtcatcctctgtagccaggcagccctcaaaccagcaatgcctccggtgatcaagagccagcctttcaacattttctgggcagccccaacaatgtattgtatgccttccttcaacgtggatataaatcttcaagtatttaacattatatcaaatcctttagagactcagagtgggtcaaaaattgccatattttatccaaatgaattagggtattacccttacttatctcaagatggaaaatcctttaatggaggaataccgcagaatgtgagcctttctgaacaccttaggaaaactgctgatgacattggagaaggtgtcccttggtggagatcagaagaacttgttgttattgactgggaaagttggaaaccccaatgggatagaaatcagggcagcagaataatatataaaaaccactctttagccttcactagaaaccatcatccttattggtcagaaatgaaagtggaaacagttgcccgagaggaatttgaaaatgctggaaaaaatttcatgaacattactctcacattggctttagaaatgagaccaaaatgtttatggggcttttatctctatccagactgctacaattatgattacagaataaatccagagacgtacacaggaggacttagtgcatgcaattggcgaaagtgcagcattgggggcagcaggagtaatattgtggggaggatatgaatattctgcttcaaag

SEQ ID NO: 477326 - DNA, 602 bp, Homo sapiens
cagtgtgcttgtgctccctccatgtccttttcgacctctagccacttgtgtcttattctgctgacttactcctctcaaatatcctctaaagatcatctcaattttggcaagcacgtgttcttcctccctttacatggccattgccagttttacaccctctttcatcagtggctgcccaaaacccctggccttttgtaccccacagaaaggaaaccacagtttttcactgggcacagaccaccaagaatgaagactgcgttttctatccttctttatactgggtgtggtcatattaatgtgaagaggcttgctacttttaaaataagtgacatatacctaatagaagaagaaaatattaaatgtttaagattaacattttatactctctcaaataagttggcacatagtgacacctgtgctgatagaatgatcacaaaagtagaaaactctgcaggttctctgtcttcacctcttcaaaacttttatatggagctttaagaagatttagatgcccaggtcatacttcagacctattgacgtaatcttccaggtagaactccagtatgtgcatttcaaaagttcatcaggtagttttgttaaac

SEQ ID NO: 477327 - DNA, 588 bp, Homo sapiens
caggggtggagctgtgcaaggccatgggagccaacctcttgcatcagcgttacctggatatgagttctggagacattggtatgcaagatcatgcccctgagactatttgttttccaaagctccttcatagcatccagtcctcaaacaacaaacattcttttgctattgaaactggttcagaacagaacagaaagaacaaggcttgctggttgaagcattggaggcttgctgtaaccactccctggctactgcctatgttcactgaaggctctggggctctacaatcagcaggtggcaaagcctgccagacctgtgtcttccccttcagggcggcccagggtctcttaagtcagcttgtggtgaatgctgcctggtttgggactcacccttcagggcagcgggctcctctgtggcccagaaaaggtccagaaatgctgttcaagtatcagaaacttcatgagctaaattgatgtgtatcatgtgtcacttaatgatggagatacattccaggaaatgcatcattagggtattctaagaaattcatcattaggtgattttatcattgtgtgaacatcatagcatgtactt

SEQ ID NO: 477328 - DNA, 1490 bp, Homo sapiens
gccttttttgtcttgaagttacccaaaggaatagctctggtcaacagctcccagcgtgagcgacgcagaagacgggtgatttctgcatttccatctgaggtacagggttcatctcactagggagtgccagacagtgggcgcaggtcagtgggtgcgtgcaccgtgcgcgagccgaagcagggcgaggcattgcctcacttgggaagcgcaaggggtcagggagttccctttcctagtcaaagaaagtggtgacagacggcacctggaaaatcgggtcactcccacccgaatactgcgcttttccgacaggcttaaaaaacggcggaccaggagattatatcccccacccggctcggagggtcctacgcccacggagtctcgctaattgctagcacagcagtctgagatcaaactgcaaggcggcagcgaggctgggggaggggcgcccgccattgctcaggcttgcttaggtaaacaaagcagctgggaagctccaactgggtggagcccaccacagctcaaggaggcctgcctgcctctgtaggctccacctctgggggcagggcacagacaaacaaaaagacagcagtaaactctgcagacttaaatgtccctgtctgacagctttgaagagagcagtggttctcccagcacgcagctggagatctgagaacgggcagactgcctcctcaagtgggtccctggcccctgacccccgagcagcctaactgggaggcaccccccagcaggggcagactgacacctcacacggccgggtgctccaacagacctgcagccgagggtcctgtctgtttgaaggaaaactaacaaacagaaaggacatccacaccaaaaacccatctgtacatcaccatcatcaaagaccaaaagtagataaaaccacaaagatggggaaaaaacagagcagaaaaactggaaactctaaaaagcagagtgcctctcctcctccagaggaacgcagttcctcaccagcaacagaacaaagctggatggagaatgactttgacgagctgagagaagaaggcttcagacgatcaaattactccgagctacaggaggaaattcaaaccaaaggcaaagaagttgaaaactttgaaaaaaatttggaagaatgtataactacaataaccaataaagaaaagtgcttaaaggagctgatggagctgaaaaccaaggctcgagaactacgtgaagaatgcagaagcctcaggagccgatgtgatcaactggaaggaagggtatcagcgatggaagatgaaatgaatgaaatgaaggctacaagccagaagaaagtggaggccaatattcaacattcttaaagaaaagaattttcaacccagaatttcatatccagccaaactaagcttcataagtgaaggagaaataaaatactttacagacaagcaaatgctgagagattttgtcaccaccaggcctgccctaaaagagcgcctgaagaagcgctaaac

SEQ ID NO: 477329 - DNA, 797 bp, Homo sapiens
aagttccctgaggcctcctcagccatgcagaactgtgagtcaattcaaccactttccttcataaattacccagtctcagctcgactcttcattactgccttgtgtgacctggggatggagaactgccctcctgactcgccctgcccaggatctgaaaacaccagggagagcacaagatcaggttcccagtgccagaatgatggtcagggaggcatgatgggtgtagaattgccatccaggagctacggtctggaattcggagctttaggaatttgtttgttgcttcattttactgtggctgagctggtacccaaggaaatgatgatcaatgactgtaacatcataaaaagagataatattggacatgatgtgccctttgatgacaaaaaacaaccacacctacgaagtattccagacaaaaaaaaatgaatcctgattctgctcaagcttttagatcaactatcaatatatttaatgtctttgtgttcattcctctttgttatttatggaagacaggtagatgtcagactttgttgttctcacttatttccatgacagaaaagatggaataaactaatttatattggaaagctttgcaaggagccacattaaagaattagtatattttttaacagaaacacttatcaaagttttctcaatgcctacaacacagcaaacttccaaacttcatatttcagtgtgaagcatgtcaataacagatatcatagttatcaaatatgcttagcatattactaattaattatacttttaaatatttaaagctttatgtcaaggct

SEQ ID NO: 477330 - DNA, 741 bp, Homo sapiens
gcacacaatacacttaaacttattcaatgattcgtttttacttttttcaaggtcaccaccctggaactgaagaggccaggctcctccccgctgcaaaaggcgcgaacttcccgaagctccaccccgtcttcccagcgaacaggaagatgcacatagtcttgatctcatctatactgctttttcctgatgaagaagtattgctgttcccactcaactttatagcttggaggccatataactcccagttcatcatgggcagctcagaaactttagggccaatgataaagaattcatctctatttggccccactgtgaacaatggtgatagatgtgggatgtataccagtgcctataatttacagattgatgaatctggattgggtaaagtgtctgctattctggggaagagtataatgttttggctaatggaaatgaagaaagagttaaattttgacttgagttttaaagagataaagacatggcatttggaagagaagcaaataagaacatttgtgtcatcagataaaagtccagaaacagccaggggatagagaaagagagagagatggagagggggagagagagagtgagggagagagagagagagagagactccttgactaaaaaagtgaattgaaggcttagtatgggaatcattcagggtacaagcaatatgtttctgtgggatggtattcatattcatgtgtgaagtaactggcagtcatgggaaggttaaagtaa

SEQ ID NO: 477331 - DNA, 1599 bp, Homo sapiens
tggcttcaggctgggacaactgatgcagcagagaagggcagagcgcccggggggagaaagcaaagaggcgctacactccaaggcggccctttggaaccgtccttggcccgggtgcacctactttggattcgcccagactgcaaatttttctttccttttgctggggccacgggacagagcacctgggcagagcaagcggagaggcgccacatccccgagaggcgcttcaaccagtctcctcctttcccctgctcagacaaagggcacgggaagggctttgctggggcaaaggggggtggggggttctctgtcccacgacagatgggtcgcggttaagactttaattgctgacttttgggccggatcagattccttttcctacctgccacttcccagcagcgaaaaatccccctcctgctgcactcctccgccaccgggctaggttgaaaggaaaaagccaagaagcgcgaagcagcccggctctggaaggctttggagagtccagctgacttgtacacaattcgcggcctctggagccttacctgccttcttgactgaatgccaccagttcgttttacgcttgtggcctgtgaggtgtgtccctccagactgagaggctatgactcagggttggactttatggaaaaaaagaagtttataaaacaagtaacccagtttctccaacctttactgtggagcaacagcgtcaagcaacaaaacccagcaaagttttgcttgtcacttacaagggtgttactgaaatctggaaggcgaacaattagaagatagcccaaacatgctctattgctctacactgaaatacttgcctccaataatagaaaaaacctgttttcgtgcaattgattgattagcgttctgcagcagtccctggacaattttaaagacattttgtgtttgtggccaaaattagaaacaagcagacacacacacaaaacaaccatattcaagacacggttcgactgtttccttgacactacccacgaagtttaaagcattttttatgttattttcaaactttcttaagtgatcccatgaaataaaagtcgataatagaaattaaaacaacacagagcaaagaacgagcttagtgaaatggagaagcagtagaggtaaataaaaatcctcgagctagaaagctctaagaaccgcttataaattcagttacctcctgaactccggccgatggccactccggcccgggagtgccccgcgccgacccgctggccttggccgtctcagccttcattatcgccacggccttggcgccccctgcccccggctgcccaggggaaccaagttcccgctgctggagttggggcagaggagccccgcctcattcaggattcggtggccagcgcagagccatttgaatagaagaagcccgaagtgaaacagaaaagctgaaaactccccggctgggctctccacttctcggttcttgctcacgagttccaaacagttaaagtgacgttggcaaggccgagggccaccgagctctgtgagactcccttggaggggtcaggaaacttagctcgagaagcttggaggcggctgggagttggggcgcaacttcagtga

SEQ ID NO: 477332 - DNA, 833 bp, Homo sapiens
tattttacaagaaagcctaagggaatctttttttaatctgagtttggtatgcatagcatgattccattaccaaaaggaagtgaacttaagggaaaaaaaaggacctcgttatcaaaagaagaagaagaagaaggagaaggagaaggagaagaagaaggagaaggagaaggagaaggagaagaagaagaagaagaagaagaagaagaagaagaagaagaagaagaagaagaagaagaaggagaagaagaagaaggaggagaagaagaaggagaaggacaaggagaagaagaagaaggagaaggagaaggacaaggaggagaagaagaagaagaagaagaagaagaagaagaagaggaggaagaagaggaagaaaatgctgtccaagatgcaaaggggggaagcggtaaccagtgcaccgtcaacctgcttcacactaacaccagagaagaaagaagaaagaagaagcagaagcagcagcagcagcagcagcagcagcagcagcagcagcagcagcagaagaagaagaagaagaagaagaagaagaagaagaagaagaagaagaagaagaagaagaagaagaagaagagaagagaagaagaagcagaagaagaagaaaagaagagaagaagaagaagcagaagaagaagaaaagaagagaagaagaagaaaagaagaagaagaagaagaagaagaagaagaagaagaagaagaagaagaagaagaagaagaagaagaagaagaaatgctgcccaagatgcaatgggctgaagcggtaaccagtgcactgtcaacctgcttcacactaacaccagttagaagtgaaaccctgaagc

SEQ ID NO: 477333 - DNA, 899 bp, Homo sapiens
aagaaccattagatctgctgggtcatatggcccaagtggcagagcagctttcacagcagcctggacctgttgaagagccttctcctcttctggaccctactaaaaactggcagccttccaggtcactcaataaatgggccagagtaacacaccaaaatgaggaatgtgttgcctccaaaatccaaataggcccactagctgaaggcaaattgcttctggtgggccttatggacaggaatggaaaaaaaggcatttgccaaatcaatggctgcataccagatctggaatgcagagaagagcaatcacagagcccttcaaagatgcaggtgcttccctcacaaatctatttcacaaagcacagttcaaggttgcatcttctggaccctcccagctgggatgatgaagaaaggaacaaggtgttcagctaataacgtggtttgggaagggagtttgaaaagagaagataaagaaatactcatctaggagagtaggagtgtggatggactagaaaaaagaaaaagaaattcttggtccccaacatggaaatccaagatgcaaggaaatcataggctctgaatcacctggggaagaaaccgctgcagaccaaattgcatcttagatccattaaatcagaaacttggattgctggattcaggtacaagtatttttaaagctccctaagtgattataatgtatagccaaagttgagaactactgctttggagccactggtctaatggaacaaattgcattgatttacttcccttaatattactatgtataactaactaaataagatgtattattttatgtttcttcttaatattggcataaaccaataaattagtgtatgtatgtttcattgttagaagaatatatgaatattatttttgtaccag

SEQ ID NO: 477334 - DNA, 677 bp, Homo sapiens
gtttgagtgtttcattcattttcttgacttttcctgaggattgtggcctccaggcgcagttgtataatggcccctgcttttgctagaatgcctctccctaacaaaggagtggggctttcaggcataattagaaaggcatgtgaaaagagtaaagttccccagtcacaacttagtggctgggagaagtatctagtgactgcctgtcctaggacccctcggatagtgacagatctggaggacagttctccgggacaggagagcttcttcccagttttctttagttcttctagcacgcaagttagcaaatgtctgaggcaccaatctccatgttctgattctgtgtcccatcacctgggaggaaccatctatctcctgtcccgaagggagttcttcctaggtctggaaggctatgggttgtcagtggtctcagtgttttgggctacgcccttgtttacactgacaacaacgtagtattggagtgttatagcctcatagagaagaccttcaattatcaactataggcttaactctcttcatttctccttcatgctctctcaatatcttcactagctcttttggtttgggtcatctatgcagacaaatgccaaatccttacctgtagccttaacttttctaaaaactctagttttgaatttgccagttcctcctgtatgtgg

SEQ ID NO: 477335 - DNA, 583 bp, Homo sapiens
tgaggttcagaaatgccagacaacaaaagtaactttgtagatgtggtcaaaatgaaaagaaagagaaatagtctcagagaagatgatgtaatgttcaaagattacaaagaaaaggcaactgacacaacattgctcttaagcaagtcattttatctttccatgacacggtttcctgcctcctcaacaaatgaaaagagagaaaatccaccgaaagctctggaaagaagtggcagtggagtcaaccctgatgaagacagagcaactgccaaggggactaaggaaagggttgcaggcagtttccctatttcagggaaacgacgagagtgcaggagcaagaagcacctggtgagctccaagcagcaggctggtgtagacagtggcagcagcctacgtctgagagaagggtcaagatctaagacctggggcaaaggtaactggaaaagaagctgatagactgagagagggcaaagggtggggtgagttgtttcaggatttaaaaaaaatctcacataagttctattttcccagactgcattatttttgttgactcctcctgaagccttttcagctttacttcactcat

SEQ ID NO: 477336 - DNA, 598 bp, Homo sapiens
ttctaagagccacttctcccctccacttctagtctcatggtagtgagtgctatcagccatgagtcagcttgtggtgacccttcgggaactgacctcccctctgacccagggcaggtctagaaatgccatccaacagccacgtcctggaatccagatgttctaccctcctgtggctgagctggtgcctaaggtgcaagtcacaggcctggaacaggggcctcacaactgtgactggtacccaatcctgctgtggctgagctggtatactatatgccagacaaagtcctccgcactctttcctcccctttcctcaacagaaggacgggatctcttttggagccataagctgtgcagcctgattcccatagacacctcagctgatggctcggcaggtcatgtgccctcccagtccactgtctctggatccaattcaacactaggaatcactcaagaattgcagttcttatatcctagactgtttctcaagtttacttagagacacagagcactgcaggccacagtggtgaggcttgcaggaactcaagtttcaacctctgggataagtgattcccctctggctagggctggttcaaatgct

SEQ ID NO: 477337 - DNA, 656 bp, Homo sapiens
acaggtgatatgatggcttagcttaggctcagaggcctgacacatatttacaaagcaacattttaaatcaaatgttgcccgctttgaatggggcttctgtgtgctgtgcttctcactgttcagccctatgaccttcttagaggactgtcctcatgctaatggagctgcttgctggcgtgcacagacagcaaaccacctgctccaaatcacatgcagacaaaagagagaagagaactgtggctgcagcacccaagactgtatgctcatgaaaatattggcaagcctttctggaataattagaataattttaggtgggacatggtataggaacaggataatcttcaagaaagctcttgcctggaagtgtcagaaaatggatgaaggcttggagaaaagaatgaatggagaggaggacaaaaagcattggatcagaagagagaagctgaccatactccaagggtggggacatgactgcatggaagaagcaaaactatttagcaatacaactgtagtgaccaaacattttcattttcttccaggggcagggaatgaaatacctctactaagtacataagggcagtgttgtaagatctcatcccatgatttatgtttgtgccaggtagcaattacctgtaggcatgagggaaagacaaaat

SEQ ID NO: 477338 - DNA, 594 bp, Homo sapiens
accccgtaacaagggagtggggcagagcagtgtactcaaacttgtttgtccacttactagaaggcgcactttttcctactgttatcattgtgaacggtgattgaacacctagcaaaaatggcaaagaaatgtaagagtccttgccctcaggcaatttatttcaggagacaaagtagatgaaaataaacagctgataattctcatgccatatacagatgacttcctggagtcaagagctgagtcctttcatcaaaaatgctcctgtatggagctcccactatgggcaaggcactgtgctaggtgttagaggagtgcaaagaatgagggggatggaaaaagcaaggatagctatgagaccaacactaatggtagaaagaagaccaatgtcaattgagtatgtgtcagacacaaggagaggcacttggcatactttcctcattaatcctcactgcattttattatttatgtctatttctcaggcaaggaaactgaagctcaggaagcttaagcaggttttccacagtcagacaacgatgattggtggaggccagataattacggagcatatgacatgtatagtgtgctaggcacatg

SEQ ID NO: 477339 - DNA, 592 bp, Homo sapiens
gccaggcacacttcgaggcacagaaaatgtagcaacgatgaagacagatggggtcctgcctcatggcaacaaatgataaaatagagtgtctggttgtgaaaagaactgtgaagtctaaccaagtagggaaagcccacagcactgtgcttcaagtgagcactggatacacggaagtgccggacatgcagaatccacggaggagaagccttggaagaggaggcccccggggatgccaagaagagagcaccctcagtgggggcaggcccctgtgtaggagcagccagcgcggaaagctggctgtgggcaattctccattccgtggaagaccacagtgccccctcaaggtgtacctggctgctgccccagagtcgctgccaggtcccgatggctcctccacaccttcaggaaaagcaagagataaaccattgcatgctgagctctgcagggaactggaggcggacaccatccattctgcaaacctgcaatggtgacacttctggaatctccttgcctcttccagggctgcagcctctaaggcaggactcttttcttcctctccccccacctccccccccactcccctcctccccct

SEQ ID NO: 477340 - DNA, 1447 bp, Homo sapiens
gaagtggaagcaggggctcaggcaccccctgtcccagaatgccctccacattagcacacacgtcctgttgtcccaacatgatgtcccagcagcacagacgttttgtaactgtcaagaacgtggcagagcatggaatccagaggcctgcgtgctgtgtgtgtcctcttctgctccttgccgttccctggctgacatgggacctgcgcaactccctggcctcgctgtctgccttccacactcatccatcaacacccagtctggatcagccccactcccacagtgtctctaagaggaataatgaaaaaccttgcaaactgatgccacctaaagccatggtttttaacctcattggggcctctgcaccccctggcaatcctctgggttgtccccacttctcttggcaactgttttcaatgttcataatctgcctcaagtcctcacctaccaaccctgcagacaatcttgctcccacagccctgacgcccaccaaagcttccagctgtgccctgctctgacgtcgttgtaccctctgcagatttaatctatgccacccgccttgccctccttcattccagaacagtccagctttaacttgaatattttctccattattttgatgtaaagagtaatgtgggaatcatcttttctcctaatgtatcttccgctgtcccagccctatatattgcaccacctgtcttttcccctctgatatgagatgccattttacgacacactaaattcccacataaatttgggtctatttctgagctcttcattctgttctgttgatctgaccaaatattcctacgtacttctctattttaattatgttttcatatatgatgaaactgatctcatctcatgggttttttttttttaaagaaaacttcctggatatttgtgcatatttatttttctgtataaacttaagaataagcttgtctggttgcaagaaaagagttatctaggtatttaagtgtaaagcataatttagaagaattaacaactttataatacttcggatcaacattttccaattcaagaatggagtttcttatttccatttcacaagttcttctattatgttcctcaataatgttttaaaattcttcacatgaaccttgcacgttcattgttattacaattggttttcaccttccattgtatttttaaacttcctattgttttatgtgggagtgctattaatttgccatattaatttcatatcagaaattgtatagaattcttactatttatattttttcccattgactatcttgggatttcaagttatgaaatcactcatttcatattactgatacaaaattacttcctgttttctaatttggtgcttcatttcctttttcctatttaactgctttatttaatacttcatgtaagtgctccttactctggtgggagtttcatcatatttttctatagtttt

SEQ ID NO: 477341 - DNA, 1038 bp, Homo sapiens
tgaagtgtgcatattaaaaatgtaaaagtaattgttaaaggaaaagaaatgcaatcctttcaaatcagcagaagaaatgcagaaagcttgatcaatccaacggaagaaggtacttgcttctcctttgcctaccctcatgattgtaagtttcctgaggcatcctcagcaatgtggaactgtgtggagacatcctactccctggacttcaagtcaagcttggttaagtccgtcaagatgcaaactgaaaccaactcaaaatatggtccagctgcagctcctgcttccttcacacctactcctttgcagcagtcctttgcagtaaatggcaccatcattgaattatcctggactccgctgtctctcacccccgtgccttgtaagttaccgcagtcctcctcagaaacatctgtgcagccctgtgacagtggaagctccctggtcaaggaagtggccgtgctagaaaggagcatctccaagctccgcactgggctgagtggcaaacggctgatttataagaagtggggaagcgatcctctgaggccagcaggagttgtctcttaccatccctcggagcattccaactgtttcggggctctctccactggtattctcagggacacctcaaactaaatcaaaatagaactgcttgtcttctttctcagatccatgcttttgccagtattttccactgtggccacccactttctcaaattgaaagtccgagggtctccttgtctcatccctctccctcactgtcacatctaacccaacactgagtgctccaaattcttcctccttgaatctgcccctccctccattccctccaccatgatttttgtccctggattatttgatcagcctttgaactattcaaattgtctcatttctcccctgctcccatccactctgcacactgcagccaatatgatctttaaaaaatgtatgaatctgtttcatgcctgtttaaaaccctccagttgctacctattgtcttaggatgagatcagaagttctcaacagtgcaaggctccccgggat

SEQ ID NO: 477342 - DNA, 566 bp, Homo sapiens
aagggctcaggcacaggctaatgggcagtaggtattctcattattatttttaatcagactatgcaattttatagctcccgtcacccaaggctattgcagggcaggtcaacctgtgctgagccccagggtcacctgacggagcccaccccagggaggcaggaaatgagctgcagcactcatagcggccccaggttccagtctctggctctctttcacagagagcatctgggctacatgagcttaggaaactgcgctcctgcagggcaccccagtggctggacgtttttggattttggaatatctgcatacacaaaaggagctatcttggggatgggacccaagtctaaatatgaaattcattttttttcatatacaccttatgcacatagcctgaagaatccacctctggtcctgaagctccttctggtactgggagacatcccaggatatgtttctaactgtgttgactcaacttgtcttttcaatatctagattcaagtcttctcttatttcaggaagttttttttcaattatattttaaatatctttttcagtctcattgtttc

SEQ ID NO: 477343 - DNA, 708 bp, Homo sapiens
cagctgaaggggcacagtcaactcagggtggatttcaggatggtccttgcatttttttcaggtgcctttttctggctctcctccatattaattctcccgaaggataactatttcagatagaataatgatctctttcagccacattccacacaaataccacagataccaaaaagtggaaaatcatctctttcctctttactccaagtctttgtttcatgcatttgagagtcaaatgctagaggccaaatgctgccctcgggctgcccagcagaagccttgctggcatgcatacccagtgctctggcctcttcctctaccccatacatcctggtcctatggcctagaactttcagggaaagaggatgaatctaaactgaaatctaaaagcaccaccaagaatatgatgactgtagaaagtggtgttgaccccatgtctgccccatggagcagcccccaaataagtgcttgtgttatgctgacgcaagccaaggaactaccagaagctagtagaaaggcctggagcagatccttccctggtgccttcagaggaagcatggccctgccaacatctggatctcaggcttttagcccccagaactgtgaggcaatataaatttatgtagtctaagtcactcagtttgtagtactttgttaggcagctgtatagcaaaagaacacaattccctttgatgaaaagaaaaggatgaa

SEQ ID NO: 477344 - DNA, 615 bp, Homo sapiens
aaggcatacactgctgggtttgcactgaagccatgcttctctggcactactcccagtcagctacattttgggctcctggggcccagaactctcaatccaaacagccctaccttcaggtccatccaattgtgccaccagttgagcaccccaggaccaaagggaggccaaagaatagccattttcaggggtgtggacacagcctggttctgcaggctgaagaaccacacacaggcatgcgaggccctttggcgagatgcagtggggtggagcctctcccttcccctggcatggggaaggctgcgctggaggaagcgggagtggcaggctttttctccctttctatgcccaatgccccaactcctccccagcatgccaagcctctggggttggtgcatggggcgggagtaggggaaagggcgccaggaaagttcttcatagactgatagtgtaaagaataaccctaatgatggcctgctgtttttttctagcaatgcacattggtattcatctttaagctctacctgtattaaatgtattctcattttagttgtataacagaaagagaaaattttaaagataattttcacttatgtgtaaaaatgattcctgaaatga

SEQ ID NO: 477345 - DNA, 744 bp, Homo sapiens
cagccagcaaagaactaaatcctgccaacaaccactgatgtcaccttttggcctcaaagggagctacgctgtgtttgtgagggatggtagtggtgatggtggtggtgatggtgacaatggtagcgatgatggtgattgtggtggtagaaggaatggtggtgatggtggtcatggttgttgtggtgatggtggtggtgatgatggtggtagtggtggtgatggtggtggtggtggtgatggtggtagtgatggtgatgattgtggtgaaggtggtggtggtggtggtgatggtggtagtgatggtgatgattgtggtgaaggtggtggtggtggtgatggtgataatggtagtgatggtggtgggggtagtggtggtggtgatggtggtggtgataatggtagtgatggtggtggtggcagtggtggtggtgatggtggtagtgattgtggtggttgtggtgaaggtggttgtggtgatggcgatggtaatggtggtagtggtggtgatggttgtggtagtggtagtgatggtagtagtgattgtggtggtgatggtggcaatggtggtggttgtggtgacagttgtggtgaaagtggtgctggtggtcactatgatggtcatggtgatggtggtggtggtttttgtgattgtagtagttgtgaaggtgatggtggttgtattagcccgttctcaagctgctgtaaggacatacctgagactggctaatttataacggaaagagg

SEQ ID NO: 477346 - DNA, 1490 bp, Homo sapiens
tgaagtcaaaggagattatttcggaggtctctggatgagcagggctgcgtccaggctgcagctgagaaggactgaaccagagtcacgagctgcttcgtgttctatggccagaacagagtttggtggacctgttacccaagacatgggcaggtatagcttctccaaggtcttttattggaggttgctggtggcagagcacggaaaattaaggctacatctgagttcacatggggacagaactgtttttgtgtctgcagccaaggccatcatcagcaagtctgccatttggacacaggcctaccttctcaaatcgaccttcctcattcttggactcacctgggttttgcaccctcctacctggatcccaaagctcccacaaggcactttgatttggtggctgactgtcaaattattatttactggaagttcttgcagagcaattaggcagaagaaagacatagagtgcatccaacttgggaagaaggaagtcatattgcccctctggagacatcattttttatctatcgaaaaacctagatcccacaaaatatgcttagaactgatgaatacattcagtaaagtcatagcgtacaaaatcaacacataaaagttagcatttcttttgaccaataacaggatttacctgaaaaaggtatcaataaagcaatcccatttacaacagtcacacaaaataattgctaggaatacatttaattaaagaggtgaaatatctctacaatgaaaatcataaagttctgattaaaaaaatgaagagaacacaaaaaattgaaatatattcctggttcatagattggaaaaataattattgtaaaacgactatactaccaaaagcaatctacagattcaatgtaatccctatcaaaacaccaatgatgttcttcacaaaaataaaaaaaagtctgaaatttcatgttatttcaaatgacctgtattgaaattcagaaatcttctcttcttcttgctcctgtttattgtttacaatcttgatgacgtatttctgtttcaatcattaaatccttcagttctggggtttctatttggttctttttttagagtatctatctctattaaatttctctttgattataaattgttttcatgatttatctgtattttttatttgtgtgctcttgcatctcactgattttccttaatgtcttcattttgaattatttttcaggcatttcacagattttcttttatttggagtctgttactgaagaattattttattcctttggaggtgtcatgtttccttgctttctcatgtttcttatgttttcatttacatccatacatttcttaagcatatgagagttctagttgctgaatatccttgccactgctttgttattttcttttttaactttttttttttttgtcattttagcctttctggtgggtgtttcatggtatttcattgtggatttagagcaccttttcatttgttatatttcaatattatattc

SEQ ID NO: 477347 - DNA, 720 bp, Homo sapiens
tttttaaattatggctattcttgtaggagtaagtttgtatcacactgtggtttcaatttgcatttccttgataattagtgatgttgagcatttttttcatgtgtttgttggccatttgtatatgtcctttagagaattgtttattcatgtccttggcccacttactgatgtgattatttcctttttgcttgctgatttgtttgagttccttgtagattctggatattcatcttttgtcagatgcatagtttgcgaagattttttcttactctgtgagttgtctgtttactctgctgattatttcttttgctgtgcagaaagcttaattaactccaatctatttatctttgtttttgttgcatttgcttttgggtgcctggtcataaactctttgcctaaaacatgtctacagggatttttccaatgttagcttctataatgtttattgtttcaggtcttagatttaagtttttgacccatcttgagttgatttttgtatgaggcaagaaacaaagatccagcttcattcttctgcatgtggcttgccaattaattcagcaccatttgttgaataggctgtccttttcccactttatgcttttatttgctttgttgaatatcagttggctataaatatttggctttatttctgggttctctattctgttccattggtctacatgcctgtttttaataccagtaccatgctgttttggtttc

SEQ ID NO: 477348 - DNA, 1118 bp, Homo sapiens
ttgaagactattataagtgaagcaatttagaaaaccaagcagcatggacagagcagcgtgtggagactcccatcgtgaatttttgctccaagaactattgcagaaacataccacaaaaaccaagagaatccatagaccgtttgaaggaaagaggtggattgcccctgcaggctctgtgggacagctggagaactgcgagtcagcttgctttctcatctgggaggcttatagcctggggcaagttctcagcgcagctcacaggctgcctagaaatacgctcagtgttttgcggggcacagtgggagtgagacaggccttttggcctgtgggctgcatgggagggcccagcacaccacctgatcctccctatactaccacagctgatgcactcttgaaagcaccacctcttggctggagaccagccaacacaaaactagtacatttgacaaaaatacaaccaaggaccctcagaaagtcccacttcactcccctgctacttccactggggcaggtgctggtatccatggctgagagacctgaagatgaatcacatcacaagactgtttgtaaacattccccagtacaagtccagagctcagtatctcttctgggtggctaatccagaagagaaataataatcactgcagtttggctttcagaaagccccatccctagggaaaaggggagagcactacatcaagggagtaccctattggacaaaataatctggacagcagcctttgattcccagatcttccctctgacgtagtcttcctaagtgaaaaggaaccagaaaaacaattcttggtaatatggcaacacaaggttctttatcacccccaaaatattacactaggtcacaagcaatggatccaaaccaagacaaaatctctgaattgccagaaaaagaattcaaaaggccaacaattaagccaatctaggcttttgaattaacccaatgcaacaaagacaaagaaaataattttttaaaaaaagaaaaaggaacaaagcctccaagaagtttgagattatgtttaatgacaaaacataataataattggtgtacccatggaagaagataaatctaaaatttggaaaacttatttgagggaataatc

SEQ ID NO: 477349 - DNA, 713 bp, Homo sapiens
cgggtgtcgggctgggggacggtcaggtctttcccttcccacgaggccatatttcagactatcacatggggagaaaccttggacaatacctggctttcctaggcagaggtccctgcggccttccgcaagcctttgttaccttcccgacgactaatttacatgtaatgaaattctactatttgccccttgtcctctgtgtctgtctatatttagcatcagatgaagtcagacttcagacaatgccaaaatcatacaatgaaagtcgagagtgtcaagtacttaatagattctgcatacacactggaacagtttcactgggagaattatacatctcaacaccactgacatcaggtttggccatagaactgctttggcaaatgtgctgtgagcagagaagggaagtgcaggacaaccagccggcccaaaatataagaagaaatcacctgcaggaaggagctgaatatgatcacttaattgagaagacacagtcaagcatggataagaatttagctataaaagttaacacattagtggaagtttattgtgaactggtaaaagaaaataaaagacctagaagccacagatatagcagcctttcacagtttactaggccttcctatacagattccaccaggagctaagaagaaaatgtagcaagatttaagaaaccatgacataagcttggtagagggagacagtggccatgaggatat

SEQ ID NO: 477350 - DNA, 1660 bp, Homo sapiens
ttaagattcttccttgcttcttctggccatgagggcagaaaagaaagcggaattcatctccactatagacaattgcaaaactgaactgaagaaggcaggctgtcccaacaagtgttcagctcagcagagtggagacactggagtgagtctggctgagtccagggttttcataggcctcagaaagcaggaagtgtgctccaactggaccatgggcagccatgggcaggcccagaaaaagcaccacaagttcccactgcagtctgcaggactggcagcctacaggactggcaactggcagccccgcccccaggcttcaggccctccctggctcgaaggtggggttttactggggaccaacccccttccatccaggaccctgtctgccattcatggcacccaggctgccattcatggtgcccaggccgttcatgccaagtggcatatgcaggccagcgctgagctgccctcagcaccccctcaggctccctcccatgctcatcggtgcccaaagtccggagggggccaaggcggcagggggcccccgagagtgcctggatcggaggacgctgcttgggcagctgcagctatgcgtgggagggcagggctcctgcctgctcctggcccccaagagcacggggaggcctgggtctgcagccatgacttggtggctgcagctgtgcccagagagcacaaagctgccaccctgctgattcagaagggggcagggcttccacctgttcctggctcccgctggctttgattggtcctggattgatttttttaaaagtatggacatgaagatattatgattccaaatgacaggaaaaaaacttgaagatagtattccgcattgcaatttcttaacatttctgcagcatttccataaaatggtatctttcatatggaagcacatatttaaaattagaatttatttaatacaatgaacaagaacaatatcacttcaattcaattcacaaatggcctttattgcaacagccatggatcaagtacatattttcactctttaagcagaaggttgaatatgtgcattatgataatctgactacgtcactattggaagaggattatcatagttgttcaaacactatttttcctgttctttcaaatgaataaaactacatttttttcttgtagtacagtataactatcaggtataaatgaaaaagtcaatgcaatttaatttttaattatatttttgctgttttaatgtttaggcaaccacggatatgccaattcaaattttttagttaggtatagatataattggaaaataacttagagtttttttatatcattttatctgtaatcagataacagaattgaaaggaaatagctctcacaaataacaagtacattttcatatgtatttgcatagatatacacagtatgaaagcaagtaaataaacagagtgtagaggtttcagaggtatacatggtaaaaaaaaaaaatttgctccataatgtactaccctttctgccattaaacaacaattagtgatgttatttaagcggaatttaaattatctaaaaaaaatatttacttttctaggttttggcacatagaaacaaaaaattttctcttgaccccaaagttacttgtttcatttttataaagggtcattctagaaataaaattcac

SEQ ID NO: 477351 - DNA, 2011 bp, Homo sapiens
aggagaagatccagcatggtcatgcttacacaagtaaacatttgtgaattctccaagatttatcagttgagttcctcatttggctgttcctggccaggggaagaccactttctcactccatctcctttacagctccccatcccactgacagcaacttcccaccactcaataaaatactccacattcaccaccctttcaattcgttcacacgacctgattcttcctggatgccggacaaggacaggtgcaagaagtggtcacactgaccctccgctgagctgtgtaacacttaagccttccatggatggcaaagctaagagatcatactgcaatacaagccctctggggcttcaggggtcacaggcaacccctagacaccactgcgggcccacaaggagttctgttcatgctggttgcccagaagcgctcatcctggaccctgcacccactcccctgcatactctccatgccatgagggtctgagcactgcactacaggctgagtaaatgagccaacccttttgcgagtcccatgaaagggtaaaggaaatgatcctatttcagtattagactcttttctcttgctgattggaattctggaagtaaggagtttgggggaataataaacacaaacaagagcacaaacaataggagtaaatcttatgtatcatatctagcatgctcaactacattatctagaccattttctggaagaatgaaaaccctccctttttccacagacttgtattctattgggaaactatagacaataaacttaaaaacaaacatataaatattatactatgtaaagatgaacactataagcaaaatacagaaaaataagagatgagacagagataggttaggggtagagatatactgtattagttaaaggagtgaatgataagaagtgggaatataacttaatttttttttgctaatactaattttctccaaattactttttaagtagtccacacttccccacatattttaaatgccaaattcccatatgctcatgaatctgaggtatattcattttcaaacttggaatgaggagtaggaaggcattgaagatgaagagtagcactaaattttctggacaatgtcattattttagaccttgcagcattaacaaaactctttgcaaagtaaggtcttaatgtgtacttatgaggcttataagcactgaaaaaaaacagatgctttatattccttgaataagaggcaatttgaccattacagaaaaataattatctgcaatttactttgtaattacaaaacaagacattcccaatatcttctcttagtattttttgtattaaattttattagcatgtggaagttattttgattattttgcataaaatcattgctagtaattactctcttcagctctttcttccacagaaaaaggaatgacattctgttacacacaatactattggctcacttgattcagtagtaaacactatcgttatataaaaatagagttgaatattattataatgtatttctgaaaagaaacaagtttaaaacttaagttttaagggaaaatgacatttttggaaacaatatggtcttaaaaaaaaaggtatctcccttggttgacaatgtaaattttgtaactaatcatatgccttctttgctttggccacaaaaaactactgaaccaaatgtgtagcccacttctaaaaactgtattttactcacctctgtatattggcttaactcacactattatttcccatggtaatatattcctgtgttataatcttttgataaatttaatatattaaattataagaaaactgcctcaaattttctgtagaatgaatctgagtaaagtcatatttatgagatataaaagcagctcaaaaacacaagcagcacaataatgtaaataactgtagaaacagcagcaaagagcattagtgttttatctaatgaactactcagtcaggtatcattttttggtgcttacattgaaatcaaaatgattttatgtcact

SEQ ID NO: 477352 - DNA, 2657 bp, Homo sapiens
tcatcagttaaggcaggaacaggccattttcacttcttttgtggtggaatgtcatcagttaaggcaggaaccggccatctggatgtgtacgtgcaggtcacaggggatatgatggcttagcttgggctcagaggcctggcagggctgcttcaagcgggatgaggggcggcgtgggaacctagagtgggagagatttagctgaagggaggtcttgtgagttacccgaagctcggcatccgtgatggtctagggggcttccgaggcgatcgggaagcatcagtcttcagctgctaagccgagaagatctgggaaggagtcagtcagagagccttgggccagagtttcaagggctctgggagtggctgccaggtgagttgaacagtctgattttcagtggggtcccacacagatgggacacggcttaggaggaatcctgggccgcgggcattccttggcccagtggaccaaggcaggcgtccctgcgtggtctgacacctttgaaacgtgggtgaataatcagagaggcgtccctgcagtgattaaacaccaagggaaggctgccttcccagtccgtgaccggcgctggagttttggggccacggataaaacaaatgaagacccaaagaaacaggaaaaattgtatcttatgctcagttttgatgaaatgtggacagtcatgtccacatatgatgaacaaaaggagaaatattctaaggggtatagaaaatggaataatggcctaaagaaagtaatgctttttacagaaaacattttaaaagtatacaaaataataactggctgcacattgatggaaatgaaatacatgggaaaaaatgatatgggagagagaaaggggaaatgttggattgaccctcctgaccttgagggaatgaggaaatgggatctgggacagtagaaaacacggttttacatagaaatcagggtatttcctctatgttatctgtgtagttcacactgcaaatctttcacactcaaatgtatctaaatcattcttgtaattaaaacttcagtgtatatcattctccaagtaaatggttttcttgaatttaatatctgttctaaaatatactgtttccaatttgtagtcttaaattagcatcttccatgttttatgatcctgtctcttaattcttatattttatatgtttcctttacatttctacagagctctctttcagactcaatcttttcaacctgtcctcattgagcagtcatttcctttgcattgatctatgctttacgtaactttagtttaccctccctatatactttgcagctccaagctatctactttgactgatgagatccgaacagaattccaggtggagctgcatcttggtattttaaaaagttaaaaataaaatataaaataaaaatatattttttattttttcatttatgtaaaaagttatgtactttttacatgttttattatgtaaaaacatatgtaataactgttttttattacgtaaaaagttaaaatataaaataaaaaaattttatattataaaatataaaaataatataaaagcattttgtttattttcataaaactttttaagggtgttcaacattttgtggacctactttttcttttagcatacagtagcacattgaattagatgtgttcaacctaactcaatgtgttattatattggcttatattatgttcatcttcaccctctttatttggccaaaaaatatttatagatcactgctcaataaacacgccaccatgatgtagggcagtgtttttaaaacctgactatcatctggcaatgtatgaagagagtgttcttgaaacttccctctcttttctcaaatccagacagttggcagcctctccatttccattttacaggtcagctactaccccccgtcattgactgccccatgtttacacttcacattgtttaagatttatcctctaaaacactaattatactattcaaaatgtttacaattttcaaggactcatcaataataaaatcagacaacgacagcagcaatgtacttgacattaagaacttcaacttctgattcctatagattccattttgagagtctcccatcttacagaactttttctagactctatatactttgtgtctctgcttttactgcctgttcaccttctttttcctgtgtaaagaatgacacccctctttccattggagattaggtttcaaaatacgaattctggagggacataaagattcagttgatagcaatgcccaagccccatttttttctcttcgcaatactaccatttccatgaagctatttattccttttctacattattaactacaaccacttctatttccccttagcactttgtatatatcacaattgtagcgttagacatactgtataattcatttatttattttactaactgtgagtttgttgaggttaagaatttaagctctatttgtatgttctttgtctaccacagtgccaaggagatagcagcatgctcaataaacattgattgaataaattcataccatgtatttcttggatctaaaactatctctggaaaaaggaaattaattaattactccttactttttaaattaaactttgtgctaaaaatcttctatttattttaattgtagaaagcagagctatgt

SEQ ID NO: 477353 - DNA, 624 bp, Homo sapiens
tgctgacatctgttctgcttctgaggaggcctcagtaagcttacaattatcatggaagacaaagggaaaacaggaacttcacttggaaaaagcaggagcaagaacttttaccaaattatttactccatcacaaccatcatcattatcatcaccaccatcatcatattcttaatatgcaaacctttaaatctggaattattatctccactttccataagaggagacagagctccagagaattacatatgctggtggaatggacagaatccaaatgtaagcctgactccagtgttggctggtctgagaaataaaaagaaagcgtacaaagagagaaattttacagctgggcctccgggggtgtcatcacatattggtaggaccgtgatggtgacttcaagccgcaaaaccagcaagtttttattagggattttaaaagaagagggggtgtacgaacagggaggccctgaatattgcaaatctgatgtacttcatactacagaccccttggaatctaagtggatgagtataactaaaatctcagcttccaaaagctaagactgaataagaggctagtgatgtgccctagtaggtcatcctctgccatttcatctcttaatgcacatg

SEQ ID NO: 477354 - DNA, 3103 bp, Homo sapiens
gaataggtcttttccttcaaggtgacttattttgtcacatatctggcacctcaaagatctttggtctctctctctctctctctctctctctctctctcacctcacctcaaagatctttggtctctctctctctctctctctctctctctctgtgcgtgtgtgtgtctttcttaagttcaaaatcaagatgccaacagggctggtgcctggcctgctcagccaactgagagggcttggattcaacaacactttgctagcgaagtcaaagaacagcaatccctacgagccgggaagcaaaaaagttgaacaccatgcttctctttacttagagcctggacagtttccaaatgatggcacagaaagaagaaaccaggaagaacctaatggaatctttcaggccaaaccccttgttcatttaaataatgacagtaagctggtgaattcaaataacgctaccaatacaataaagggtacaagtcacattggattagtatccagtgtgattatacgtgcaaagaacctatttccaaataattcaaaacattcacagataacagggatgatgacaagtgaattgacagttagaaataactttctgataacaatcataactggcttttaccatttagtacagaaggcttgactatggttaaaaggtttaatttttatgtttcaatgatcttgcatatttcatactactattactatttgtattttatcctttcttcatatgataaacgaagtcatattttgtatattttaactgattacacacacacatattcatttttgtatattaatgctgtaactagttatataaatgtcttttttttagagttctataaggtttctgattttggagttgattattttaggtttccaagtataaatatcacttctgtaaatattgctgatttcattttcttctttccattttattaaaattaatttatacctcttttgtaatttcattgtctagaattttttttaagtatatcatagtggtgattgtccacatttgattcatcctcagctcctataggaaaatttctagttttttcacattcaacacaatgcaagcttttaggttcatattaagatagtgtccatttaatcttgttttaataaaaatgtttcacaaacataagaattaagtataatagtatatttttaatatctaaaaggtgattataccttttattcttcttctgaaagaagacccccatttatgatatcataacattattttactgtagtacaaaattttgtcttaattttattctaagattttaagttgataaagtgggactgattctttccttaaatggcagcctttgtaaattttgttatcacttatttgtttccttattaagttaagaaaataaacatttttatatgctgtggaaaaatctaaatagtattgaaattatctgatatttgaaaatttggtaagattttccactgaatccatttgaacatggtcatttttttaaaagctggagcttgttcattgaaaacttatttgattttctggttagttgatctgttcaaatttttctgtctcctctggaattactttggataaattgcatactcttaaaatattattttcattcatatttttagtttatacaaagcatagaatgttagactcataacctttacttttttatcagtcctttcttccctttaacattcattcattttgtgtattttcctgtaagtgtaattttaaattttattttataatattctttttcaaagaagcagtttttggacaacttgtgaattgaactgcttaaattaattgacctcaatgattttatcttcattaactttttctgcttcaactttatagatttgttccctaaatattttaaatataatccttattaacttaatgtattaatttgtattcttttatctatagttacatacctatatgtatttacacatacgtacatatacatatataaaatatgtctcatatgtatatcactgctttaattagattgcgtatgttttgttatatgtttgcattatcactttgtagatattctgaaattaatttttagatttaatttttgcctcaaaaggctttgagagagataatttctcttcccttacatttccagatgagaggaactgttgcattttctggttttaaaatcaagttatacttttaattctttgacattttcactggcatttaatagttgattttggtcaatattccatgggttcctgaaaagaaattgtacgtgttttacatgttatctgttttattaactatgtgtttgcaatttaaaatcttattccttattctttcatgaaatgggagagctaaattatccaataaaatatatttctatctttcctaattttctgtgatttttaattatgaaattaatattgttacctgttatatctttaatatgaattatatccaatactggcacttatttcatacttaatcatgtttcccaaacttgtcacttttctagaagatcatacctcattcctttatttttcatatttctatgttattttgttttacctgtatctctctgagtttgttttgatttataatgcaacctaaaaataagcattttttgctcaatgggtgagtttatctaatgtatgtaaattaaggtaactgatgtacttgatattagctttgttccactatgttaagattttaaataacactcattatatccatatttctgtcaatattggttttcttgtcattttttactcaatacaattccctaaaactctaattcttctaataatttctatttttttgcatatgatcaatgatgaaattaatgtggctcttcttcctctctctgccatgactttaattgtaacttattacacttataaaattttttaattttcttattacttattaaatttatttgtgtttactttggtgctattcaatatcttaattttgtgacttaatttgccttccaaatattatataatttaaaatccattaagtaaatatgcataattcccttacctttagtacttcctcttttctgctgctctatccatggacatatattgtcagtgctcatattataaacgaaac

SEQ ID NO: 477355 - DNA, 677 bp, Homo sapiens
aaattgtatatgtctcagttcacacaaaacatagacctacctctgcattcagcttttgatatcattatatttatgaaatatttcttgtttcttcaggaaattatatgtggaggatctctgtggcccaggatgagggtcccacagaagatttttaggtacttatggctcttaaatctactctgtgatttgatttgggcttgtaaatgttcagaggcccagtttatatttctaacttctctggggttctaccaatcctctactcttctcacagccaaagcaattatctttactcttgcctggttgaggaagaacttattctccctgctgtcagaagcccaagccaagatagaggtcccacagaggaatatcaaaatgtcctggttcagagctccatgcaagctcccagacaacaatgccaaagatcagccatgtgagaaaatcatcttggatattgtaggcaaattgaacatccacatgacttcagtcacagctggtacaacatgaagcagcagaaccacctagctgggcctagtcagctcacagaaccatgaaaaataataggtttttttgttcttgttgtttttggtaggtaaggtttgttacatatcaataaactttgaacaatgtctgtcccatggaagtgggcactcaccagacatgagatctgtgcacagttt

SEQ ID NO: 477356 - DNA, 524 bp, Homo sapiens
gtcctacaaattctgaaattccttcattctctctacaaagtctctagagcacgcagtcttaagattttggtaaaatgttgttgatctattactactactgcctctggagaaaatgtctagaacaagatgctaaaataaaaatgatacccagtgaaagacctgtcactatatgttacaaaaggccccgagtgaagccgcagaccttcacagtgagtgttacagctcttaaaggtggcgtgtacggagttgtttgttcctcccggtgggttcatggtctcactgacttcaggactgaagctacagaccttcgcatgtggaaggggacccaagcagtttgccactgctggctcgggtggccagcttttattcccttatttggccccacccacatcctgctgattggtctattttacagagacctgatttgtccattttacagagagctgattggtccattttacaatcctttagctagacacagagtgctgattgaatgaaagaaaatgtttgaaaaactgtacctt

SEQ ID NO: 477357 - DNA, 2579 bp, Homo sapiens
cagggaaccacatcaatggttgtagtatgaggttcaagcattctcgagtgggctacttcagccctggcagatggcaggctgctggcaacactgctaagaaccacaatgaagtacatcatgatgaagaaggtgatgtagctggagaggctgctgctgctgaccatgatgaagatgatgatgatgatgaagatgatgattatgataatgtgaggattcatctgattctaaaaatccagatgactctgaaaatgacttattcaggaaaagaagaatctgttgcaggactccaagctgctgagcaccccgaggaaacagaggattctcaaaacaaaaaaggaacaagaatacttggacacaattcaaagaacaccatcagatacctgaggtctagcttctggtcccaaatctgtcattcagaagtgtgtaacttgacaatttgttgaatctcactggattttatttctgtcaagagtaaaattaaccagataagaattatgctgagacatagcagtacctcaaaaagtggtggaggtaataagctgcaaagttggaacttgaatcccggacctcaagctccaaatccagaattcctcactttccccccgctacctgatacagaactggagaaaaataaatttgatttaattaagtgtagcagatcccaggaactattttatgtttaatgattactttcaagcttaatttgcctctatttaagtgtaactaacacataatctttaggataaacatctcggaattctttctgaattatccccaaattttaagtttaggtgtgcatttgacaatctgcattgctgccaacagtagttggaagattactacctgaaagctgaggaagtttgcttcagctactacatgcccttccttgtggtaaatgtgcaagtcacggcacaataattgaggaaataaatgttggtgccttaaaataaatgttgatattcaaatttgtcctattttaccctggtaaatgtgtaagtcatggcacaatacttgaggaacttgagcagataagtttggagtaaataacctgtgttataaaatgcacaacactcaaaataaaatgaaacactacaactatgtactttaacttatgattcatagattttgtaggccaattctttgctattggaaaacacaaaacttttccaactttgaagactggaaacaaaacacaaactgcaagaaaacattaagttcatctatatttgttctgtaggaggactccttcctgtagtttgcagacagtcatgaatccccttaggtcaacagctgtcaacttcaattctcattttatccactccttccagtccaaagactttagaccaatatttttaggaaaataaaagatattttcatttaagtagcaaaatcaccaaaactacctaccagagaaaaaccaaatactctcagaatcgttgctgaggcaggttcagaaggattgttctgagaactactttgcaagtggaaaaaatgaagcctaagagacttacattaaatagggggttaaataattatatagtacagatgatataggaaaggcagaataagtgcttgatactttctcatttgtttacaagcattcacaagtttgctccttagccttctccaaattatgaacaaattatttttgttgccattttaaagtcttatatgtaaacatatttgatatgtttgcaatctattgcagatattatcccagatagatgcccatttttagctaatggaaagcctctacatgttggcactaaagttcttgtaacatgacatgctgcagtttagtttcagcagtttaaggacttcatttaaatgaaatcacaaagtatgcaatcttttgtgtctgaatgtttccactcaccacaatgtctgtgaaatccctcctatttgttgagtatatcagtagttattattgtagagatgtaccctactgtatgaatgtaaagcaattaatacattcaatcacttgttaatggtcactttgatggttccagtttgagactacactgtgttataaataatcctgcttctaggaacatatatgttcatttctcttgagcaaataactaggaattgctaggtcacatgataacagtatttttaacttgacaagtgttactaaacttttttctaaagtgtttttataccaccaacagcaatatataaggtatttcagttcctctggctcctcacctgcacatgcactgtcaatttttttagttatatctattccagagaatatgaaacgttaactcgttgtgattttaatttacatttctttgataactaatgatattgagcattatttaatgtaatttttagacattcctgtaacttttttgtaaaatgcatattctaatcttgcaccattttatttgggtgtttatctctttattgaattgcaaattatttatataggtggtctcctacttatgatgatttgacttagattttttcacttaatttatttatcagaatatcaaatacattttaaattatgatatttttgacttactggtttgtcaggatgtaatcccatcataagtcaaggagtatatgtaccc

SEQ ID NO: 477358 - DNA, 878 bp, Homo sapiens
tgacactgagtgcattttcctgtggatgggtaatggggagctgggctcagaagcaggcacattcaggggacaaccactctgccccagctgtctggaacatgaatgtgataaaaaaggaacacttttacactgctggtggaaatgtaaattagtacatccactgtgcaaaacagtagggagatccctcaaagaactaaaagtagagctaccattccccaaagtagaactactggcaatcccattactgggtatctacccaaaggaaaagaagtcattatatgaagaagacaaatgtacatgcatgtttatggcagcacaatttacaatagcaaaaatatggacccagtctgaatgcccatcaatcaaagagtggataaagaaaatggggtatatatacaccatagaatactactcagccgtaaaacagaatggtaatagtggcttttgcagtaacttggatggagttgggggtcattattttaagtgaagtaactcaggaattgaaaaccaaatattgtatgttttcacttataagtgggaactaagctatgaggatgcaaaagcataaaaataatataatggactttggggatttgtggggaagggaaggaggggaatgagagataaaagactatatatggggtctgtatattgggtacagtgtatactgcttgtgtgatgggtgcaccaaaatctcagaaatcaccactaaagaacttatccatgtaacctaaaaccacctgttccccaaaagctattgaaataaaaaaatttttaaaagattattttttaatgttataataagacaggattgaaaatcaaatctattcctatttttcatcttttaaaatagatgaatacattgagaaatgttttct

SEQ ID NO: 477359 - DNA, 565 bp, Homo sapiens
ctgaaggggcaaacaaaagataactggcaacatcagtaggctcgtaccgaggaatgtctgcaaagagtcctgtgacgtgatctgtcttcagcagtgaatacaacacctgctccggtggatgtagcaggggagtgaaatggactctgtgaggaaaatgtcccaaggatacagagcaaatgcagaaacatttattcaagaaaatctactaaaactcagcataaacaatgagactgtagcacttgaagccatgatccactgtcaccatatccccagccccaagccaaaacagcttagcagaagttccactctggatggatatggcccagaagatgagctccctctcctcctcagctcccgaacaagtgttaccatatctcatctgaagcagcagcctaccagcatttcttatccccttcgactcaaatgtgaagtgactaaattctggaaggctgagaatactaagaccctgaattccttcaccccgcttgctgaaaggcagagattccatgctgtgagaagcaaaccaagaagaccagaggctactgctccacccagcacctagaat

SEQ ID NO: 477360 - DNA, 693 bp, Homo sapiens
gctattacccattgaagaaaagaaagaaaaatttaagaaagcaatgaccatcggagatgtttcattggtccaggagctcctagattctggcattagtgtagattccaactttcagtatggatggactccccttatgtatgctgctagtgttgccaatgcagagctggttcgggtccttttggacagaggtgctaatgcaagctttgagaaggataagcaaagtattttgataactgcatgttctgctcatggctcagaggaacagatcttgaagtgtgtagaactactactttcaagaaatgctgatccaaatgttgcttgtaggaataaatcatcctgggacactaagtcctgggaccccatggagagctctagtgggaaggaggaagaggactgggatgagtccatagaggttcccatactgtctgcatgtacattggccaccaccaaggatctgtataagaataaggagttagcaatatgaaggtctggggacaggcaagagcacttgcacagttcctgcaaaggggagatcttggcattttcaaagacaataaactttactgacccaatattatagtattgtaattattactttacgtaatttcacgttactaaagaagttgagaacagaaatatgagcaaatttatatttagagtttgttatatttacactcatatttgccatttctg

SEQ ID NO: 477361 - DNA, 1779 bp, Homo sapiens
aactgggaactgtatctgttcattcaattgctgaaataatgtacaaatataagatttgactgcaagatgattatcatagaaggagttggccacctcaccacagatctccaagaaggagaagcttctctcacagctggagcaggttcctttctagaaacagaagaagagagagaccactgtcttgggagagaaatcacaagctgtcctgatccttctctaggtctcatagcagatctacgtcaaatgaaaggaaatacaagaccagtttgcaagagaagaggtgtacaggaaactacttcatttgacaggactagaatacagtatgcagctaagttgcacaagcaggctttaaaagctgctgtgaaacacaagccatcaggtaaaaagaaacgctgcagtattaagttagaggtttttaaaaaatccaacggaagtccaaaatcaagatgctggcacatatggttcctggctctctaagctagtctcccttttaaaaggtttagtctggttgtaagtacttaattgctgacaaggtactgagataatatatgctatctgccctccaaaaatatataactggaatataaatttgattcttatattgcttcagacctagccttaacatctaaagatttttcatattctcctcacatctttgaattcaatttttcaaaaatttaattaaatcaggcttaaaaagaaacagtaggatctccaatttggttgatattttatttttctgcttctacaataaaaaatgtttttacctaccatgaattataatattaactaggttgtgatttggaaatcctttttaatctttattaaatctttcatgaataacatacatatgaagagattttagttggagatagtcattcaatttgatttaaattagaagcagattccactatttgtgattaagtgtttttgcaattactaatagaatgcatcaggtaatatagcctctggtaaccactattctactttctacttctaagggatctatttatttagattacacatatgagtaagatcatatggtctttgtctttctgtgcctgttctatttcacttaacataatgctccccagcttcattgatgttgaggcaaacaacaggatttcattttttcttatggctgcatattattttaatttaggtgttgaaaatatctatcatagcttgtggcttgtctttttattccctttctttggtgtcctttgatgaactaagttcttaattatgagtcagtcaaatttgtcaatcttcttcctatagatttttacttttttcatcttacttaagaaatatttccctacctgaaggttataaaattatttttaaatggtcttctaaaagtttttaccatattcttatgtgcatttaggtttttaatccaccctgatttttatgtatagtacgagcaaagacctacagtgtaatgttcaacaagtggggtgatacagtcctgataattgtattcaaggtcttgaagacttgggaaaagtagattagaaatgcagagactgcctttgatcctgaagtaccaatcaaggaaaggtgctagctttacttcaagcataagaaagcctgatttttgttgaaagtaatgttcagaatatgattttttataagatgatgtttttctttagaatctctgatgataattgtgctacaataaactgtttttaagttgggacaatatatatctcttttgtaaaaatttaatataatatgtaagcaacagaaaatagttttattaaacagtggcaaata

SEQ ID NO: 477362 - DNA, 567 bp, Homo sapiens
gccctggatgtgagaaatggagtcaaaggagccaacttggcaaatttaatctcacatacaagtttcaatgaagtttcatgtctggactgatataaatgcattggaagtacagcatatgttgtggacccaggccccacagatgcatcatcgaacttacattattcagtggtcaagaaaatgtttcttcaacatcaattacctacgaatatgtaaaacaatggccagcaatggccagttaaatccttctcatgatgctatccctctggttctggcacttctgcttccctcttccttgtttaagggcccttgcagttacattgggcccacagctggagttcctctgccttcacatgctgacaccgtggccaactccttcatggttgattcctccaaatgtaaagaatacaggagatcctggaacacactaggaaatggggagtactcacaaatttataactccaagtctatagtcccctaaacttttcagacatatataggattttttgatacaatcgaacctgatctcatcatcttcttcccctacatcaagtgtagtggagagactct

SEQ ID NO: 477363 - DNA, 1358 bp, Homo sapiens
tctttaatcataagaactatttgtggccgttccctgcagcagaatataaagagccacccgaaaatttcattatgatactttctgtactagaaaaagtggattcactaatctgtgttccactatctgacttattgatttttcgctatcttaaagacccatatgaacatgcccagaggcaagaattcgattttctattcatctactgggtgtttgcaggaggagagatatttactttctttggtcctgagttagaatcagggctaataataatgatgaagaagaagaagaaagaagaagaaggagaaggagaaggggaaggagaagaaaggggaggaggaagaggaggaggaggaggagaggatgaagtgacggaggaacctggtagttattggtcaagccctaattgttctgggccaattgctgcagagttttggtttggcttcctgggctggctactgccaaattctgttgtcatatatgtaaattctgggaaccaaatagagtaaattaagagtttagattaattttaacatactagtacaagatttggggaaaatgtagtgatttctttagcaatggtcaaaatacaatgatgaggaaaattgcaggattagtagatattataaagggttttgctaaattatgttcaaataattgttatgtgaaggaacacaaattgattaaaacattgcagtatattttaagacaaatgaatataattctctatatatttgtggctatgtcgggcttaaggccatttttttgcagatatttcagaattattgtttacttgcaatgaattcaagaatttatttttttcataggaaagttaagaggttcaacttgcagaagcagggtgctggtgtttttcaaaataaataaattatttttttatttaaacatttcaatagcaaaatatttcttaaatatatcatagctgcgacaactagaataagctacagatgtttttaataagttgaataaatttgattttcaaaacagaatcacaataccaccttgcttaaagccaaaatatataaattgaaagtgaatttatcatgtaaagtgaaatgtaagtgccttttttgaaacttggagtacataattgatacatatattgaagtgtctgtgactttttaaaatgtctcatttggtaataggaaaactgatacataactcttgcctgataaatcccagacaccaaaaggagaaaagataaataagaattgtgaacgtcaaagaaatgcaattatgtgcaccccgacatgcaaacaaaacatcagctacttctatttcatctagaaaactttaaacatttatatcttctcatttttgatgtttatgaatttatcatcatt

SEQ ID NO: 477364 - DNA, 786 bp, Homo sapiens
tttgtcacaaatcctaggcttctgctgttccttgctgcctatgtggcaaatgcagccacccaagctgtggctgcagacctgggcatccctaagctctcgggggccagaagcaggcaacggccccaccctcctgggcacagctgcagctgcccaagctgcagctgcagacctaggcatctctgcactctcagggacccaggaagggtcccccctgtctccagtacccttcagcataaagagcctgggcactacgaacagtggcaagaggcagacaggctcctgggcagaaaggggcaggtccccagtgaagccccaccttcaagctggggaaggcctgaagcctgggaaccaagctgccagtcccatggaccagagtgggtacttacagtgctttttctgggcctgcccatggccacccatggacccatcggcatgcactttctcccctctaaggcccataaaaaaccctggactcagccacaccagaagagatgacgggacaaccagctgcagaagggagctaccctctctgctgagagctcaagagatgatgggacaacctgcctgcagagaggagctaccctctctgctgaaagctgaacactcatcgggacaccatggctatgtagaggagctaccgactgtgggtttcctctgagctgttctattgttcaataaagctcctcttcgtcttgctcaccctccacttgtctgtgtacctcattcttcctggacacaggacaagaactcagtacccaccaaatggggttgctaaaagagctgtaa

SEQ ID NO: 477365 - DNA, 762 bp, Homo sapiens
gaagactttcaagaagagagacaataacctcccaccattaccatggaaaatgtatacctccaagttctgttcctgttggatttggatgtatggcttgctcttgccaatggaatattagaagacttgactcagcaaattagaaatgtgcctaaacttttgggatctggcatcgctgttattgtgactatgatggatatttccaaaacaattgctgtatctgactttttggtgtctgcagtttcagttgctacaaatcctgttgaagaagaaggagaaggagaaggagaaagagaaggaggaggaggaggggaaggagaaggagaagaagaagaagaagaagaagaagaagaagaagaagaagaagaagaagaagaagaagaagaagaagaagaggaggaagaagaagaagaagaaggaagaagaaaagaagaaagaaggaagaaggaagaaggaaggaagaagagaaggaggaggaggaggtaacacatattgtattaattcatttcaatttctatgaaatatccagagtaggtaaatccacagagtcagaaagtacattggttttgcctaagactgggaggaaaaggtgaatgaagagttactgtgtaatgagtatgaggttttctttgtagtgaataaaaggtttggaaaccagataaaggtggtggttgaataaaattgaggatgcattaatactaaatgacactgacttgtacgctttaaaatggttaattttatgttatgtgaatttcacttcagtgt

SEQ ID NO: 477366 - DNA, 1250 bp, Homo sapiens
tcaggaaactctcccatttcactaggaaaaagttgaaaagggaaagctcaatgtcaaaaccattatctgaatataaattttcaataactgctcaggggttaggaaatcagaggactagcaagccatccaggaaagcaccaccttatgaggcgtccattaaaacacaaaaagagaaagaacagagaccatttacacaaataaaacaggagaagtgggacttggagatggagaaaggaaaccaaaagcaaaaagggagatatgagtctgccctcctaaccctacacagatgtctcacaaactcatgttcctgctcatggaggacaggcaaactgagcagggtaaatctatcaccccaacaatgcaaagcccttgacctggtgaagctaatctgccagagccagcggctctcattgttgtcaggggaacgatggaaagccaaggtcccaagtgatgaagctcatgagggtgaccctgctttggaaccaggcaggacagagaagggcagtaaatggatcttcggggtgttctcatggaaaacagagagtgatctgcatactcatcaagccatccctgaagaagtaagctgagattagtgcaaaaatgtatacacaaaatgctaatgctaatgctaacattatttagaaacataagatcgtgggaatactatatataatcagaagtaaggtattggagaactaaaatttagaagtgacccatcaattttcagttgcaaatcacgaaataatttaaatagcatgtttcaatggaatatgtattggggtgcacatatttatgctatataagttaaaatgagaaggctacaaaacatatacatatatgtgtgggtatgaatataattactgcatatttatattaacgcttatataaaaactaaattcatttgaaagacctaaaattaagagtttagagaagattgaaaggaggatgaactaaccaataagagagtaacattattccctaaagaactttaaatgttatttgttccctttcaagtttaattagaatcatggtgcggagtgcgagtaaaagtctttgtattgaaatgaatgtgatattattatttcatgagcactgaatacattttttctatataagaacaaatgtaaaggttattaatataaacagaatatggatttcttctaagtcaagatcagttggtagaaaaacaattgaccaataatcctagttgcagtgtggctttgagaccaggaatacagaatatttaaaaa

SEQ ID NO: 477367 - DNA, 870 bp, Homo sapiens
gctggcggctccgagtgtggggcctgccgagcccacgaccacccggaactcacgctggcccaccagcgctacacacagccccagttcctgcccgcacctctccctccgcacctcctcgcaagcagagggagccggctccagccttggccaacccagagaggggctcccacagtgcagcagcaggctgaagggctcctcaagcgtggccagagcggacgcccaggctgagaaggtgccgagagcgagcgagggccgccagcacgttgtcacctctgaagatctcggccaggcctgctctgtgacttccgccacgctcccacgggtggcggcgaggagcctgagccggcgatggtgctacaggaggcgctggagccggccatgtgcctggatcgctacccgcatgtgcagcttgaggcctcggagctgctgctggaagatggcggctcagccctggccactgagctcaacaccgccaagcttgccctggcctatgcaggcatggagatgaatgacttggtggtgagctgcggcctgggcctcgcgccagggtccgtgcccacctggctgctggaccccatgcggctcgaggaggagcacaccgcccccggtgtcaccttggcactcctgcccatgctgaatcaggcctgggcctcgagggctgcgagccctcgaccccatgctgcagcagtgcctggtgtgggctgcctgccacaggggcaccactgccccaccctgaaccagaagcctgagcaacgacagacgccacgctgaggaccgtgctgccaccgtccttttggggactcatgacattggcctccagcctgcattgagataaacagccggagccccggagagcacctggggaggctc

SEQ ID NO: 477368 - DNA, 670 bp, Homo sapiens
ggaagagaacaaggatgagggacagtgaaaaggggttaggatcaatagactggaggttccagcatagccaaaggattgtgggggttgggcacaagagggagggaaacggggaggcagaagacagttgtctgagggaaaatgcttgctgtccaggaaatgtcaaggttgcagttcccagtaatgactggggcatggtcatagatatgagtgtgcctgagttgggtgggaaattccaatgggaaaaaaaaatctcagaaagaagacagctcaagaaaccccacagtgacattagggccatgggctctgagagtggccgcaccatgtcttctctcatccctggacctttctgtggaaatatgaaagcaaccacagtgctcagccatgctggaactgacttcttcctcctcatggtccacttgaaattccaggaaaaggaacagatgtgcaaggaattgcagcctggagaaacatagtgtatttggagacttgcatgtaaatggataaaatgtcaatcaaccttcatgttgtgtctacgctcaatcatccctgatgaccctacgctgactacagatgcagaattcagcaaaaaccaatgaaagcattcggtgagaatcaatggctatatggagcttacaataaaccgtattgtgtattttattattacgtatac

SEQ ID NO: 477369 - DNA, 958 bp, Homo sapiens
agcatgactgtgatggtgggtacatcactgtcaaaacctacacaactgcacccacgtgtacagtatggcgcagacaagatggcgctggctgagtggaaagtccatctgcaaagcacattcacaacctctacctctcccaccaaagttattcccctggtgggcccatggtgtgaacactgggctggctgaggacggcggctggctgacatcaaggcagtcctgcagtagaagtccaaccttccacaaaccaggcccagattgtttcctccatcagttggtcatagggagcaccccacagggccatggacagaagcttgggagaagaatggatgcaagggcactgaatgacatgggccagtctctcttcctcggtgccgcctacggaggtgacaaccatctacttgacatgatggctgacctcagacccctcatgaagcccaagattgtcaaaaagaggaccaagaagttcatctggcaccagtcagatcgatgtgtcaaaattaagtgtaactggtggaaacccagcagtattggcaacagggtttggagaacattcaagggccagatattgatgcccaacactggttatgggaacaaaaaaacaaagcacatgccgcccagtggcttctggaagttcctggtccacaatgtcaaggagctggaagtgccactgacgtgcagcaaatctccctgtgcggagatcgctcacagtgtttcctccaagaaccacaaagccatatggaaagggcagcccagctgccctcagagtcaccaaccccaatgccaggctgcgcagcaaagaaaatgaatacacagctcatgtgcatattttatttatgcttaaataaaaccattaaaactgccaaaaatttagccaagtatggtgacacatgatatatgctgcctggagcaaggaagggaagaaataaaggatgaaaggaacaccaagaaccccaga

SEQ ID NO: 477370 - DNA, 829 bp, Homo sapiens
aatgacttatacaagttttccatggggcctggtggaagactaggacggtcaacagcagcctggagagcctggagtctgcgtcaatatgcaaccctagccctgcacgctgggcgtttgcctgaggtttccagtgcaccggaggcgcgtactcgtctgcctaagagggtgaggagggtgaaggggattgatgaagcaggaggtggggggctggggctggaaagtctgaacaatgggaggaggataaaaatgccaggtgtcgcagcacatgaagtcacaaaagatgtatacagaaccagatgtgagataaaggtcagggagtttcaggaccaaatttgtgaatgtcgggtttgttctaatgccgatgttacaaacatacatgatagcttaagtgagctctgcagggctggacaatctgtgaatgccacatttaacaagactggagagaggctgggtgcacataactcaaggaggtgctgagggttggtcagaccctaagaaatgggtgaatgtcatggactgttgtcctagaagattaatgaaatgatacatgtaagaacttaagacagtgcctgcaacacagctatctctggaagttgttgttattattattacataatgttttcacagttgataatggtttggctctctgtccccacccaaatctcacctctaattgtaatccccacatgttgagggagggatctgtaattcccatgtgctgagggagggatctgtaattcccatgtgctgagggagggatctgtaattcccgtgtgctgagggagggatctgtaattcccgtgtgctgagggagggatctgtaattccc

SEQ ID NO: 477371 - DNA, 1462 bp, Homo sapiens
caaacgggaacatgaaccctttgaggttgctaagtgagtaggatggaacagggagtggagggatggccgcctgttgacagttgggcattagcaagtgggaggaagaagatgtctggcttctccattccttctttttttctctttctggttttgctaatttatttgaaaattacatttgttcacgtcaaattaccacttgatactcattgttggatttctttaggtcatcctgctgttctctcagtttcccaggggtttgtgtgtctgccttgtgctattcattttcccacggccttgttggttgcttccacagaggcaaatattctgtgtcacacagctcactgtggacagtttgccagcttttgggcatggcgaaagaacgatctttggaagagcagggaagcccagaagttcacagaaaagaaagctctcaaattcttcttgcaacagtggtaagtaagaaagaccttagcttcttctgaaaaggccgtatgcgtgtatgtatgtgtatatatttatacaggtatgcgtgtatgtatgtgtatatatttatacaggtatgcgtgtatgtatgtgtatatatttatacaggtatgcgtgtatgtatgtgtatatatttatacaggtatgcgtgtatgtatgtgtatatatttatacaggtatgcgtgtatgtatgtgtatatatttatacaggtatgcgtgtatgtatgtgtatatatttatacaggtatgcgtgtatgtatgtgtatatatttatacaggtatgcgtgtatgtatgtgtatatatttatacaggtatgcgtgtatgtatgtgtatatatttatacaggtatgcgtgtatgtatgtgtatatatttatagaggtatgcgtgtatgtatgtgtatatatttatagaggtatgcgtgtatgtatgtgtatatatttatagaggtatgcgtgtatgtatgtgtatatatttatagaggtatgcgtgtatgtatgtgtatatatttatacaggtatgcgtgtatgtatgtgtatatatttatacaggtatgcgtgtatgtatgtgtgtatatttatacaggtatgcgtgtatgtatgtgtgtatatttatacaggtatgcgtgtatgtatgtgtgtatatttatacaggtatgcgtgtatgtatgtgtgtatatttatacaggtatgcgtgtatctatgtgtgtatatttatacaggtatgcgtgtatctatgtgtgtatatttatacaggtatgcgtgtatatgtgtgtgtatatttatacaggtatgcgtgtatatgtgtgtgtatatttatacaggtatgcgtgtatatatgtgtgtatatttatacaggtatgcgtgtatatatgtgtatatatttatacaggtatgcgtgtatatatgtgtatatacacatacttacatgtgttcatatgcatctattaaaattttactcatttatgaagatgaccctgg

SEQ ID NO: 477372 - DNA, 597 bp, Homo sapiens
gaagaccttgtgtgtgtttacccctcacagtatcaagagggaacagctctcgagtaaatgctatccaaaaccataatgagataccacagcacaactatcaggatgctcacatttaaaagactgaccacatcaggtattggagcctttgagatacctaagaagaacaatcaaggcgattgcttggtacagtggtctagagcaagcttgtccaatccacagcccacaggccacatggggcccacgacggctttgaatgtggcccaacacaaatttgatggcaaagcaagagagcttgaaaccattggggaacaagtgggtggagattccaagaagacatttggagatacaatgatgaagaaaggtttagagtatgatcataagcgtggagggaagattcgggtttcagttaaaacgaggaactatgaagggccctctccaaagcagatgagcatgtgggaaaacaggaaatcagaaggcccctcagatagagtaaagaggggttggtggtgtggtgctgctctgcaaacggaagagagcagagagccagctggctctgcattttgaactgtgagcaatggtaagcacagtagcagaaaa

SEQ ID NO: 477373 - DNA, 465 bp, Homo sapiens
cctgacccagtgactcatgattctgtgtatatccactcctttactaagatattctcccacacttatcttcagtggttccatattgtttatagtgttcaatccaaatttggacctggcacttaaggtttaccagatcttgtccaaacttgcatttccaaatttatttcctgccacttcccagaaggaactctcaatgccatccggtcctgttggttgtactcactggcccacagatgagctctctgctgtcagtctgaggaagactgtgggaagaagcaagggagaggctcccacgggaaaaagattgactcaggattctgaatttcttctttgtgttatcttgaatctcattgagtgtcctcaaaacagttattttgaattctgtgtctgaaaggtcacatatatgtctctccacgattggtcactggtgccttatttagttcatttggtgaggtcatgttttcc

SEQ ID NO: 477374 - DNA, 1292 bp, Homo sapiens
gaaataatgaataaagaatattcaggtaaagttcatggacatcagcaatggtaacaggatgcactccaaagaccaagcagggcaatctcaactcagagatggatcttcagcagccatgtggttacaccactgcagaagtaatcaggacagaggccattacccagggaccaagcaggatgtggtatatcacctggagacttgcatgttccacctccatgtcagagaacatgtcagcttcattctacacccaggaatcccctggtgcaagtcccagagtccagaggctgaagaacctggagactgatgtccaactgaaggagaagagggaacaagtgtctggcacaggaagaaagagagagccagaagactcatccactgactcaaatgtcaatctcctctggcaacaccctcacagacacaccccgaaacaatacttcactagccatgtaggcatcccccgatccagccaagttaacatctaatattaatcatcacacatcccttgactaaatctatactaactcttatctaatactggattaaagagtatttgctgattgctctgtttacttaaggacttcttaaaatattaaatatgctaatataaaataactgatgttcaagagggattaaatgttgcatttcctaaaattatttgatcactgggtttttcttcccatgaaatttcttaatagcagtgttgtgctgaacaattattgtgaagttagttgctctctagaaatgagcatcttctgtgttaaaataagtcaactgtctatttcaaccaatagtctgaagagaattgctatatttaatgtaaaaagtaatagaatctatataaaagcaatgactatagctttaaagtaactatttgttaaaaggatggataagtgaacaaagagtatgtttgttatgaaaccacaaaagcttttgcacagttttcaaataaagcacaataatccaataaaccaatcacattttctaaaatcaagttcaaaacaataccgggaagtatagttttttccataaatttagagaagagatcaaaagtaaacaagtaccattcaaagataaacttaatataacaataatagatgacactattaccaaggaacttgtacaatcaactgcaatgttaatatcaagtatcagcctcaaagagaaaccaggaagttattggcaaaatattttattaaatacaggtcagtgttgtacaatggtatgtggtgtggaagaccaattactgacatctgcatgttttagcatcattcttaatctcctttaaaattctc

SEQ ID NO: 477375 - DNA, 1739 bp, Homo sapiens
gagggccatgaacatccttgagttggagcagagccacttccgcacctgctccgagcgtcccacgttgccccgacacccacaggagcggagccacttccgcacctgctccgagcgtcccacgttgccccgacacccacaggagcagagccacttccgcacctgctccgagcgtcccacgttgccccgacacccacaggagcagagccacttccgcacctgctccgagcgtcccacgttgccccgacacccacaggagcagagccacttccgcacctgctccgagcgtcccacgttgccccgacacccacaggagcggagccacttccgcacctgctccgagcgtcccacgttgccccgacacccacaggagcggagccacttccgcacctgctcctctccagctccccacaggctgccttcaccacacccctggagctgggtagctcctgtgttctttcagttgctgagtgccacatacaccttctcagatgtcccctcactgctcagcagcctgtggaagcccccgctgactggttcaattcatagtcctgccgaccatcgaaagctttcggatgaccacagtgtcatctcctgccccctgcccagcgtggggctgtcccctggacggtcctcactgacctccatgcctgtggtctcctgccgcctgcccacctgccttctgcccaccgtggggctgtcccttggatggtcctcactgacctccgtgtatgtgatttcctgcccagagcagggctgtcccctggatgttcctcactgaccttcgtaacactgtagcgctgtcccctggacggtcctcactgacctctgtgtatgcaatttcctgcctagcacggggctgttccccggatggtcctcactgacctccatgtgtgtgatttcctgcccagcgcagggctgtcccctggatggtcctcactgatcttcatgtgtgcagtctcctgcacactgcagcgctatcccctgggcagtcctcactgacctccgtgcatgcggtctcctgtccactgcctgttgcagaggctgttccctggatggtcctcactgacctctgtgtgtgcaatttcctgcctagcatggggctgtcccctggatattcctcactcaccttcatgtgtgtgatttcccgcccagcgcagggctgtcccctggatgttcctcactgaccttcatgtgtgtgatttcctgcccagagcagggctgtcccctggatgttcctcactgaccttcgtgtgtgcaatttcctgcctagcacggggctgtcccctggatattcctcactcaccttcatgtgtgtgatttcccgcccagcgcagggctgtcccctggatgttcctcactgaccttcatgtgtgtgatttcctgcccagcacagggctgtcccctggatggtcctcactgacctctgtttgtgcaatttcctgcctagtgcggggctgtcccctggatggtcctcactgacctccatgtgtgtgatttcctgcccagcgcagggctatcccctggatggtcctcactgaccttcttgtgtgcagtctcctgcacactgcagcgctatcccctggacagtcctcactgacctctctgtgtgcaatttcctgcctagtgcagggctgtcccctggacggtcctcactgacatccatgtgtgcagtccttgccccacatccaagccctgggtcctgagagatcctcatggatgcctgttctgacccatagctt

SEQ ID NO: 477376 - DNA, 662 bp, Homo sapiens
ctagctttggcctgggtgatggggggagcttcgcagagatgtgtcttcaggagggactgtggtggacaagctgagtggcagctccattgcaagatggatggaggctcttgggccatccctgatggagcccggggcatgggtggccacaacctgcacccacagccatccctgatggagcccggggggtgggtggtcacaacctgcactggccagtggaggcccagggagggtagcccctgcatcttcaggcaaggcatccccagcaaaggcagtggtggctggggagagagcagctgtgacggcggcacggagggcctgacgtgcgactttgggatgtacccggagtgggagctgtgttttcatggtgttcattctgcatccacatcttcagaggaaatccccgaggcattgtgagcatgtccatcagggcaccctggaaagcttggtaaatgctgtgtggtggcgaaaggatgtccgttatagagatgccacgcattccaaagcaaaatggagatgattttaaaatgtgaaaatattcagaagtaaatatgcacgcagctgctcctcccatcagcgttagccccaggaccaacagcgacgggtgcttagtgcccaccaggtgctgtggctctgggacaggtctgaggtctgtgaggggaggc

SEQ ID NO: 477377 - DNA, 738 bp, Homo sapiens
tccaacaacaggactgagggtgcctggggcaagcgccaactcatgtcatcaccctcactgagccccaggcttaataagaaaatgcagcagtcccagcaacaaattctaggagtacaaaaactgaacagtcagtggagactagcgcaagattttagactcatcaatgaggcagtaattcctctatatccagttgtacccaacccctataccctgctctctcaaataccagaggaagcagaatcgttcactgttctggacctcaaggatgccttcttctgtattcccctgcactctgactcccagtttctctttgcctttgaggatcccacagaccacaactcccaacttacatggatggtcttgccccaggggtttagggatagccctcatctgtttggtcaggcacaggcccaagatctagttcacttctcaagtccaggcactctggttgttcagtatatggatgatttacttttggctaccagttcggaagcctcatgccagcaggctactctagatctcttaaactttctagctaatcaagggtgcaaggtgtctaaattgaaggcccaactctgcctataataagtcacatatctaggcctaatcttagccagaggaaccagggccctcagcacggaatgaatacagcctatactgtcttatcattgccctaagacattaaaacagttttgggggttccttggaatcactggcctttgccaactatagatcccc

SEQ ID NO: 477378 - DNA, 2056 bp, Homo sapiens
catcgtcttttttatggctgaataggcccaagggctcttcggtcagcttgtggtgaatgctgcctggcttgggactcctcttttgggtcagtgggctcccctatggccgagggaaggtccagaaatgtgagccaagtcctagaacctttggtgctctaccccctgttgctgagctggtacctgaagcctacaactcacagagtctcacccaaggcccagaacatagtacctgggtatcactgctggttattcagggctcaagggctcttcagttagcagaaaggggacctcatgactcagatcagtaccctatcctgctgtggctgagctggtatccaaggtgcaagacaatgtcctccccactcttccatctcttctcctcaagcaaaaagaagtggtctcttttggatccacgagctacgcagcttggagttaggggagtggtgatgccagcactctcttagatgccccagctgatgcctcagcactaaagttgtaaaggggaataaaaagtaggttcggggatggtgaataaatcacttggaaaataagcaagatttgcacagataagatgtaggaaattattttttaaaagtaaactaaacccaaatatcgagagctttgacaaccaggaaagccctaaaatatctaagcagagaagttatatggttgtagggatatttgaagaaattaattccaaagtcagcttgcagaaataaatgaaaagggacattagagagaagaattgttatgagaatggttttaccattatgtctatctaaatggcccagtttatgggttaaaaagtagtggtgtaaaaggaaggcagaaagaaatgtcggagccattttgtcatgaatttattaaatccctaccaaaataattctcaactgtgtgtcagagaatctatgaaccagaaactcttggagaaatgacacagaaaaggtaattctgataaacacctaagtttgagaacccatgaactttatattgtggcaggaataattaattttaatgactaaatgaacacagaagtaaggatgcatataaaatcaagatgattccaaatttttaagcctgggagactttatcccaggaaaatgagaataactttgtcactattattattatcaaaaataatctatcaattctgctaattcctgttgtgttaaatttaaaattcactgaaacatagtgcctagatgttagaaagtttataacagatgcaattaaaacatttattggcatatataaactcaaggaaaagagacatggcaatttaagagtcatggcagagtaattaaaatggattactatgtatctacctatagttacagaaaaagataattttaaaagtagaaaagatacaatatgtgaagaggtaataattatacatttgtcaagattaatgaaagacaagagttcctttactcactgcgaacacctatgaggcaatgaatgaatactctggccattaatttcctgtttctgaagtctatgaatttttaccttgtcaaagcatataacattggcatactgttagccttgttcttatcatctgaagataaaatgaaatcaagtataaaaacatgctttgtaaaacactacacaatatcaattcatttgtctttattttaatatttctttctaattcccctgccattcaaggcacagttgggtttttagactattttttattaatgccaatcattaggtcctttgttcactgatgcgcatttctatttatatagacttcaactattaaaaatggtgatgcattttttgaatcaatttcaatttgtaatctctcctcttgtctacttacctagagaataaatacactaaggtagtgaatttcatcttattaccactcctgccaaaaaagaaactacatctaacaagtacccaatgtttgatggctttattgattttcttcggaacagtttccattagattttcccataaaaaatgtggcaggatttatgtcattgttccaactgcaggtggcactgactgacttaatttgtcagttctgttcttggttattctttcttaa

SEQ ID NO: 477379 - DNA, 1666 bp, Homo sapiens
caataaaggaaagaaaaaaaagccaaagatgaggcatgctgggagttgtagttttcagttatcatatgtaatttttgtaacattacttagtcttgcaaagttccattcacctgtcaaaaatatcgtttgccttaggcaagtgattgaatgcagttctgcaagattgatctatatagagcagttggtgacaaccagttacaattttgaatttctaggaaatagcactatgaacacaggtcttattcctcctcccaaaacaacacttccaggcattcccataggatttttggtaattgtaaagctaccaacagaatgctttgctaactgcttctcttccccagtggactgtgagctcctggaggacaaggcaatgaaagacatgctagatattcaaagcttgttgaataaatgactgaaaggatgcagaattttcaaaattccctcttcaagtacttcttctacaggaatgggtagagtgggaagtgaggagacagggtgggtatgtgggtgggaatagggcaagtgacttaagctggtgtgggtgggctccagtatccacttctacttcaatcagagcaactcaacaatgctacatatataagcccactatgaaaattggatattgaatcagctgggaaaatgaattccttactgagcatttcaacttaaacttgggttccaagtggattaaacagatgatgttgtaacactgttatcagcctgacaggaaatgcatagagacaccagtcctcgtttcttaaagtggaggagcctcagctagcaaattgccacttattagcttgtctcacctataaaagagccatggaagagaagtgcaagagaactgaagtgatttcctgatgacagcagggggtgctctcactagactgaaggacagatacattctcagagcagtaggaaaggaataacacattgccttactacgactctatatgagactttagaagtgcctaatacctgcctggagcaaaagaattaatatgctctattccacggctctgccgtcttcaactttgataaatacttaaaaatgtatttttgaaaagtcattaacttctggaatataggattcagccaccacacttagaatgtgtgaaactgtggtgcaatttgtaacaggatgtacaccacatttttaatcagggaattgtgttttttaaagctaagagacctgtagtgaattaaggcatttggctcagccaaacattccaatcacgaaacgatcgaagaggaaatctatagaatcttattataaacttacaaaaaggataactgtgggtctcggccataaactgaagtaatacagatgaactggacacatatgttgcacaataggtgattcagagcaatatagcctatgctgttttatgatatggaaagcaatcaaatcttatttgcaaaaaattcagatcaattgaattttaatgagaagcaggtgctggagtgtagcatccacaaagaattctgggaatgtttaaaattagtcccatatttgccaggagacagttgggtacataaacttttttatttcttgattcatgggtctattcggactgtagattgctctgccattctgagttcagcaatttgaataaattatgctgaaaatcacttggtggttcattttgtgtgaaattatattttc

SEQ ID NO: 477380 - DNA, 893 bp, Homo sapiens
tctcagaatgcattatactctgctgttatgggttaaagagggttattatccccactacccccaccacacttggctgtgtgccttgcatttcccagaagtgatgggtgccacttcccagtggaagcttttggagctgtctgacacctctctcctgctcctctcacagcaagcacccagacaggaactgctccttcagcctgcggttcccaaaattaacaggacacaaagcagagccccagctgtcggtgatgcatgtacagcagtagcgagaaatgcacttctgtcctggcttgctgctgaggacgtggggccacttactaccccagcggaactcagccgacactccaagcaagccgccagtaggtccttggccagcatccagggtgaccaattagtctcggtttacccaggactgtgtgggtttaaaacaggaagtcccacatttgaagaagcccctccatcccagagaactggagcagctgtcaccctaacaggtgaaaatgtaccctaatcattgaaaaagaaaagagctagggatttgtatgctatcaagaaaaagtaatgactgtaagtgaaaataaatgttctaaagggacattaaacaaatactagacgtgatacatcctcaaatacacggagccctcttccaacattctccatttatttttttccttccactgatcaaacttgtttttcacaaaataccacttttgagttaaataaaacaccattgcaattccattttctctcctgcttcctaattgctctattcacttgtttattcacccaacagaatgtgtttctgtattgcacacatacatcacggcagagactgtggtcaggaaaggctgtattgagaaaaaaaaggccacctttctacaagccagtgaaaa

SEQ ID NO: 477381 - DNA, 709 bp, Homo sapiens
tttggtttgagcccccaatccaaagatgctttgctggtagctaggaggtattcagcaagcacctgctatgcagaatgcacagtgtggagcacttggagggaccataaagatgaacggaacacgaattctgcccccaggagtcttgatggagctgacgggcaccctaggccttgtctcgcccctaggaggcccctcttcctgctcctctgcaaggctggcatcgacagcaggtccagccccatccctggcctcagtgactcaaggggagttttcagaaacttctcagatcaaggaaagctcagaaaatccagtgtctcctgaggagaagccagaccctggccaggtgtctctggagtctgtcacagaacagattcaggaaaaacaggtcgctggggcctccagcaaacagccgataccacatctgtgtgcatcgtcctgtgatgcccagggaatgggcttcgagggtgctgcacagctgtggcaccagagaacactccgcggggaacggcgtcagacggggcggggcgaggtgaggcccgcaagccagtccctgctgcacacggtagcgaaggcggaaagctgcggcaacaccttcccaccatctctgtgaggtctgtgggtggagagggtgggatgcgactgccagccccgtggaaagccacttgccagccatcctcttgtcccagtgagagctgcaggttaaggcacc

SEQ ID NO: 477382 - DNA, 979 bp, Homo sapiens
cagtgtaaggttcacaaccattctagcccaacctgctgagaaaagtctctgttgtgtcttgtcaggtttttgatatctctgcttggctatggcccagatgccccacgagcagccaaggcctccctggggcactcagctgagtaccagtggctaccagtgctccctgtacccggggacttaccagtgccccctgtacctggggatttaccagtgctgcctctacccggggacctaccagcaccccctgcacccggggatctaccagcgccccctgtaccctggggtctaccagtgccccctgtacccggggacctaccagtggtccctgcacccggggacctaccagcgccccctgcacccagggatctaccagcgccccctgcaccccaggacctacaagacctaccagtgccccctgcacccggagatctaccagtgctccctgcacccagaggcctaccagtgccctctgaacccagggatctaccagtgctccctgcacccagagacctaccagtgccctctgaacccagggatctaccagtgctccctgcactcagggacctaacagtgctccctgtacccagggacctaccagtgccccctgcacttggggacctaccagtgctccctgcgcctggggatccgggagccacaccacggcatccacggcaccgcgtccctttctcataaaatctcacgatttttctttcgaagtatccagcctgtctccttaattaaaccataagctcctttaaagatggcatgcgtctacactttgtcatgtcccagccctgaggaagccacctctcacacagccgacctgaatgttgacaatgatgatgatgatggctttggctgaataatttgcaaatttgttcaataggtctccttattcacactgagacaggccaaggtcctgaccccagagtgaagccagcttgagcccccagggctgaaggtactgagcccttaactg

SEQ ID NO: 477383 - DNA, 1820 bp, Homo sapiens
gctgcgagctggtttcggatccatcccgcctcccggcgtctcactgtgtgccctaccctttgaaacacgcccccgcgcccgccctgccgtagaccaggcagcgaggaagcccacagtctccgggggcgctgcgcgcgaagtagcacgtgcttctcgaaacaccgcagcccccgggtcccgccccgcccggcgcgcgcactcgaacccgcccagagagcggtgcgtggcgctgggtgcgagcagggtctagccacccccaccctcaccccaccccaccccaccctgcttttttcaggttcatcaaggtttgcgcagtggatccgcgaatgaagccagcctggaagatccccagtctcgagacagagcctgacaggggcagatgcactggaaggaccctgtctgggtttagcaaccaagcagccatcctggccccacaggtgtgggacttctgggtcttctcctggctggcttcttgctagaggatttcaagagacccagcaagactgtattgtcccactgaatgctcaagatattggttagaagtagaaaaggggagggggtagtatttagcctctgtccccactaaaaattattcccaattgtcatttgtgtcatctgtttagcttacagttttaatccttgtcaaaatgatcatttgccagggtgcataaaacaccctatttgatgagaactggttttaaaggaaaatggggccatcagaaggaagccggttggtgtgaagagacgtctgggaagagcccctggcgagggccctcattccactgggtgacccagaaggagaaaaccgcgatggcgcttctcatttgaaatgttttctttatggacagtgtttagcaattgttataatgtgtacttttgttgattgatctgtatacatatgtaaaataatttgttctctgagttaattttgttggaacaaagactttagtgcttcctacattaaaacattttactgtattgcctgcattttaagagcctttttttaatttttaatttttttggtccttgtgatatgacgagcaaattaatgaacctgagagggggttgtgggaaccccaattgagagcccagcctgtcggtcagaagctccggatgcctggacttgcaactgctgtgcgaagtgggatgggggtggggtgccttggggattgagccctcaacctgtgggatctgccactatctccagtgggcccagcgtctgccgggcagccttgactgtggccctagagtcacggaatactcgagcagacctctgacggacatggtggggtgagccatgtgggtcgctggggagaggattccaaaacagaaggcagcctggctgctatggagagaaaagactgtgcaagcaacagggaaagaacaggggagcacagtaagaaggccatcgtgtcatcaggcaggaggtgacagtgctcaggccagggtgggagaggagcagtggcaagaaggcattgttatttctggatatgttttgaagacagaatccccagaatttgctgatagattggatgtggggtctgagaggaggaaagggcagcatgggagcacctggaatgatcccacttactgggacggcaggggcagggaggggctggggaaacagtttgcttttggatacagtaaacttcagacatacatcaaacacccaagtgaagagtccagagagacaggggtcagggtgacaagagacgcttgtttggaagtcgtcaaccaagggatggaatttaaagctgtgaggtgggaagagatggtctaggatgagaatgtagacagcaaagaggttgggactgtacctc

SEQ ID NO: 477384 - DNA, 941 bp, Homo sapiens
ttctcacagtgcagcagcgggctgaagggctcctcaagcgcggccagagtgggcgccaaggcggaggaggcgccgagagcaagcgagggctgctagcatgctgcacgctggcagctccaggtgccggcacaggtgctagctccacgcaaagctatggctggaccagatgcactgcacgcagcttctgctgtgggcacccacaactggatgagggaaacgcagtggcacctgaaaatttggagatgccaggaaccacagagcccaaaagagggtgtcacagccctggctcagggagcccctaagtctgggctccccgaaggtctgcagctcttctgtcctcatcacccacaacatggtgagcatgggggtgtgtttcagccctgtttgtgttacagctctttcagttccgccattcagtgggtccagaattcccgtcctgcgtccagaaagaatgaggtacatagacaactggaggaagggaggaaatgtatgctgattggtccatgggcagccatggacgggcctgcaaaaagcaccataagttctcactccaggctgtggactccacctgaaactgacagtccagcccccggttttcaggccatccatggcttgaagtaaccattttccttattttttaaatgccaattacttcctgcatttttaaagaatttcattattcaaactcgtatccctagacactatggtttaattttatcctcgcctatttttaaataattgatatgtctttttaagtctcctaatctatagatttttgtagagattgaaaattacacagacactcctctgtccccctaaaatgcttgaaataatgtatttttaaataaggtttttccatttaaaatagtcatactaatcatggaatatttttaaaaggaggaaagaaatccccatggacccaccaatcaaaggcaaactgc

SEQ ID NO: 477385 - DNA, 641 bp, Homo sapiens
cgcccactcagcggatgccgtccccaccaaaggggtgaagccatgaaccaatcggagccaatcagagaactccatctccccaaccacagcaatggatcacagcccggccgtcggtccctccgtgagattgggtatatgggtgttgggaaatgaaagcattttctttctctggaattaccatctagcctggagccccagcgtgggaaatgcccccagcgtggagtgcccccagcatgggaaatgcccccagcgtgggaaatgcccccagcgtggagtgcccccagcgtgggaaatgcccccagcgtgggaaatgcccccagcgtggagtgcccccagcgtgggaaatgcccccagcgtgggaaatgcccccagcgtggagtgcccccagcgtgggaaatgcccccagcgtgggaaatgcccccagcgtggagtgcccccagcgtgggaaatgcccccagcgtgggaaatgcccccagcgtggagtgcccccagcgtgggaaatgcccccagcgtgggaaatgcccccagcgtggagtgctcccaccgtggagtgctcccagcatggagtgctcccagcgtggagtgctcatggcggttccttgtgccttttgatacaatcgcataagaaggctgtgtggtgg

SEQ ID NO: 477386 - DNA, 528 bp, Homo sapiens
ccacctcatgtctgttaggatggctaatatcaaaaagatgaaagaggccagcttcctcaaaaagctaaaaacagaatgcccatgtgatccagcaatcccacttctggatatctctcctaaggatttgaaatcaggtgtcagacatcccgaaccccagggtgggccctggcgctggtttggaggcgtcccccccggtaaccctcgtgagacacgggacctcaccacagaccttaacactattaacagcaaagtcagggatccgtccctcggaaccatgaagaattccggggacacagacaccgaccggaacgggggctctcggctccgcaaagacattctgcagcacaaacatcgccctggctgttgcgcggacgtgtcttgtgctcggcaggacctgaacgacccgttccctgaccgagttatctgcgtgtgaacgggaacttgtttggaaacagggtctttccagatgatcaagtttgttttgggttttcaccttgtggtcttatattttcctaggtttgagtaata

SEQ ID NO: 477387 - DNA, 497 bp, Homo sapiens
agcatacaaatcatggttatgcttttaatagtttcaattttcctgtctgagctctggactagagaccctgcaattactccctgcaaaacacctaaattacattgccagaatgaacctgcaagcaaccaaaagaaattctgggagtccatggacaaaatgacagccagagtccaagaggcaggagaggggctgaagccagcagatactcggggagcgaaggtggctctgacacggcgactctgtcctaagagggacggggcaccaagcctggggaccacactgggaaggggaaaaggcgaactaggaaacatcctgagccttagtcggcagggaaactgtcttaaccttagtaccaggcaagtttatttcttaaatcccgagagaatgtgcagcactgaccagccctgccacgggcttggctcctaaatcttctgctctttgcatgaccccaaaatgacaaggtgagaattgtaattaattttatttatttatttttt

SEQ ID NO: 477388 - DNA, 556 bp, Homo sapiens
catttgtgcttggcatatagaccatgagacagcaaaaagtacaaggcaagagagaagaaagtggcaagaactccagtgtgcctataacaaagactgtggagggagtgaatctggagaactcatcgggacccacgttggttgctgctgaacatgccaggaagccactttccagcccttctggctgggaagctggctgtggcaccagtggcactgtctgggaagctgtccatggggaggctgctgagcaccactgtgtgtcctttatactggacaagcaccacaggagcaagaagagagaaaagaaaactggaaccaagaagagaagccccttccttcttcagtctccacttatcttcactgacaaagcttcactttgggctggctggcagaggagaaatatttataagatccagctccaggatcatcagcaggcaatgaaggggaaccagggaagaaaagaagaaagaaagaatcggtgccaattcatcactactgctggaaaaacaacttgaataatattacctactcctgtattgattatattactaataaatgt

SEQ ID NO: 477389 - DNA, 609 bp, Homo sapiens
atgttagacatggatcctaccctcctgaataggtttgccatattaaatataggacacttaatcaaatgtgaattgcagataagcaatcttttaaaaatatccacatgttcccttaagtcctgtttttggtataagattttaatcctcaactatgttcggtatccaccagtccagaatccatttattttgccctctccaaagaatacacttcacctcagcccaggtgggaagggacaagttgcttccacactccagcccaggtgcagaagggacaagttgctcagcagcacagaggagatgggggagacctgggaagctactggcttctcaaacagccttcatctggacctcctgatttggggccccacttcaccaccatttccagaggtgcttggtgctatcatgttgatcaatgtaaatcttagaaagccacttccaagccctgggaaaggtgtctgtacccaaatccaagaggcaggaacagatgtggtggaacattggaagcaagatgatgagtaacatgaattgctagtcaagcatctgaaaaaaagagccctcagttatattttagagtttatttttaagaagggtttgctctaaaagtactgt

SEQ ID NO: 477390 - DNA, 636 bp, Homo sapiens
gatgaatgaatacgcaacatgtgacatgtacaggtgctcctcgaggctgactgtacctacaatggaatatgattcagccttcagaaggagggaatttgaacccatgctacaccatggatgaccttgaagacattatactaagtgaaataagccactcacaaaaggacaaatactgcatgactccatattctggctgtggaaacaacacaaatgagaatcaacagtacttagggaacaactgggtactggatgggacagtgcggagcggggatagtggggcttttgatagatggccgacctggggcagggcaattccggagcagagggctctgactccctgtgaaggaaggaccctggctggaggatccccacctatgctccaaggtggtagccctgggcctatgaggggaccatcacgatgtgggaatgggatgcagggagtggagctgaaagcccaccagagacaaacccgactaactacccttcagttttgcccaagacgctgttcacttcaactcatccattcatggaagtaactttcctgccaagctctcttcctctggtgatggtggagattctatacactttcttcatggtctctcagccagcggcagcttctgggcccaccttgcttca

SEQ ID NO: 477391 - DNA, 1902 bp, Homo sapiens
gcagacgcctaaagggcggatgacgactgagccctttcctgtgctcccagaaggcactgggacaggcgcatggtctcatttaattcatgcaaacatcccataatgatccccatcttacaaaggtggaaagtgaccctcagaggagtcaacaaccccactgggggcaggggtgagggctgcataaaggttagctccattgtctcccagatctcaaggaggtcaggactggagatgaagccggacccccaggagggtggaatcccacagcgaccaagcccagagctcacgggtgtgcccagcagcacgggaacatgtctctgggaacggccgtaaccctgggtctggaaggctttgagggaggtgtccattcagcccgggctctgagaaaaagggtgtcattggcgccacctggcacccagccactgaacttcatagcgcctatgcccccaatgaggaacatggacagggctttcccaggaagctttctaggaccccgctgcctgctgttcttgggagaacacactggttctgtgcatggcactctgtgcctaaaacagcatgaggacaaggccaggaggccacagcaaggctgtaatcagaacccacaaggattgcatggagatgctgcagtgccgccaccacccaacggccggagcccccagcaaagctggaacatgaatgtgattgctggaactgaagcagccatgttggactctgaggtgaaagcctcatgcgcaggagagcagggcacagacaggaagaggggccatgtggccatgtcctccagctgccatgtgcctagcacatcccagatgtgcctggttggccccctccctccagctggctcctacatgtggctgctcgcaactctttcccctggcaattacatccccaccccacccaaacaccttggcccccacagtcctacttatccccatctccatgccttcctgacacctcgaaggaccttgctcccaagcagacttttactgagtgctggtatcagcgattagttgggtatttccagatgcattttcccatggagtcttcaccacaaccctgagagatgggcattacaatcctattttgcacaagggaaaaatgacccagtttaccagtacggggaacagtctattcagtcattcattcaacagatatttaataaatacctacaacttgccaggctgtatgagaaactcgacacagtgacggagctgggttttgaactccaaacccagtgctttgcctgtcatatctggccccagtctcaggtattcctttctctcacacacaactctacaactgagtcactgtccagcacaaaccctgttgagcacacttagttcaatcagcccatggccacttccccatcagattgccagatgtttgaggacaggaactgtttttgtcttcgcatctccaaattcgtctgacagcaagtccctcaataaaggagcattgagggaaattgagctggcttgctggatatacagatccttccttgggaagccaggcaccgaaaccatgccctggttctttagcggcacttaaagcggaacattgcatttgaaacccctcctttctatgaggcacttagagtactttctagatcatgggtaattaatccatgacacaccctgggaggagtgggaacaggagcaagaaatgctgctctcattttgctgatagagaaattcagcacagagcctgtcctggtgtcgtacaggaagccagcagaagaccaaggaggtggattctcctcctccctctgtgtcccatccatcctgtcctccggatcctgctgtgcctccagggcggaaagagccgctctgaccgacagggactgctgtgcacagccctgatgcctggatgcagagctctgacccagatttcccaaggccc

SEQ ID NO: 477392 - DNA, 718 bp, Homo sapiens
gtaattgacatggaaactatacctcttaatctccaacaggcaaaacaactcctgctgccatgtgcaagatctgtggctccagctgtaattacttcctccatgcctttttattgttgttgtcccaagaaacagttcgtggaaatgaatgtgccaccctaacttccacagagtcacctccattgctgagtgtcttaggtgctcaaatcttgacccctgggagcagaggccagcaccatggtaaaccagacaagaggacacggacccatgtgctagactcaactgtgggagttttgcgttccagctaccaatggggaatggacccaggtctctctgatggtgtgggtgatcatgtggccccctcattctccccttcccactgctcactctggggttcagtagaagtagtatatggaggttaccctatcacaagctcagccacgcttctctccaacctcacacgcagcccaccccaccaggatccaagctggctgggtcgcataacactagccaccattcactgatgtgatccaaatgcctagaacaatccctggcacatagcaggtgcttaataagtagtcgctgtatacgtgtacctattgaactcttcctatgcgcccgacactatgctgaaagctttacaattattattccatttatttttcacaagaatcttgtgaggtaaatatcaactcattttcagatgaggaaatcaaagctc

SEQ ID NO: 477393 - DNA, 528 bp, Homo sapiens
ctgactccttgctgtacttcccctgatggcgattgcctctctgccagccagcttggatgccctcccttctaaagtcaagggtccagtgattcctcatctgtatcattctgagtgtaccagcaagaagggccagcaagaagtgccaccaagatggcaaggctttatggcaagggggattggggcgctgcagaatgatatcattgaggctcaggtgaagggttgcaaggagctgcttcagggtagcaactataaaatccgaaagttgagcaaggtgggaagatctagaggacaaaagaaaaagactgaaagacactgcagtataattcaaggcgctaaacagatgagactggcacgtgtcagaagcagcagtgaccttgtgcgcgtcttaccatccctgctccatttagacatttatacaatggttgcaagaggaaggctgatcaggcaaagtctaattggggagctgaagaacctctttattctcctcgtcctccttctaccactcttctccttttttctcctttgact

SEQ ID NO: 477394 - DNA, 1323 bp, Homo sapiens
agcctgcaataagatggttcaggaaacacaaccagaaccggtctcattcggtacccagcagctacgtgcatacaagtccagagacatgtaatggggtggagggaccacgctaggaatctggaggtcacacatccagaagttcacaaggggcccaaatgtgacagggggagctatcagaaggcgggaggtgacttcttgccagggagcaagccagggcaagaagagaggcgccgtgaagcctgcgttccctcccgcacgcggcttgcctcggtggccacacggggagctcagcaaggcccagggttcgggaggcgggtcctgcacagcgacgcagccttgtcccggtggccgcaggcctggggagcagggcgcagcacacccgccgcccgcttgcaggcgagacgagagcggggcgccgggatgctggcgtccaatttaaccaccagggcgcacgggacggaggccgggggtcccgcttttccgtcagagttcgcgggcgcgtctgcgcctccggccgccgcggctcccggggcctccgcctgcagccggcggcggaacgagggcaggcggctgagacaggcgagctatttgcattccccggcagtcatttttatatgcggaggtaatgaagttgtcagcggcgccccgagtgtggcagagcctgatattcaaatcgccctgcccgctccgcctgctcccgcccgctggtcccgggagccccaggctgcgcgcgcccgcaccgcatcgccgctttgccccgcgaccgcgcgcgcctcctcgtcctcccccgcgcctttgtttccgtctccttctcctttccctcctcttttgtgtcgggccagactcagccccagaaaccagccaccctgccgcgtccgactgccagggatccctcacgccgcgagaaacccaacacacagctattctgtcaggctgccgagaaaaggctgttcggcagttgcagccctggtgaggcaatgaggaggaaaggtggacgcacctgcctggagtggttgaaggaaggcagtgaacatccacgctcctggggttggttttcctgaacctctgtagctgtgctgctcactggggcagccactgaccacaagaggctgccgagggcttgcagtgtggccaggccagaccaggatgttctccaagtgggaaatacacaccccattgtaaagaagactgtatggaaaaaagaatgtgaactggctcattcatcatttaaaaacattgattgcatattgaaatgataatattttgggtatatggggtgaaataaagtatcatgaattaaatctttttttaaaaatgtggcca

SEQ ID NO: 477395 - DNA, 721 bp, Homo sapiens
aagagaacagaagcctttgcatgaatgttgaatattggctccaactttcttctggcttgtagcgtttctgctgagagatctgctgttagtctgatgggcttccctttgtgggtaacccgacctttctctctggctgcccttaacattttttccttcatttcaactttggtgaatctgacaattatgtgtcttgaggttgctcttctcgaggagtatctttgtggcgttctctgtatttcctgaatttgaatgttggcctgccttgctagctcagagaagtttgttattactgatcgtctagagccttcttctctcaactcgtcaaagtcattctccatccagctttgttccattgctggtgaggagctgctttcctttggaggagaagaggaccctcagctgcaggtctgttggagtttgctggacgtccactccagaccctgtttgcctgggtatcaccagcggaggctgcagaacagcaaatgttgctgcctggtccttcctctggaagcttcttctcagaggagcacccagctgtatgaggtgtcagtcggcccctactgggaagtatctcccacttccttacgatgggttcaaacgtcctcttttagctcggagaagtttgttattaccgaccttctgaagcctacttctgtcaacttctcaaagtcattctccgtctagctttgttccgttgctggcaaggagctgtgaacctttc

SEQ ID NO: 477396 - DNA, 490 bp, Homo sapiens
tcctatttcttgagctggctggcgttccacctttttctcctccgttcagaggttctaactaaatgccacttctctctcagatagccctttcttttaagtcagcccagatctcccctgtgcctaccaccaccccaccccacacagtagagtctcatgccctggattctcttctggatctggtcatctcatggcaggctgcacacatggcttattgggagacacaggaaagttgtgaactgcctcgtgcaaattcttcaaggcccatcccacacaccctggccttcctagcccacaaggatctctccctgcctctgcctatctacacactttattggagtattccttggtattgctatttatctttgctcagcgcgggctacgttgccagtcttcgttataatttccctgagggcaaaccctgtccagtatcctgtgtgcccatattgtgcctatccagtgctgggcagtcaatatttatgtgttgagcaaa

SEQ ID NO: 477397 - DNA, 1115 bp, Homo sapiens
tggccagccatgctcgtgatgtggagcaagagtccacgacttccagaggagccaccaaggaggaatgatgcccatggcctgctgagccaagttgctcagtctgctctagtaaaaggatcaccaagctgtggattaaaaggtgaacttttgcctacacctttcaacccacagcttgtggcaaaagggccctcaactcaagagcagttccgtgagaagggctcacttattcctagacgagccaaaccgcaccctgctgtgtatggcttctcggaatttctggagccaggaccaggaacccagatgtttgacaagtatccaggtgaagtatccagcatactgaagtcggaggcccggagaggctggcccacctgtgtcaaactcaaatcaactacagctgcccgtgagctagatgaggccccattgactgttggctcagaacagcagcttcacagaaagaggcagcagatgccatttagctctggcttgtctagcctgggttgccagtgcctgctcccagttgctcagtcctgaagcctggtgcactctaatctttgttccttccagtgattattctgtaacttgatccctcaaagacgcctcagatgacactaatgagcagcttaaaaaactggaaattcttgaatcaaagcacaagattctacccaaggtgccttcccctgttaggaatgagacaatcattttgtaaaaatattaatttaaaaaatttgtttagagatgtcctttgaaatgaagcttccatacttttcatactttggaatttttcaaaaatattcgtcttgaaggaagtcttgttaaaatctaaaggaccgagaaacatattttagttctaaggtgtttttatagagactctgatagcaaatgaatggaaagaaatactgctttatgcactacggaaatgcaatgattatcctgctgccaacatggcatcaatatcaggtggcatataaaagctttcccaaaccatgattgccttattaatcaattcataaaactgatcaggaaagtgttagggtatctattaatgtagtagttaggaaataaatctaaaccctacctttctctgataagtaggttttaaaaaaggaatgaggatg

SEQ ID NO: 477398 - DNA, 824 bp, Homo sapiens
agtattaagatgggggaatttggaataggcttcattgagaacataaacttagcagaaggcacatttaagcaaagtcctgaagaaggtgagggagcgggccaagtagatacctggggcagaggacactgcctcggtgttggctatgagttgagttgtgccatccctcaaaaaagatatgttgaagtcctaacctccagcacctgtgaatgcaaccttatttggaaacaaggactttgcagatgtagtcaagaggaggtcacgagcgtgggccctcatccaatggctggcgtccttctgagaagagggaaatctggacacagatacccagggagaaggccgtgtggagatgcaaagacacacagagggaagaggccatgggaagatggatacagagactggagtgatgctgcctcagccaaggaacgcctgggcttccagaagctgggagaagcagggcagggtcctcccacagaggcttcagagggcacgtggcctgccaacaccttgacttccaacttctggcttccagaactactaatccggtgttcaggacacagaaggagtccatgtggcctggaggagagtggcaggggtgaagtgaggagtggagcaggaagcctttgggaggaagttgagggcccacgagggatccagctggccaaggggacttggcacttggatcattcaagcagcatgaaacaaaccaacaacacattacagacactgaataagtaaaccaccattgtttacaccgcccaagtgaagcactaagcaaccctaggccctctgattgggcattaggatgctatttttaaaataatttc

SEQ ID NO: 477399 - DNA, 1099 bp, Homo sapiens
aagactttgagcagcagcaggtcaggaaaaaagccatctccataacatgaaagtacaaagcaaaacagcaagtgctggtgtagaagctgcagcaagttcccccgaagatctatctacaaccattgatgaaggtggctacaccaaacagcagattttccatataggggcttttcccccttttgctcggcacttcttgcagccgccttgtggagaaggaagtgtttgctcctccttctgctgtgatttaagtttcctaaggcctccccagctctacggaactcttattgctcttgctggtggtgagagttcaatgcacagcattctgaatgtcacttccatgaggcaggtcacctctcctagcattccctcctcgcagcaagtgcaccccacactctgccccagcagctgtgctggagaaaccacctctccagaggcagcctcacctcctccataccttcagcaaacaaaggccctcctgattaccagggactgccctcctgaaaatgaggctaaaggcctggcctttccacaacttcctggaggttgtgcttctggaccagaccacttctcagtacatctgcatgatttctagaatcagattttgaatccatggcttaagaaaagaaaattcctttgactaaacttttggaggaaattgaaatatatactgcttttaaaatgcactttacacatgtgaacccattttatggacataccaagataacactggaatgatagctacattgcaagtcaacatttcagagaaatatgagaacggggtggtgcatggcacttacttcttgaatcctaggcttgcaatagttctgtctggattgtgattccaaccaagaaatgtcttcgttggttgcaaggtcaaggtgaggaagaatcataaatctacacagggaaataatatatgctggaaggaaggaagaagaaaggaaaggaggcaaggaaggaaggagggagagagagagggagagagaaagaccttagaaaaacatctgagcaaagttttaccactttattttcttaatctaatagtgagcaaaccccacaagcacagatataaagcagaactagtgtgagagccagtacc

SEQ ID NO: 477400 - DNA, 581 bp, Homo sapiens
caggtcttctcctttgaagaaacatctctctctaatctaaatgggttttctgcgatgtcacagagctacataataggagaatccaaattcaaggccaggtctcctgactcccagtctaagcccttcccaaacctgggccacaccacctgtttcagtggaggtgtctattgtgtaggcccagaggcaaacacagctatcctggatgtggatgagggcacagcaagccagccagtctcactcactgtggaagagtcatcggagagcttcatatacagcgaacacaacctcagagatactttggagctttctgggtgggggagaaagacgtggcaaaagcagctgaaggattcagggttaacactttgccttttgaagagacttcagttcttggagggcttccagtctgaatttggggaattcatcaacaggaaaacaaatagctggcaggctctgtatttactctgcccttctcaaggttgcaacataaatctcccaacttggaaagcattaaggccgaggagacattttgtgagttcagggactctcctccagtctgcatgaaccacgtctaccctcatttc

SEQ ID NO: 477401 - DNA, 825 bp, Homo sapiens
gctcatacacgctcatacacatgccgacattctataggaagcatgggtcgagggctcaccacctgcagccagaggactgcgtcaggactgtagatacaaggaggtccatgcaccgaaggagcttggggcacgggcagagcttctcagaggggtgtgggtatcaaccctatggtgttttggaaatttggactgacctgtctgtgtgcctattgtggggagagcccaaggtgaagggtaaagacaaagtgggggaaccgccaggggaggctttctacagtgcctggggcctgagctcaggcatggaggacacaggtgttgtccgcatccccgaaagttccaggaaggagacagtgtttgctgagtggtgggctttagatattcagcagtgtggttggcttttatgggctgagaatgtgtgtgagtgtgagcgcatgcgtgctcgtgcatgctggtgttgggcctggggcactgtgttgtttgaaaggcgcagggaacagacactttgtactcagatgcatcaatttccaacggcagcagaatgctgtttctggttgaaagagaaagaagaaagcgaaatcttcatttcagcttaggaatggggtccacatgtttagctcaaagtgagtggaaatctctgaaaagcaggtttgggctaatgaatgtcagcaggccttcaatgtaaatgggatttgattagcaggaaggagtgtggttgggatgtttccattaccaaagaatgatatagaggggcaaggcttgtcttaaggggatgaagaaggtccctccaactgcccaagtagatccttttccagtaggctttcagac

SEQ ID NO: 477402 - DNA, 2989 bp, Homo sapiens
cccagaggaaactggggtttgctcactgcaaacagccaaaagatcttcaagagagaacgtcttttacatgcatcgttggattgcagtctcaagcctgggattccaacggaattaacgtccattgaaaacttactgtgctcaaggcacagaacggggtagttttatacacattctcccatttggatttttcaaagacaacatctaatcatccccagagaaatttcagctgagaagacaggatgatgaagtgccctgggggccagagtccagacaagtattttggcacctccaaggactcgcagaacacagagaggaaaagagagaccctgttatctttccgcaggggtggccgttcaaactctcagagatggaagttaagatttcctttggtataagtggcagtttgactggctgcaaggagagcctcagtttgtttaatttggagtaaaattttatgagttaatctctagtgagggaaagcagcagtaaacacagaacatactgagatgacaacaggtccatttttcatgcgcttatcctcacttgactttctcagtccaccaggattgacacatagtgaggttggtcttggttggggcatttggaaagtcttgatcatctctacttttaaatatcactatgtctcctgggcactgacttcaatgtggtggagaaagggagggcaaagcttacaccatgagaatgttttccctggagggccagtagggacggcatttagagttggtcatcagttattcctaccaagagaatacaacgggggtgctgagaagtggggaagtgaagcagtgattcagagaccaccagggcccttaagaagattaatttgtatgagatcacagaagcctcagagatctccacttccaatgactggcaaagtatggtacaaattaaacagctctggtggtgtacagggaactgccaacattttcttttctggtgcttttatcttcaaagggcaaaattggccctaaccatatgttttttatacatcttgatgacattgaatttttaagttaatttagggagaatttataccctaacaatgttgagtcttctaatgcatgaaaatgacttattccttaatttatttaagtctttcaaaatttccctcagcaatgctttgtagtttctggtatatagattttgcacatttttgttaggcttgttcctaggtattttatgatttttgatactattatatttggtgttttaaaaatttcattttgtaattattttcagtaattatgcaattactttttgtatccaacaatcttaagttaccttaataaattgaatagtctatagtttcatttggattctctatgtgcacttaattatctcctctatgaataatgttttacttttttctttcaaatcttttacttttatttatttttcttggcttattttctgggtaagagctctgctataatattgaatagaagagattcaggagtattttcttgtattgttctcagtctcaggggagagtgttagatgagttttatcggcatcttttatcgaattaaaggtttctttgctattcttaatttgctaaaagtttttttaagtcatgaacagttgttgaattttatcaaatgtgttgtctgtgtctattaagatgaatgaacagattttctcctttattatgttatgtggtgaattactttaatttatttagtatgttaagccaactttgcattcctggaataaatcccatttggtcataatgtattaatttttggctgtattattggattcaatgcattaatatcttgcttaggatttttgcatctataatcttcctttcttatatcagattctgatatcaatgttatgctcctcagaaaaaaaactaggaagggtttcttctttctctattctttgggaagatttgcacaaaaattcacaaatgaaaccatatgggtacacggctttctttgtggatgtctttaaattatgattccaatttcttgaacagctttaagagtattcacatattctatctctttctgagtcaattgtaaatagttttcttccagaattcattcatttcatttaaaatttcaaatttattgttgtaaagttctttataacatcctcttaatatgttttcagtgtctgtaagatgtgtagtgaggtcctgtttttcatctttggacttagttacctgtgttttctctttttctaaatttaccttgctgggaatttgtaaaccttgctaattttttcaaactaccaaacatttgtgtttgttgatttttctccattgcgtatttattttatatttcattagtgtctgggcttaactttatcatagctattttaacatttttacttgtgcttaatttgctactttttccataagctttttgagacagcaatgtattaatcttcagcctttaaaaactttaacaatatatgtatttacctaatttaaaaaatatttttaatacctgcatttagttctaggaatattcctgtaggcactgctttagcagcattccacaagccttgatatgttgcattttcacttggttcagaatattttctaatttctatttctattccttcaatgacctgtgggatatttaaatgtgtgttgcttaatgtctaaatgtttggttatttcttatctatctttcttatattgatttctcattcaatgctactatgatcaaagaaggtattttaatttaaattgtttgaaatttgttgagacttattttatggacaagtttatggtttattttggtaactgttttataatcactgggaaagcatgtgggttctccagatgttgggtgggctgttctaaatatgccagttaggtcaagttgactaatcatgttgttccaaccatctttattttttgctgatcttttatctgcatgttctatcagtactgagagaggtgtattaaggttggtgctactctgtccagctgcagaggcttgcctgactttac

SEQ ID NO: 477403 - DNA, 849 bp, Homo sapiens
gacatcaagcccatttggccagaaatacctctagaggtggaactggcccagaagactggacccccagagtgctatggaatgtctatgggaacaaaggaggacctaatggacagcagagaaacacgatgcccagctctggtctgctgccaaggtgatgctgatgctgctggcctggggaccacagaacagatagccccaagagttccctacactcagaggggaacagatgttgctgagagaggaccaggcccaatgaggcattcaactggtagtatctgcggcgatgaaaacatcaaggaggttatcgtagtatgcctctgtgtgggggctctgcacaaggggactaactgggactatgatgaagtcgtaggtcacttagaaaatgttggtgaaacaaatcgaaatattgtggccaaatcgcagctgtgtaagagagcaggagacatatgtgaccgattttcatggttagctgagaggcacaccatcgcctggggtgagaggcttcagtcatgcatgggtgaaaatgatctccctccatctctggccgacgggcagcttgctgttgattatgtattaatttcaagtggtcatgcccctgttcaggagcacagagttccagtgaagaacctaaagcacaaacactgacagctgtaagtcaatcattttggttattctgacactttctgtataccatgtccttcaaagttatttttgttttatcaagagatttctttgtgtggctaacagaaaatggtgcataattgtaacaataatgaagttttatagatctttgcacatgggcatatgtgacattttagaaattcataacattctgaggaacatattggc

SEQ ID NO: 477404 - DNA, 781 bp, Homo sapiens
agcagctgctcacgctgggaggcgagggctgctggctttggtgttttgtttcttgggcaggtgcaggatccagaaaggagaggttgagagaaagctcaagtgtgggtgggactccctggagaaaagccgcctgaggaatgcagggacctgggtcccgcatcatcaatcgcctattgagaaggggtcccagatctaagatgctctctgggagggcttggctttcagaaaagacaagttctagaaagagatttgattgttgtttgagggaaggagtacggtacctcaaggtgagtgagctcagagtgattccaagtgactgggttggaaagcacaaagctggggtggatgaagaggagggtgatgttatcagaacggccagactttctgaagaaacaaacctggcagcaaggtgggaggtctcaaactggttggagatctgcaaaacaattctgctggtaactagctcactgacggaggttgaaaacaagatgtgtgtcacatatatcaagctctttcagacatgtgttgggggaagtgagagacttaagagagtcaagcccaagcaatattattaatattctccatcatcaaatgttggacccaggccagagagcgttttctgtaataaatttttttccttggattttatcctgtgagatacataaagtttaaggctgtcagtggagaagcattctgtaaaccaggaacaactgacattttggtctttagaagctaagtagggtatggctccaatatgagaggggtggaaattatttttatt

SEQ ID NO: 477405 - DNA, 848 bp, Homo sapiens
tatcatagtaaatcagaaaacaatgttaatagcaccaaaaattgctttatatggcagcaactgtatttattcaccatatgtattactaataaaatacagagaaggtgaagtcacacaacatgctgtctgcaagctgaggacccaggaaggcagtctgagtccaaaaacctcaaaagtagggaagctgacagtgcagccttcagtctgtggccgaaggcccgagagcccctggaaagtcactggtgtgtgtccggaattggttcctgctggtgggttcttcgtctcactgacttcaagaatgaagctgcggaccttcgcggtgttacagttcttaaaggcgtgtcccgagtttgttccttcagatgttcagatgtgtccagaatttcttccttcaggtgggttcatggtcttactgacttcaggaatgaagctgcagaccttcgcagtgagtgttacagctcataaaggcaatgtggactcagagggagcagcagtaagctttatggcaaacagtgaaagagcaaagctgccaaagcttcaaagtggatcgttgagcactgttgccactgctggctcccctggcctacttttcttcccttatttggccccacccacatcctgctgattggtccattttacagagtgctgattggtccattttacagagtgctgattggtctgttttacagagtgcagattggtccgttttacagagtgcggattggtccgttttacagagtgcggattggtccattttacagagtgctgattggtccatttttacagagtgctgattggtgcgtttacaaccctttagctagacagaaaagttctccaggtccctaccc

SEQ ID NO: 477406 - DNA, 681 bp, Homo sapiens
ctacagaccgtgcacgtggataggctctgccctgccctgcgcagagcaggaagagtgcagggaggattcgtgagatgccagttctgataactttcagatgtggagggagggtcctcggaggggcacctgttagaagggacagcaggacaggctggtggggcagtcatgtcagcagggcacacaggaaatcacgtggccccagaattcagtgcccggcacttggcccacactgccccaagacaaagcatcctaccctacactgttctattgtgtgaagtgcagtttcttagctgggaggaggaggaggagagaggagccgcccctgggcacaaatatcaattaagatcactaactggggagtcccagttctgcgtccccatagctccctcttttacattgatgggtctgcctgaagtagcagaaggtgagaccaagcattgcccgctggcattaccttatcccccaaccccccaaacccttttcccctacacttctctcccaacccctcctccttgccctggcatagtgatggaaccatcacctgccgaaacccagaaggaggcctcttgtttagcactggcaaggagcagatgaccttccctaggatgaagaagggcagccctggctccgaaatgtgactggcactttgccctgcagagaatgcacctgtgaggctggttt

SEQ ID NO: 477407 - DNA, 807 bp, Homo sapiens
gctcactccttataccagagccatctgggagaagacttacccatttcttttccgatcctctaattggaactgctgactgactcttatgtacctgaagcttcctgaaattaaagccttcattcttgggcaaatccagcataatggaaccattgagcaacaggggcagcaagttcccaaagtcctggtcaggtcaaagataccatccaggagccagggcctggaattggaaaccttagaagtctacctggtgctctattctactgtggctgatctggcactcaagccacaaaacagtcctttccacttttctctcttcttttcacaaacagaggagtctcttcccatagcaaccaccatcccaggcctgcacaagatggaagtcattgatgatattgacaagcaggggtctggtgaggtggtggagtcccggttctggcagcagcctcttggtgcctatattgcccatctccctgctgagagtgtaacatatttacggcctttgcagactgctggctgctggcgccttctcttgcccgtggcctgcctgccaactgcttatcagtctcccccaaaggtgacatcctcctcatttgtttagaagcactgtaggtgattctatatgagggatcaggaggggtctttggatcatactttgagaaacgatttcccaacctgggagctcctggggagagtggcctcctttatcccgttacctccagtcacctgcagagtgctctagcacacagtaggtgctcaatcagtatgaggggtggttgaccaaaataaaagtgaatatttagatgctga

SEQ ID NO: 477408 - DNA, 622 bp, Homo sapiens
tcctgcattagctattactatgttattattcctgtggaagtaatgcctctttattctggattagcttcatggagacataaggcatctctctcatcgccagtgctctgtcccacacgcagttttctccgtggagtctcagctcgatttcctctccacaaggaatcccttggactctctcttggtcacatattttctgtgccatcacctagagaccctctcaatgcgggaagctgtggcactcataagactcacctcttttttacctaccttgcagggaaggctgtcctttatttttcagcacccgctgccttaaaaaccactgtttcatctattttgcctttattgagggagggcattgctccaggcagcagtttgttttttgaggaaaccagtctttgcttcatagtgttttccatactcctgactgtgctgaccccaccagcatatttctctatcctctatatttcctgcaaaatgttaatgggtctagaaacttgatcaggtccaggatccatgcgctttttaatgcgctttatgaactctttatatttgagataattatggttaaaactcctaaggaagccacagaaaaggattattgttagataatttgctgaaatga

SEQ ID NO: 477409 - DNA, 821 bp, Homo sapiens
tctgtatgggcctcttccctgttctcctgaaggtagaccatgactgcctttatgagcacctctacgcctgaggagtggatgaggcgcagctgtttgcataggctgaaaacagagcttggatgtgtgaactggggtgtcctgcaggtcccccacagttcagggaggatctggggatgggatgagaaggggcctccacgtgtggtcctgggaggtggaagctgtacttcaggggtccccaacccccagagctgtggacctgtaatggtccgtggcctgttaggaaccgggctgcacagcaggagagccatagatatctcagctgttacagccccagtctcagggtcaagggccagtagctcatcatctgaatcaggctcaggtgctgcagctgacactcttcagcttcagatcctcatttacatcttcttgaggactgctcctcatctcaagatctgtgaactaaagtgacaagttgtttgccttccacaaacccagcatattttgatttctacggacttggtaatgctagtgagtcacagagggtaagccttagagagccatatttgcaaagtgcctaagatctctcagactctaccctaggggactctaggtagtgtcacaagtgagttttaacagcagagtctggtggcgccttctcaactgcttttatgcaggaagctgtctgcaactatgttcctaactacccaagccccctaacattgtaatttctaagattggctttagtcattttataagataatggcattcaaactggtctccagtaggatatgagacaatgttaataattacaatctgcattt

SEQ ID NO: 477410 - DNA, 1219 bp, Homo sapiens
gcagttcaccgtcaggactgcaggaagcctgggaggacgccatggagacctgcaggtctctgaggcagggtgatggtgtgtcagaagcagcaggccagcagagcaccaagaagggggtgccctctccccacgccctcacgcagccctcaacactgtgtgggcaagtgggaattcagccagacatcagtgtcaatctcagagatacaaggaaagaggatgaagaaaatctgaactgtaactcagttctaaaaccagatgcccgggaagttgctggatctgactcggtctacctgaaaatagcgaatttgagctttccgcaatggtctgagaaagctcaagatgaaaaatcagagctccccaaagcagaggacctcaggaaagccacctatgtactgtgcccttgggagttctgtgatgacaatgatgatcatgtccacataggtagtggccatccacctccactcctcaggcccttcctcaggactgtccagccatggtgatttgcctgttcagtagccactgtcctccacaaccagatttttgtcagaaaatatctatattctcacattgtctgttgagggacagaggtggcagtttggaagattgattggcaagttctaagagatggtcaatgaagcaattatagcggaagatgttgtctgcatgtgaaagtgctttctgtaaagcagtacatgcagatcagccattggctgctgcttctatgttcctcctattattattaaccacacttttagagtaggagaaagatagcagagctgaagagccagaggactggcatccgttcttgaaactctgctaactggtttgtgagttgggcacgtcatttaaactgtcttcttatctagaaaatgcaaagctcgtgtagctttgcatttagaagatctctgtggtccttccttgcttttatctagttgcttgaggaaaccccatgagtataatcaactagatgtccagaaaacttctaattactggcagctctattaggagcccagaggacaaagagttttcttatttttaatatagtagagactttaaatccagggtatggagggcccacaggagcacaaagagctgtttaaaagtccaactgcttgagttggaacttatttgagaatgcaggtttaaatgtacaaacactcatacacatacacacatacacaaacagaagaatctcatagtaagatataataagcttctg

SEQ ID NO: 477411 - DNA, 499 bp, Homo sapiens
ttgtcttccttggcgtttagaaatatgacttggggcaggagggtagggagtggcggcgggggaaggatgagtctggcaacccacagagcagccatgtggaagagacctctggaattccaaagctccaacagagatccagtgcagcatggggagcctccagaagggttgctttatccaaatctgcatcccgcttctggagtctttacagacaaaactcatttttgtctaagtcaaagctctgagcccctgtctgaatgggagactagagtgagcattagaatgaccccctgctaccatgcaagagctcagtcactttattcttcaaaagaccctgtggaaatgcaaacagcttgggagaggttgtaccataaacacgacagacagacagacatctcttctcaagaggaactcctgtcccatttgagaggctgcccaccaccacagtcccctgggtgctggcccctgctctttccctccgactgccacctgacgtaatgag

SEQ ID NO: 477412 - DNA, 854 bp, Homo sapiens
agaagaaatttttaagcagcaaagcattcaagatgtgacttgggtgctgttaaaggcattcagttttatgagggaagcagagcttaaaagtttggaaattttgcagcctgacaatgcgatagaaaggaaaatcccattttctgaggagaaattcaagacagctgcagaaatttacataagtaacaaggagctgaatgttaatcaccaagacaatggggtaaatgtcaccagggcatgtcagagacctctgtggaagccactcccatcacaggcccagaggtttaggaggaagaaacggcttcatgggccaggccctgggtccctctcttgtgtgcagcctagggacttggtgccctgcatcccagccgctctagctttgattaaaaggggccaaggtacagctcgggctattgcttcagagagtggaagccccaagccttgccagctttcatgtggtgttgagcctgcggctgcacagaagtcaagaattgagcaccatgcacctggaaaagccacaggcactcaatgccagcccatgaaagcatccaggatggaagctgtaccctgcaaagccacaggaatggagctgcccaagatcatgggaacccacctcttgcatgagcgtgacctggatgtgagacatggagtcaaaggagatcattttggagttttaagatttgactaccctgctggatttcagacttgcatggggcctgtagcacctgcattttggccaatttatcccattggaacagctgtatttacccaatgcctatacccccattgtatctaggaagtaactaacttgcttttgattttacaggctcataggcagaagggatttgccttgtctc

SEQ ID NO: 477413 - DNA, 831 bp, Homo sapiens
tccacactgcttttatgagctgtaacactcactcttcactcctgagccagcgagaccacgaacccaccagaaggaagaaactccgaacacatctgaacatcagaaggaacgaactccagacgcgccaccttaggagctgtaaccctcaccgtgaggtttggaatctggatgcagcttatgtagatgcctcttcctcaagggagttcactcacaaggctgcaatcaatgtgttgagcagagctgaagtctcatctgaaggcttgactggaggagagcacatgattgcttccatattcactcatgtggttgttggtggaagtcagatcctcggggattgttgggctgagacttccctcagttttttgccatgtgagcatctccatagggtagacagcaacatttcagctagcctccctcagaataagtgggtgagagagttttctgccaaaccaacaagggatatggactgtctggcagagtcactaggacaaaggattaaaggaagaaaaaaggatccagatgtttccattggggtaattgaattttcagacacatctaatttagatgagctgtatccatggacaagtatgtcatcaggcactacgggataaattgccaaataaattgtataatgagttgaaaggtaggtagagggagaaatcacattaggatggcaaaggaggtttccttcattccttttagcagtgttttagagttctcagagtgtaaattttgtacttcttttgttgaatttattcctaaatattttattctttgtgatgttactataaattaggttactttcttaattttatttttagatttttcatt

SEQ ID NO: 477414 - DNA, 1427 bp, Homo sapiens
cagggccattctaagggtcctgcaagaatgtgtaagagttttaaatgctaccaaactggaaggagtatttgcaaaaccatgcctggcttggctggatggtcacgagatggagtgagttgcttggcaaagcatccaaagatcctggctactctcctttctaggggatgtgatggagcagttagaatttggaacctgactcagctgaaatgtatccgtataatacaagcacatgaaggttttgtacagggaatacgtgctcacttttgtgggacttcttttttcactgttggtgatgacaaaactgtgaagcagtggaaaatggatgggccaggctacggagaggaggaagggccattacatacaatattaggaaagacagtgtatactgggattgatcatcactggaaagaagctgtttttgccacatgtggacagcaagtagacatttgggatgaacaaataactaatcctataagttcaatgacctggagatttgacagtataagtagtggtaaatttaatgcaattgagacatttatcttgggaagttgtgcttccgacaggactacagtactgtatgatatgaggcaagctactcctctgaaaaagcgatgttgtcctgaggaattgactaacaagaagtttttggaaatggaacaggaatgcatggctgaagaagagagtgaccctcctcaagaagaaccacaagcaggaccttcaggaggaattccagaagaaggcactgttatcataggagatgacagctccatgcatgttactgcccctgaagaccttccactgggacaagttgaggaggtggaagacagtgacattgatgatcaggaagctgtgtatgcctaggctaaagtgcatgtttttgtgttagtttttaacagaaaagtttaagaaatagaaaataaaaatttaaaagtggaaaatttgaaaaaagctgatagaataaggatataaagaaagaaaatacaatgtgttcctgttttaagctaagtgtatttcaaagtttaaaaaagtttataaagttaaaaagttacagtaagctaatttattattgaagaaggaaaatatttttaaaataaatttcccattgcctaagtgtccagggtttataatctctacagtactctacagtaatgtcctaggtcttcacatttgttcaacactcactcaccgactcacccagagcaacttccagtcctgcaagctttacctatggtaactgccctatataggtgtaagctgttccttagcctttaactttcaaattagaaatgtttatttagagtagcaatggaaaatagaagataagttagcaaagccagcagaagttggagaactcataaacaataaaatatcagaaaagtgttacccaaaatgcaacattgaaaaaaggtaacattaaaaaaaatctc

SEQ ID NO: 477415 - DNA, 656 bp, Homo sapiens
agcagctgccctgtgtgaagctatgccccttgatacaattccctctcctgtggaaaattttgagaagcaccacagcagccaagagaacacattggcacttgtttggaaaggggtctgttgttctaaatgctgtacctcctctggtctccaggattcttcatttgaaaatgacaactattctgtgataaagaaagtcaagtttacccatattcactggatgtctacaactgaaccaagctctacagtgccccagtgtttatatgccaagctctacagtgccccagtgtttatatcccaggagacgaaggaaaatatgcaacagagactaagtggactttacgagaagcagaaggtgagcatagtgtctggaaatccaagtgaaaaaaaatcttttgaggaggagagagtcattgttgtgacaaatgctgctgataggtcaaggaaaataaggggcaactgattaagcaacatagagaagatgagcaaccttgaaaagaaatcttgattaggtggtagaagtagaagcctgattagattggattcaagaaagaattggtcactttatctcatttgcaagaacatgggtagatctggaggatgttatattaagtgaaataagtcaggcacagaaagacaaatactgcatgatctcactt

SEQ ID NO: 477416 - DNA, 751 bp, Homo sapiens
ctctgctgctctctgctggaatgtcgctgccaacaccactagggagagagcctgtgatcgggtaaaatgagaaagatgtcatcagaaattaaattttttaagctaacgaatgctagaaatgtcacaaaattgggttgcctttcttggtggctaggaggaatggacttgaaagagagggatggcggttggagaattagcaatgccagagaaagcttttggagcactggtcctcaaccggcaggagcatcagctggaaactggttcaaaatgcagattctaggtcctcaccccagaccaattgaatcagaaactcagggatggggtccagccatctgtttcaacaagcccccagatgatttggaagcatactcaagtttgacaacccctgatggtagaggagagtggaaccctgttgtgcatctcgacaaaaatcaaggtgatgggacagagaaggtacagacagatgaggcagtgctgggagtggaggaacatcacatgtaaaggccagggctatagatttagggacctgggtttgagtcctggttagagtgttgccttggcctttctgagctgtagtccctttttatgtaaaacgaggattttagtgcctgcctcatagagctgttgtaactattaaatgacacaaaacttatgctgttgtttatatttacttattcctggagcaaactaaatgttttatacattgtccatagaaataatgttttaatgtccctcttaaaatgcagaaacc

SEQ ID NO: 477417 - DNA, 588 bp, Homo sapiens
ctctctctcctgctgccttgcgaagaaggtgcctctttccccttccgccgtaattgcaatgatgagaccatttaagaggttatttggccaaaagaacttcgccctcatcagtgggattgatgcctttataaaagagaggggtctggaggacagtggccctcttctcacagctccactaggtggtgccccagtagggactctgtgtgggggctctgaccccacttttcccttccacaatgccctagcagaggttctccatgagagccccacccctgcagcaaacttctgcctgggcattgaggcattgccatacatcttctgcaatctactggaggttcccaaaccccaattcttgacttctgtgtactcacaggctcaacaccacgtggaagctgccaaggttttgggcttgcaccctcttaagccatggcctgagctctatgttggcccctttcagccatggctagactggctaggatgcaggacactgagtccctaggctgcacatatgtcactctattattttgcacttgggaaagcctgacaggtgaacttaccccacagtacctgagttgtctaactgatggc

SEQ ID NO: 477418 - DNA, 498 bp, Homo sapiens
acctaagttgaagattcagaattcactcaccattttcatccttcttgggcatgaaacatgtgctcagcacttggttgctgcagtgggaactgagagtcattcttgctggtcgtgctggtggcagaagttatggcaagctcccacagagcagtggcagacttgccagtgcccgtgtctgggctccagataaaggtcttgaatccaaaatatacaaagacatcttaaaactcaacagtaagaaaacaaacaacccaattataaagtgggcaaaagacctgaacgaacacctcaccaaagaagatatacagacagcaaatggcatatcaacatattcaggaccctcagctgcaggtctgttggagtttgctggaggtccactccagaccctgtttgcctgggtatcacaagcagaggctgcagaacagcaaatgttgctgcctgatccttcccctggaaacttcatctcagaggggtacctggccatatgaggtgtcagtc

SEQ ID NO: 477419 - DNA, 1691 bp, Homo sapiens
tgacaaaatcttaagacaagaatcactatttgatcatcatcaccccacggaagcatcaattttaatggccacacatggatgagagtacctttgagagagtctgggaatccagtggacaagttccagcttaccattgaagaagaaaatttgagaatagatgcattgaagaggccccacccagcacagctgagtggctgggagaggctggaagcagagaagagagatggggatttacagcaaccagggcatggaattcaaccaaaggccttggatgctactaactgctttggagacttgatcagaaaacctgcccatgagctgcttgggagaccttgcctgcagaccccttcagctggctcatgggcacccccaacactgtgtacctcactcctgcccctgactgtggctggctctgtgcatgtgcctgtgaacacaaagtacaggcctctgcagatggcttatgagcttgcacagacaaccagcctgattctgaaaaataggaagaagctatacaaacttgagcatttcagggcacggacctaggaacaagaaatggtagccttttttaatctaccatggcttgtgtgattgagagaagacatacaatcttaagtattcctcctcaagagggaacaagagatgtggagtaggcaaatccatagataagttctgagagagcctcagaaatccctagtcaggctggctggtgatggtatttctcttctgaagctagtcagtacagatttgaggaggtgattactttttccggtgtctttaaggaacaagaaaaaccaagtaaacacgatactatcagaggaatataatacttttccagtaactgactctaaagaaatggagatctacaaattgcccacaaataatttaaaataattgttttaaggaaactcagctgtgttcagcatcttttcaacacagatagacaactcaacataatcaggtaaacaaaatgagaagttaacaaagagaaattgtaaaaaagaaccaaacagaaattctggaattgaagaataggatgaatgaataaaaaaatgcaacaaaaagcatcaagagcagactagatcaagccaaaataaataaatacataaataaataaataaaagaaaaaaacatgaactcagtaacaggtcatttgaaattatccaaataataaaaaggtatgaatagcctaacttgctccttcaagagggaatgcatggatatacccatggactattgttaggagcttaaatgaatgaactggatctataaatattaacatggaaaatctcaaaaatagaatcttgcaggaagaaaatcaagtcaccctagtgggtgtgaaggggaatcccattttgattctaactcttaaactgtgctcagtgctaattttgttttcatgtgtttgttgcatcattggttgttctttttaaaaaacggacatcatttctttgttctttatttgaatactctaaacttatttgaaaatcttcatcagactatttttgataaattattttcatctggagcaaatatttgcttagtctgtcttagtattacagtttctcaaacactttggaatttcagtgtataggctgattttcagtcagatatattttattaagaccctcccctttatgggccaatattcaacattcttaaaataattttcaacccagaatttcatatccagc

SEQ ID NO: 477420 - DNA, 635 bp, Homo sapiens
tgagatcatcaaggacaacgatggtatgacctttggagcagatgaggtcaaggaactgaggagtcactatattgggaagattaattatattgacataatcaagaatcataacaggaaaaagatggggaatgagacaatgagtcaggagataaaattttcaaggaatgatggaattgttgaggcaacagtggacagtgggaaaggagaggtggccaacaactgggatgttcagtctccagaaagtaacctagccataagactggcaccagtgagagagggccagcagtgcaagtcccattgtccccaaggactctgtgacctcaactctttccatgctagaattgataccacagttgttcaagaaggatctggatggggacccttttccagtaacagatctgtaagatctttctatgggtctatttggactaaatcctaaattcttggtgggctacaagaccccagactaatgctttcaaatctttatttttaaaactgggaattgcacccgttatcctcgtattcattacttaccttatagtacactgttcacttaaatgtggtactaaaactatacatgacaatactaatgtctttgtcatacaggtctggaaatcccagcctgcattagtaca

SEQ ID NO: 477421 - DNA, 602 bp, Homo sapiens
tgaggggcatttgtcctcactgcctcaggcagctgcaatgttaaatgattgttgctgaattgtttgacaaatatgttgtggaaaaggatgctcacattaatcataagtcacttaacgatgaagatacctctgaaaaatatgtcgtcaggctattttatcatcatgcaaacatcatagagtgttcttacacaaacctagatggtacagactactgcacacctatgctagatgatatagcctactgctcccatgctgtgaagctgtacagcagggaaactcatcctgatcaggcgacctttgagcagagagcagaaggaggtgagggcagcagccatagatgtgtgggggaagaggattccaggaaagactacatagatgcattacagaaacgagttaaattccacaacacgttaactagacatgaaaaggactctgaacacttgtacatattctggaagcatcctttgcttcctgcagtaatttatatctgttactactaagctttaagtattccaagagttcattataagttcttgctttcatgtgctcttgcaaatgaaccccttaaacagatcacttcacgtccatgatgtgtgtaattc

SEQ ID NO: 477422 - DNA, 736 bp, Homo sapiens
ccaacatcaaagaccaatggtagataaatccatgaagatggggagaaaccagcataaaaatgctggaaattcgaaaaacaagaacacttctcctccaaaggatcacaactccttgacagcaagggaagaaaactggaaggagaatgagtttgatgaattgacagaagtaggcttcagcaggtggataataacaaattcctctgagctaaaggagcatgcaaggaacctaagaaccttgaaaaagaacataaatgacctgatggagctgaaaaacacagcacaagaacttcatgaagcatacacaagtgtcaatagccaaatcaagcaagcagaagaaaggataccagagattgaagatcaacttaatgaaataaagcatgaagacaatattagagaaaaaagaatggaaagaaacaagcaaagcctccaagaaatatggaactatgtgaaaagaccaaatctatgtttgattggtgtaccagaaagtgacgatgagaatggaaccaagaaatacagagaacaccacaaagatactccttgagaagagcaactccaagacacataatcgtcagattcaccaaggttgaaatgaaggaaaaaatgttaaggacagccagagagaaaggttgggttacccacaaaaggaagcccatcaaactaacagcgaatccgtctgcagaaaccctacaagtcagaagagaatgggggccaatattcaacattcttaaagaaagaa

SEQ ID NO: 477423 - DNA, 764 bp, Homo sapiens
atatgtctgatttattttttaaatatgtcgaagagaaaataaaatggagttatcccacagatggcctgagagaacttcagatagtttagaaaacagccagtcatcttgcagcagagtttttaagttactttttctgctagtgttaaagacagcatggaagcataggatgccttgtctgatggttataactatcttttcccaccaggctgctgtttcatgcattctatacagcatggttcatactggagccctgctgcgagacaggagacagacacagtcctcattgagaagaggttgtggactagactgtagacggaaatggaagcatttggatcatagaattggagaggtgaataaggttctcagttattcagaattagcaccagagtcttactctgtaaaacatatgcagaacccagaaaaaaagccaactggcaatggtaaagcctatggagaggccccaccctacaagggcaggtgattgctcacaccacttggtctggagagctgccttagactctccagtgaatctattcaaacagctgcctctgttaccttgacttgtctcagattttgttgacccgacacaggtcctggcactaggaatgtaaaactgtttattattttggcttcctccagcaagggagaagcccatagaagcctcctactgactatatgtttcacttctatatttttttatttttatttatttttatttttttattgtactttaagttctagggtatatgtgcacaatgtgcagg

SEQ ID NO: 477424 - DNA, 1333 bp, Homo sapiens
gtttacgttagagttcactcttagtgttgtacattctagaaaagataatgatggcagtggctggtgccatcacgctggctgcagcagggaggaaaggctgggactgcagacccaggcctcccactccatggggcagtcaggagccccaccctcctggacggtgctacagccgcccaaactgcagctgtagatccgagcctccctgcgctcttgaagtggggctgggaacaggcaggatctgccctcttgggtgcagctgcagccgcctgaccagcagctgcagacctgggcctcccacaacatggagcaggcaggagctggggaatcccgcccctgctgagttggcctgcgggagctccctgggtgcagctgccactgccctctcacccacgggacccaggcatctctgcagcctgtaccctctggtgccccggaaggcccccctatccctgcaggcttggggtgtctgctcccgctgcctgacctctctcctctcctgacctctctcctctcctggagctggctcagatcttggagtgggaagtatatgttcatgaccacggaaatagctttttaaaactaagatgtgaaaatatcttagaaacaaactctaaataagtagaaaaaagttgtatataattttctacttatgaggtgaataatttcattttttcttcaaaggtgtcaggaaaatggacgttttggtagagtgataaaagggccagaccttctaattgcttaatcttaatgtttctgaatctgaatcctcatctatagtgtgaggagaataatttccctcctaattagtgaggatacattgagatgacgcatgtgaacatggtttgacaattataatgtcatatggatggaagatacaacttttattaatcactgttgatatgtggacagatttgatactcattatactgtttttaagtgtctataactttaaatattttatgccaatcttaatattaataattttctccattttcaacattgtatgatcagcaaagtaaattttcagtcaattctatttggtttttatttgaaaaagtaaaataatgatcatgcaacatagaaaattatagttcagttgccaattccattaacttagtttgtctcagaaaaggaaaaattaccatagacacagaattaactattagaattaatatttaatctaaaaatgtctagtgtttctacagaaaatttgagtaccttctcaacttccttaaaccagtgcctttttcaaatttcttttcaaagttacacctctcaattttcataaaaaatagtttgaagattattctgaataattataaccaatgaaaca

SEQ ID NO: 477425 - DNA, 785 bp, Homo sapiens
cacaccgtccatgggctcctgtgccgccctagcctcccctacaagcgccgccccccgctccacggtgcgcagtcccatcgaccacccaatggctgaggagtgtgggcacacggcacaggactggcaggcagctccacctgcagccccagtgcgagatccactgggtgaagccagctggtctcctgagtctagtgggaacttggagaacctttatctcagggattgtaaacacaccaatcagcgccctgtcaaaacagaccacttggctctaccgatcagcaggatgtgggtggggccagataagagaataaaagcaggctgcccgagccagcattgggaacccgctggggtccccttccacactgtggaagctttcttcactcctgaagccaacaagaccacaaacccaccaggaggaacgaacaactccagacgcgctgccttaagagctataacactcatcgggaaggtctgcagcttcattcttgagccagcaagaccacgaatccaccagaaggaagaaactccgaacacatccgaacatcagaaggaacaaactccagacacgccgcctttaagaactgtaacactcaccgcgaggactagaaattaacctttcagtgtacctggactcttagaaatcgtattgtgatgcactgtccattcctccctcactttgtttgtaactacgggtgtctggggatagcagcactagtggtgttgagggagtacatgtgaaggtttgttatatgtagtttcttacagagtctgtctaaactcttatt

SEQ ID NO: 477426 - DNA, 1145 bp, Homo sapiens
ctcctggctccgtgggtcctgctggtcctaggggccctgctggtccttctggccctgctggaaaagatggtcgcactggacatcctggtacagttggacctgctggcattcgaggccctcagggtcaccaaggccctgctctcaactgaaaatctgctgccatggatgtctctcactgtaacaaaatataaagcctctcctatctcactttcacctttgcagggcccccctggtccccctggccctcctggacctccaggtgtaagcggtggtggttatgactttggttacgatggagacttctacagggctgaccagcctcgctcagcaccttctctcagacccaaggactatgaagttgatgctactctgaagtctctcaacaaccagattgagacccttcttactcctgaaggctctagaaagaacccagctcgcacatgccgtgacttgagactcagccacccagagtggagcagtggttactactggattgaccctaaccaaggatgcactatggatgctatcaaagtatactgtgatttctctactggcgaaacctgtatccgggcccaacctgaaaacatcccagccaagaactggtataggagctccaaggacaagaaacacgtctggctaggagaaactatcaatgctggcagccagtttgaatataatgtagaaggagtgacttccaaggaaatggctacccaacttgccttcatgcgcctgctggccaactatgcctctcagaacatcacctaccactgcaagaacagcattgcatacatggatgaggagactggcaacctgaaaaaggctgtcattctacagggctctaatgatgttgaacttgttgctgagggcaacagcaggttcacttacactgttcttgtagatggctgctctaaaaagacaaatgaatggggaaagacaatcattgaatacaaaacaaataagccatcacgcctgcccttccttgatattgcacctttggacatcggtggtgctgaccaggaattctttgtggacattggcccagtctgtttcaaataaatgaactcaatctaaattaaaaaagaaagaaatttgaaaaaactttctctttgccatttcttcttcttcttttttaactgaaagctgaa

SEQ ID NO: 477427 - DNA, 859 bp, Homo sapiens
ttctttatacaccttattcagtatgcaactgtgggtaaattacttaacctttttgtgcctcagttttctcattttgttgaagattttggagaaagatactagattataccaatatattgttcttcttcaaacttctatcaagaaaacttggcatcaattgacagctcccgtctgcatcaattactattatgatggttgctatatgataattttatatttctctttcttttggcttttattaacagaattctaccaagaaagagcttttctttatcctctccctcattactcctcatggtccctttattccccaccctatgaccctgtctccgctgctactgccttaagtccatcgctggccccattgccccacaatcccttcacctccatgcctgcctttggtcatgatgctgactccaaagaaagaggtgttaggaaaccaattagacacagaatattagagctacaaaggactatggcagtaacctcatcaggtggtccttcaattggtgcacatctgaatttcacaggatgcgtaagaatagcaatttcttactaaatctgaatttggcagatgaggaccaggaatctgcattttgattaggagaccttgctaactttttaaggttaatattacatttttaccatgttcagtcttttgcctttaaaactaattgaatcttgagatgacttataacacaaggcaaatattacaatcacaattatgttctgcaacaggaaataagctctaaatgaatcttaacattttacttgacacattactatgtttaagtgtattaaagatgttattgaaaggtgcaggggaggaaaatgaacttgatttggcaggtaggtgttc

SEQ ID NO: 477428 - DNA, 619 bp, Homo sapiens
tgcaatttccctcggtcttgaacatctgaaagcagacagatttacaaatccatcatcaaggtgacatgggtgtggctcatttactcagccaccacacaaaccccacgcaggagtgggagcatgcaggcaagcgggtgccggggcctggctgcctctttgatattcagatgcttcttttcttctctccttctctgctgtgctgctctgctcctttgccagaggagtttggggtttttatgggtacacaggatgggggcatggcaggccagggtgctattaaaacaaatgaagccaccaaggatacaaaatcaatgcacaaaaaatcagtagcatttctatataccaataacattcaaactgagaaccaaattaagaacacaattccatttgcaatagccacaaaaagaataaaatacctaggaatacatctaaccaaggaggtgaaagaactctacaatgagaactacaaaacattgctgaaagaaataatagataatacaaacaaatggaaaaacatttcatgctcatgatcagaagaatgaatattgctaaaatgtccatactgcccaaagcaatcactggattcaatgcaattcttatcaaattaccaatgtcattc

SEQ ID NO: 477429 - DNA, 586 bp, Homo sapiens
ccgcgagggtccgcagcttcattcttgaagtcatctatcattgatgggcatttggttcaatgtctttgctattgtgaatagtgctgcaataatcatacgtgtgctaaccttctctccctggaaccttctggaaagggttcagacccagggagagcagagttctgtctttgaccccctgaatggagttggagttcctgcagggaggccctgcagtggcagtgttggctgccgcccctcccccaaggagctcagacagcttagacagcaggagttgggatccacatctgcagactacacaaagacaacacagattaataacacaatcatcactgaaatcacagagcctccaagtgtttttatctgttttaatgcgttactagctgctaatctgtctgcatctccttcaagcactccagtccctggcattaaggtcaggtgtgcctgggatgcttttaatatttgttctttaaatttggaatatccaaagacaagtttgtagagtgttcttctagatgtttttttattctttcccaaattttgatcttattaagagtcattaatagtttccacaaatccttatgtttag

SEQ ID NO: 477430 - DNA, 1221 bp, Homo sapiens
atatcaccagcatgtggacgaaggagcagcgcctgaaggcccctttgatgcccctgctaggcagcggtcccttggtgtgggcagtgcaaatgaaaggtgggactggcccagcttcagggatgtaccaccttctgctgtcccttgatacagatgccctttgggtaggggagggggcagctgcttctgcccacgctggagctcccttctggagagatgcacatagcagccgatgttgcagtttagaggatgagcagcgctcaaaacctcccactactgctgctgtctgtccggtcctagacaagttgtctgcatttgttagatgtggacgaatagtagtaccaacttctaatgttgcagtggggattggaccacagccccagaccagccctacaggagtttgctccaagcgccactggcctggcccagcacacaggttgcctcgtccgccgcctccccacagcacctttcctgaattctgtcggcattgagacccatctcctctttctctgtctctctttgcctgaccctcgtccattctcctagtgggcaggatgctgtcagctattgctatttggagggtgagatgacccctgagtagaaataactcctataagttcagaggttcagcctttaacaaactcacattcctgtttgactgacagatctcccagaaaggaaaataaaagcaccttgaggacagagctggaagtagtctacctgggtattctccacagctgcaagctcaatgtcctgagcttgctggtactcagaaaatgtttaggaacttctttttacattgagggtagtgcttatgggcaaaatgaatgcccatgggcctagccctgagatggctggacagcaagaaaggagaaaggacagcatgggcaattttccacacatgttttaagtttacagggggaaagagaccaagagaataagatcaagtcaaatcaaacccatgtataataataccattaccaattgttttcttattttatgttttattctgattccttctaacaaaagttcacacacacatacacacacacacacacacacacacacgttcagcagagctcaggttgaaaataagtgccagtccttataccaaaaagtagtatgctgtgctttgaaattcctgaaagctcatttgctgcctcaccctccctctccccatgtcctatagaccctgtgttccggatccatcctttgaattcactc

SEQ ID NO: 477431 - DNA, 953 bp, Homo sapiens
ttccgtttcctgctccaaaatgaactgcttcctactttctctggtggcctcatattccaatgatacagaaaagtacacagttgtgagaaactactcccaaggtcaaaggaagagctccatcagcaagtcctgtgtgctccacctccaaaacacatcccaaatccgaccaccctttgctgcctccgctgataacactctctccaaacaccagctcagttacccttctccagtgaactggtaccccccttcaccttttcccacagcctacttgccacacagcagccatagcgatgcctctggctggccgtcctctgtctctgagacaggccctggctgctgccccatcaaggaccctgcatttgctggaccattgccctttcactctcccaggtcttcacatagctcatccctttccaatcaggatggggctccaacatcactcctaaaacacacagctctcccccttcccacagacgcccccatctacttactctgcgtgattttctctttggacttctgaaattctattcatccctatgttttattattattctcatcacctttactagagtgtgagcaccatgaagcaagaagtataggaaaaggcctataacatggaaggcactcaaaagtcctctgactgaagaatgctgacagatttttaccatcttcagaagctacttcagtttgtattggcttttcagttggactagccaatacagactgctcacaagttcctgtggaatgtcacagtgttattttacataaaggaaaggacacaatataagttcccctccttcaaatgctgtatttgtaaaacttttacatatttggaatttttaaaatatttacttttattccctattacacatattattaaagataaaatagaaaacccaagtatgcatgaaggagaaggtataaatcaccttcctgccactcagaaatgaaaa

SEQ ID NO: 477432 - DNA, 497 bp, Homo sapiens
gccagcagaacgatcctcatgtttaagtcagataacaatgtcattgacagcaacgttctgctctgaagggcagggatggaagacaaatgaaaccagatttaccctgagtagttttattgacatccttcttgtgtccattggggagatcatcaccacagttttctgcaaggcagatgctgaatggaatttgagtggtattggctacaccaagaagaaagacaggaatctatcaggagctcgtgtcattcctattttgggagcccacagaaggtgtcttaaggtggatcccctgagaaagagacagcgatttgggtgcagaaaatttactgaggtgtgctctcagaaacaacacagtgagggtggaggaggcaggacaggaccagaggagctagatggcaatgttcttgctacagaggcctcagcccatccccctgagagggaagcctttcaactgtcccttattaaggcaagggggtgagacttcctatctacacctc

SEQ ID NO: 477433 - DNA, 660 bp, Homo sapiens
gccaatttatctgctgacatttcaatcaaacataagatgaaatcctccttttttcatttggtcttctcctggttacttgaggaaacgttaacaaatatcttcagaatccagaaagaatgtcgactgacttctagatacagcatgttagacatacagctaaaagacaaagtagacaacagtccttctcatctaggatcttacagtctagctcaccacaggagacccttatggaaattactaaaccaccctcctctgtcctcttccaaccctaatctaggaaaattgtatgacaccatcactattccctctcatgggaagactgatcacttatgggggcaaagagaagacggaaaccaacatttgctgaaccttctggtgtctgacagggacacgctaggtgcttttgtatttacaatctcatttaaccctgcaaaacccctaaaaaattaatgttgctatccctattccacaaatgagaatactgaagctctgcatgccacggagctataggaaaactaaaacagatactaagatacatgaagtaatttgttttaaatcaggccatgtccatcatgacaccaaataatcttcctatatcaaaatatatatttgaacttttaaagcaactttttcaagagctgtcatatgtggtcatacagg

SEQ ID NO: 477434 - DNA, 598 bp, Homo sapiens
cacttccgttcagccgtagtaccatgacgtgcacaggcctgaagagaaatacctctgtgaagtggagcgctagtgaattcctgctacctgcttcttatggctcacgctatgaatattcacctgcttcatttgttttttccatatcaatactcccccaaccagaaatgcagcagaatatcctttttgctataaaggaaaatactgtgtttttatttgtttttgcagaagaaaactggtgttgcctatttggactagatgtaggggcctggaagaaggaagtggcagattcacagtttggattggagtttctagtaatgataattaatgccattttacatgatagcttcaatgcagaaatggtggtggaagagggagccacaccaagaaaggagcctggccccaaaccagaggatggagcagagtccccaccccaccctcactgaaccaaaatggacatgaacaaaatataaacttctactgggttgagccactgatgtttggggttgtttgttatagcagttaggcttttataacttttacagagcactccatggaccagagaaatataaagaactcaaattggaatatgattagctca

SEQ ID NO: 477435 - DNA, 612 bp, Homo sapiens
gcagcctacaattactgctgcttctataatgtgtaggtaaggtgagaggagggactggaaagcatactatagtcctatgattcaatttcagtcttttagcgggcttgtgcctccggactatgaacttcacaagtgcttccccctccccgcttacccctactcccccatccaccaccccagtagttttttctccaatattcactgtgagaacctggtcaagctcctggaggaaaaactcaacaacagtatggggcccccagtgactgaacccacacccctggagtttttatctctcagacttgtccatgctgagcctcctgtgattgatcaattacaattcagtttcccaaccctggtcatggttcctgtggatgttcttgttctggtgaattgttattctctttatcttcctgtctgtctttccaattctaaaggcagcaatttgtcctgtgatatcataattattaaactcattctttgcagcaatactgctgttttcagtgtattggcttttctgggaagcaggcaagaagaacctatcaggctttgacactaacctatacatccaacaaatgacaaatatccagaattgacaaagaacttaaacaaatc

SEQ ID NO: 477436 - DNA, 2868 bp, Homo sapiens
aaggacaatctttcaaactcctcctagaaagaagcgtgctgacatttcttacacatcagctgcaattgtttttaagtattcactcactatatttacaagtttgcagctgcagtaaaacctgcatgctttgggatttttcagattgcttcccatacttaatcattgcgcaagatgtaaaagcggcacctggttttagaatttacagcgcaatgagaaatgctttgaaagtacagaaaaacagaagtcacgcccagcggggaaatcaagaaaggatcctgagcatgaagcataggaccaacaatcagagaatgaaaccacacgacataggcaagcccaagtcccacggagagcacatcacatctccaaacaggtgccatggaggacactgtgagacacagcagcctgcagtgatgctgagagctctggcttcaaaggaacaaaccgagtcctcatcacagctctgtccgtggctaacagctctttctgagtctcagccgataccatctttcaaagttgtgggtggaacatatggacataccatcaaccatgatacagaagataagggaaacaacaggcagacagatgcccggaggtggagcagacccatgacaacactctgaggaccatcaatattgctttgaggaatgaatatggaaataagaataaccaatgaaaatctaaaaggatgaatctgagaagtcgaggttcttttcagtttgaatttattacgaataaaactgctatgaaaattcaaatacatgtctttttgtggacatttaatttctctgcttctatatttagggcaatgatacatgtcaaattaatttctgtacatagtgtgagacatgggttgcagtgcatttcttaaaaatttcgttaaaccagctctaattgctgaaaatattctttttccacatttattactttggcactactgttgaaagtcagttgatcatatatatgtgaatctatttgtggaatccactctgtatgtgtattctaacaccaatagtaaggcttgaaatcaagtagcttagatccttctacttcgttattctttttcaaaattattgtgcacttacaaacagatgttagaatcagtttgtgaatttctaccttccccacaaaataaagcattctgggactttcaaaatcgggattatgttgaattgatggatcaatttggggaaattttgcatcttatcaatattgagttttccaaaacatgaacatggtatacctctccatgtacataggtctgtttaaatttctcctagcaacgttttataattttcagtatagtggtcttacacatgtaatgtacattgacttttgggagtatttgattctactatgaaagatgaaaatgtttgtagttggtaacattggcaaaaactttaaacattagcaaaaacttttaaagtgttttaagtatagatagcataataagcaaaatctttgttagaacagacaattcacaagaggtattatacaagataagtagttacaaagtaaagcatgtgcgtacccaatgtaagaagaaaaggatggaaggtgcaaaacatgcctaacattcatgaggcaccaggatactaaatattcatgatacaccaaatgtcatggaggtgtattcaggatacacctcagataaatattcaggaattattaaatatgtatgagacatatgcagtgctaaatatacaaacagcacaaactattcaggatacattaaatattcatgaacactcaatattcaaaaggtcttgatttaccacccattaatgacatccattttggccccaagaaaaacaaaacccatggctgttcagcaaactaatagcaagttaaaactgtggccaggttttcttgtgcctgcatctctccaacagagcaagcatgtgttactagcccaggacaccttctgtcttttcccctcttgctcaaacttcagctcttgtccctctaatcatatcagaggggaaggctgattaagcaacaggagagacaggacaagtgaacatagcatggcccaggatccagacaatatggttcttctacttacttgcctcctcaccaaagtatattaaaataccccagatctttctccttgattttttggtttatgttattaattaactaaacaaagcatgtgatttgggttttaacctaatgttttaatttggcctgtgaacacttgttttgtgatgtctaggacagcatcagagtcatttcccaaaagacagtatatcttttgctaacttattcctaagtgtttcctgggttttgatgctattataaaagtagtttgttatttcattttccaattacttggtgccagtacatagaaatacagctagtttttatacattgatttgtgtcctgtgacattgtaaaattcacttattaattctagaaattattttgaatttttgttagatctttttaaggattttctatgtatataattatgttatctgtaaagatggtattactttttactttctaatctatgtcttttttatttcctgccttatttcactgtctagtcattagttttaaatagaaatgagtagagtgcacatcctcaccttgcttcctgtcttaaggggaaagtgttcaatatatcaccactaagatgttagccatatcaaattgagaaatatattttctgctgtgacgtggcagagaacatttctcatgaatgggtgttaaattgtatcaagtgccttttctgcatctattaaaatgagcttgtagcatttcttttttattctattaatatgatgagttgattggtatttttcagtgttgaatcacctttccattccacacttcatgatgtattatcattttatatattgctagagt

SEQ ID NO: 477437 - DNA, 2549 bp, Homo sapiens
acgtccctcacggctctgggccctcatggctctgacgaccgtcacagctctggcctcttatgattctggcccctcaaagcttcagctccgacccctcacagctttgatccctcacagctcctactcacagcaagtgaccccttacagctcccatccctcagcagtgacctctcacagctcccaccccttacagcagtgacccctcacagctccgactcctcacagctcccacctctcacagctctcacccgtcaaagctccggcccctcacagctcccacccctcacagcacccacccctcaaagctccagtccctctcagcagtgacccctcacagctcccaactcacagcttcagctccgacccctcacagctttgatccctcacagctcctactgctcacagcaagtgacccctcacggcttccacccctcacagcagtgacccctcacagctcccacccctcacaaaagctttggcccctcacagcacccacccttcacagctcccacccatcacagcacccagccttcacaaaagctctggccgtcacagctcccacccctcacagcacccacccctcgcagctctgtgaggcctccagcgtctccactcccctgacaagggcattgcaagaagggagggccacgggcccatctctcccgtggatgctgctacaaatattccatgcaagatattcacgagattccagtcatgtaaagtgtatgataaaatctcaaatcaaactgcctcaaaggaagaaatctaaatcggataccggatacctacaagaacccacaggcaaggcagggcaccagggagacaacgtgtgcaagagctggaagggaagaaacgcagctgccacccctgtgaacacagaagatgcaagagaatccacagctgccacccctgtgaacacagaagatgcaagagaatccacagctgccacccctgtgaacacagaaagtccaagagaatccatagctgccacccctgtgaacacagaagatgcaagagaatccacagctgccacccctgtgaacacagaagatgcaagagaatccacagctgccacccctgtgaacacagaagatgcaagagaatccacagctgccacccctgtgaacacagaaagtccaagagaatccatagctgccacccctgtgaacacagaagatgcaagagaatccacagctgccacccctgtgaacacagaagatgcaagagaatccacagctgccacccctgtgaacacagaaagtccaagagaatccatagctgccacccctcccctgaaaacacagaaagtccaagagaatacacagctgccacccctccccgaaaacacggaaagtccaagagaatccacagctgccacctcccccggtaaacacggaaagtccaagagaatccacagctgccacccctcccccgaaaacacggaaagtccaagagaatccacagctgccacccctgtgaacacagaaagtccaagagaatccacagctgccacccttgtaaacacagaaaatccaagagaatccacagctgccaccccatcaacaggcaagtgtgtcacaaatgcagtggtcaccactcaggagaaaaaggaatgtgccaccaacacacacatcatgagctgcaacatcctgacagtgtgtgagagagcccagatcgccccgctgccccagttccacacaccacctggccccacttctgtgagtcctggggtctgtgagcagatccactggggcttcctggacagggcagaggggaggaaggggcagtctcaggacacaaggagacctggtggtgacggacacattcattatttcaactctaaacgtctgccttctgaatacttactaaacatgtggccaaatacacattatttcataatcttcaacaagattagttcctgaattcttccctgagacagactttgataccgaattaatgtccaaattttctagattagttttgaataggcttgaattatacatactcaagaaattgttcttatgtttcatgtttacatgtttgagtcttaaaaactgacttagtggaaaagtagttagtgtctcaccataaaacagcttgatagatacttttaaaaacaattcacatttagtcattttctataactttccataaaatggccaacaaaatgataaaaattttataagcaataaaagtcttaaaatagggcaataaagtgctaaattcccttaaataaaactgtcaaaaccatgaggcaagtcattaagttaaaattagatgcaggacaatttttttaatttaaagaataggaaagttaagaaagtaattaaaacagtacaaatgaagaaaagccattgaattattcaataaatataaagccacagtaaataaaaaatttaaatagtaaatttaaatagagtaaatgtatccacaaaaaaatgttaaaatgaggttatatttgtgtgaggctctgaaactgtgaagtgttttgtaaatattcttcattgacttggactcgtgactttttgagttgaaaacttaactaaaac

SEQ ID NO: 477438 - DNA, 2308 bp, Homo sapiens
tgcctgtgagttcagcgaatccagcagggctgtctcggttgccctcagaccgagaacctgtgacactggtggggtgaggaatgagccgtggccactgccgaaaactctgtcggctcctagataagtcccaccgaaggggcattggtgacctccttggtgccacagaatctcctgctccagccctgctgtagacctgtggctctaggttacttgctttattatgacccgttgccctcagctgccttcaacctctcggtagggacccttgcctggcctcacaggtccgagcctgctcccacgaccaggtcagccagaggtgtttacatgagagggagagtgaggaacaccagtttccgaggtcccggctgaccttgacgggcgctcccttcacatctctcccctcacggtgctcccctcacaatgtttgctcacatccctttcctcacagcgcccccctcacatccctctcctcacggtgctcccctcacaacagtcccctcacagtgctcccgtcacagcactctggcacagtgctcccctcacatctctcccctcacggcgctccactcacatctctcccctcacagcgaccccctcacatccttctgctcacggcactcccctcacatccttcccctcacggcgctcccctcacggcgctcccctcacgacgctcccctcacagcgctcccctcacatccctcccctcatagtgcccctctcacatccctcctctcaggggctcccctcacatctctcccctcacagcgccccttcacatccttctgctcatggcactcctctcacatccttcccctcgtggcgctcccctcacagcgcccctctcacatccctcccctcagggcgctcccctcacatctctcccctcacagtgccccctcacttccttctgctcacggcactcccctcacatccttccactcatggcgctcccctcacatccctcccctcactgggcccccctcacatccttcccgtcaggcgctccccccacatgtctccgctcacggcgctcccctcacagcacttgttcacatccctcccttcacaggccccccctcacatccctcccctcacagagctcccctcacagcgcccccttcacatccctcccctcacagagctcccctcacatccctcccctcacagtgctcccctcacagcgctctggcatagcgctcccttcacagagctcccctcacagcgcccccctcacatccctcccctcacagtgctcccctcacagcgctctggcgcagcgctccctcacatccctccccgcgttccctcacagcgctcccctcacagagctcccccctcacagcgctcccctcactgccctcctatcacagtgctctggcagatgggatttttcatgctgacaaataaattgtgaactcctgggggcgccctcctcgcttgcatgcggatgtctggctcccatgcatctcctccagacctggctgcctgctgctgtgacctccacggctttgttcttcatgagtgtgttccatcacagttccttggccacgtccacacacacaacggtggattcattgaagggcctgtgcattattcactcctgtcccctgagcacaggaacagacagacacataataaaatgtgcacagtgactcggtgccccacatccagagcctccactggagtggacctccagcaaactccaacagacctgcagctgagggtcctgactgttagaagggaaactaacaaacagaaaggaatagcatcaacatcaacaaaaagacatccacaccaaaaccccatctgtagtcaccatcatcgaagaccaaaggtagataaaaccataaagatggcgagaaaccagagcagaaaagctgaaaattctaaaaatcagagcacctcttctcctccaaaggaatgcagcttctcgccagcaatggaacaaagctggatggagaatgactttgacaagttgacagaagtacacttcagaagatcggtaataacaaacttctccaagctaaaggaggatgttcgaacccatcgcaaagaagctacaaaccttgaaaaaagattagacgaatggctaactagaataaacagcatagagaagaccttaaatgacctgatggagctgaaaactatggcacgagaactacgtgacacatgcacaagcttcagtagccaattcgatcaagtggaagaaggggtatcagtgattgaaaatcaaatgaatgaaatgaagtgagaagtttagagaaaaaaagagtagaaagaaacgaacaaagcctccaagaaatac

SEQ ID NO: 477439 - DNA, 897 bp, Homo sapiens
gagactgggcacaccctggcttctgccgctgccctggacacctgtggtgttgtgaggcacttggtgttgatgtgttagttttctgttctcaaaatgtcacatattatcttggtcctgagctctgagcacaaacatgaacaagggagaggcgtctactccagggactctcggtgtagccggacacacagttgtgaggacgatggccgcgtggccagagctgtaataaaccacggagggcttatctccatctggacacccggcctcagccagggagcagaaaacctgaaaagggctgggaatgaccaggccattgttgaccgatacctgagcttcctcacattgtttcacccagagcttttctgggcaaaccctggagcggcgagggcggcgtccaacttcctgaccctgggtctggctttactcctctggggtttggaatttgccaccgagaaagcaggaaggaggtcaggccgaggtccctggcacggactggaacacagggagggaggcgggcttgcatcccgccgctctctgtgagaccccctgttccgtctgttggatccagggctgcttccctgggctgaacccccttcttgagccctgtggagtgcgtgctccacctcccacccctccctgctggccggagtttgctgaggcccttggcaggcacccttcatgccccaccaccctctgtccacctgccagaccttcccttcccaccccagcccctcagtctctggaacttagggccctgcccccagacggactgttgagggactcaaagaatcccttcaaggaattctattgaaattgacttagagataaatgagcacttatactaattaaatatttcccaactctcagaataggaactactccaaatgcctttttgagctc

SEQ ID NO: 477440 - DNA, 865 bp, Homo sapiens
tcactcgatagttaagaggaggggcattagaactctttgagcagaggattaatgcaattagaattaagctttacgagtactgacccagaagtgggatgcaagatgaattggagagggaagagagtaggaataagagatctcttagaagccaaacttcatacactagatgacttgactctttccaaaatatttgatgattttctggcttctttgccgtcgtgcataagaaacagtgtgtggatgctgctcccttgcgtggacactcagaaccttcaagagttgttggttttgaatcttgagagtgccttggaaatccctaatgagacagctggaaccacgatcactggcaaacttatccctaaaggctccagggcttctcccagctacatcttcacggctgagtacacacagggttcagaggcttcttggaagcctcttgctggctggacaggccttcacttagggcttgagtgttcagctagtggcatctgtattgcagctggtcactttttgctgagccctcaggaatttggcaataccttcagtgcagtagttctcaatgattttgtctcttacaactgggaagtggaattggcatctagtagcacagaccctggagatggccatataagtttgagctctggctccatttcttactagctctttgatcatgggaggcttacctgacattcctgtgccttgattttcccgtatgtaaaaggtatactttgagcactgtcatatttcttacccagccttcctgttctcattgaccacttttctttaaaattaaaattaaaaaaaacattttaaataaacgcaatgcttacttcccctagtatagaaaccactgcttctactcgat

SEQ ID NO: 477441 - DNA, 509 bp, Homo sapiens
caggacataaatgattcctgttttttcttcaggactcacttcaaattattttctcagtaaagcctgccctaatatccccaaaggctattactcttcttctttcattacatatttgtatttctcctgtgtaattaccaggttatacaccaatgtggaaaaggaggaagtggtacaacccattccctacatggtctcaacatctggtatgcacctggcatcaggaggtgaaggaaaaatcaatcctgcatcgtctgtaaaagaatgtattacattggatggcttcgggctggtggtagtttttagatcaggccttactccatgcgtgaaggtgaacaatacagaagaaaaagcaggagtaaaaccttcctggacatatctcaggtttcaaccactccatgctctaatggatggaattaaatgtggacatgactggaccccatagaaaatcttttattgaccctgagtcactgtgggttcatccgatgacactgtaggagtcacccctcctc

SEQ ID NO: 477442 - DNA, 2837 bp, Homo sapiens
aagaaactaaggctgaatggcagttcctacgagctcaggatgtcaaggaactacaagttcttccacaagtggaggaaggtagattcttactacagcatccatgtagctaatattaggaagccggaggagtggaagcagcaggccagagtgaaggggtcaggggtgacagtggacagagcaggaaaggggcaggctatgggctatgcaattgttaggggagaactgagaagctccttgtctttcatgtggactacatcaatggagactctgttggaggtggggcctggtaagaagtgtttgggtcatgggggaggatctctcatgaatggcttggtgctgtcctcccaggggcttccctatcctgttcccatggcagacatcactagtcaatcatggcagtctttcctcttgaacttacgtataactatcataggctttttcatcatagtttgctagacttgtctctaattaatgttcatagacaataaaatgaattgatttacagtccctgttgtgtacccatgctcattagaatttaaactccagtagatcatggatttatctgtcttgctttttttatgcttacaacaatgcccggagcacactaggcactcaataaacgtttgttgaatgaatgaacaaataatgcatttagacagaaattttccaaaacgaattcaaatattcttcatagtacaataaaattctaataagcattcatgatatagctatttctgaacattttaactttgtagtcactagttctaaggttattgagggaaatctttgattttgatgctatttagatattgaggggtttttttgctttggtgctgacacagatcagggaaatcaggaattgcagcaactttatttgtattgcttgaaaattgtagctcaatacaaaattcagtaagagactagctccactgatgtattcatataataaacggtattagcattttcttgattttatgttacattaactttatagtatgtttcatgttcaacaatgcaaaggtaatttattaaaatatgttttggaggtatgatgagtcaacattaatattgatgacaacgaggttattatcatgttgacaacttttcttaattcagtaaataattcctggcatagtcaacactggccacaaagcctgtagttaatacaaagcaggtaaattgattgacagagtctggagatccaggattctatgagtatatagatcagtagtttgctgataactactggtgaggtggggctgggggcactaatgtgaacttgaccagttaagtcaatctctacaaattctacttgataaaatattacttctgaactggctttcagacagatttactaatctgttcagcggcttttcatggcagaagacaaaaaatgcaatggttactatgaaaacatttgaaatacctgaatttgcttaatacacagctttatttactagaagcttgcagctaaaataaaattcccaataataggaggattctatataaatgttaaaagttacattttattatacagggagaccttgaagaagagggctaagaaaatgttatttatgctatctgttattatctgaaagtatgtcaatagtatgtgcttcaaaagaactgacgggaaatgtttatcaggcgacaatgaagccaaatagattgtttatgacaacatgcggaatatatttcttggcaaggttttgaagtatagacatgagggtcattctcatggctgctttggatgacattcatcattgctgaatatctagattttaaagtacaacatatttttgtatagagagaattgctaggtagtgtatattgtgtttatattagccttgatggcacattcatgtagaaatgtagaaatctatgttattattttaatatgtggtcatttgcctgcaatttactgttgcttgtgccctatttttcgtgtttataagggcttatttaatgctacaaccagataggcttatttggatatcttaactccgtttattcgtctacagatttgtgacttaaaagattagcattcattgactagtacttttcagacatcaaacctgctgttaattagtcaggtcatatcatatggaagtataaaaaaattatatatttgagatatggtctatttgaatatttttagtccattactaagtttttgttgtaatttaattttgaaaaaagcatatacaaaatttcaaagaaggcaaacaaggtttatatttatctttctgtttctctagctcaccaataactcttcagtaagaaatggcctctctcatggccggagagcttgttcgggcttatgtctgtaattaggtcaaattatttgagtgacaattaaaacagcaaaaccaacttccatggcatccagtcaggagtatcattatttaacatatgtgtttacattttaattttcagaattagaaatcacatggatacaaatgtaagattgaattcgattttctttaaagcaataaactaggtttattgtagtcttttggcatttagagaaatacaaggcattgagctgtcagattttacaatgacaatacagaattgcgaattctgattttgaggtgcagacattgcaatcattaacttaacatttataaaatgagttggcaaagggaatagaaacaaaaacttgtaggtggcatggaagatggctcctggtactcttacagcttaagatgagagagagagagagagagagagagagagagagagaccgaccgacccaccctctttttccaagtcagagaagatattggttagttctgcctaggtgacttgcccgtccttgagccagtttttgtact

SEQ ID NO: 477443 - DNA, 1203 bp, Homo sapiens
cagacttcaaacaaataaggcaggaatagcctggtcagtatgttgccacagctgctgctgctgtcatcacctctgttactgctgctactgattcttatagttcgaggtcttacatttaggactctaatcgatctgaagttaatttttgtatatagtgacagagggtgtgaacttagaagatgctgggtagggtcttttggctttgcttctatagccctgtgcacttctgatggcaacttttatactgggccgttcagtttgacctataagctagcagatggcacttatagggaggagctggcttcagtcaatgtggctggctatgtacttttcctggtttaccaggagaagctctctgttacctcaggcaatgggcttatttgtggagttcacagtgatcttagctccttgctcagttctggaggagcaggggccaagattagcagttttggaagtttccgttatcatatcatcaagcataaagactctttcctcagcagccccaaaatccagtatgtgtatcatccactcagtaaagctgctgtattctatttctttggtcatattttggcaattccctcaaggagacaagtggggtgaatgtgaagcttagtgtgtatgctgaccttctcccaatgatgtttctcagtacctgcaaacacttgttttatatattttatccaactctgatagaaattattacagcaagagatttagtcttatatcagcgataccattgtgtttactaatggaattccttcttttgtattttttctttgtaacacctttattgaggcatgattgacaaacactaaacatacatatttaagctgtacaatttgatgaattttaatatttgaatattccaggaagcaatcaccaaaatcaatataataaataaaacaattatttataagttttcttgtgtccctttgtagtttctccttcttcaagacaatcactgatctgctgtcaatatatattaatttacattctatagaattttacatctatagaatcacacaataagtactctttttattaacctggcttctttcattcagcataattattttaagattcatctatgttatatgtatgtgtaaatattttattcctttttattactgactacaattctattgtatataaataccatatatattaaatttttaaaaatttttaaattgaaatttatagttc

SEQ ID NO: 477444 - DNA, 605 bp, Homo sapiens
gcagtgtttgactcctaggcttcagtccgaatggggaaacagggaaacttgttgttggttgatgtgcctcctggtcctcattcctcaacaccagactcattccagacccctgctggtccagaccctgccagtggccctctaacaccacaatgcttcatcgtgagttcaccagcgggcacagacattatcccccggccatcagaggcaagtgcctgggcagagcaggcagaaacaaattgctttacagccactaccttgaatctgacacacatcccttttccaaagtgtgcacctcactggcaacttctaagtgaaattcatgggaaagtatttagcaaatcacatgctgacacatttatcttgttagctgtcaaaatgacccgaaaaatctatcaaaaaccatatgttcaggccttgccacaaatgcaagcaaaaaagccatggggtaggtgaggtcatggtcacattctcaggggttctgtccacccttccgacagccagggcagagccttgaagtgagttcaatgtggaggaaatggtaagagcatggactctggggtggaaatacttcagagcactaacagacttcagagcagagaaatgtc

SEQ ID NO: 477445 - DNA, 2549 bp, Homo sapiens
taccctgcaaagccacaggggtggagctgcccaagatcatgggaaactatgtcttgcatcagtgtgacctgaacgtgagacctggagtcaaaggagatcattttggagctttaaaatttgactgccccactggatttcagacttgcatggggcctatccactactgggcatcagaggagcccctccccaatcactggtgccatacccgtgtttcctttgttaggtgttccaggcctggggactttctcaggcagaggtcacagctggcagacaggctattcccttccagagaaaggaggcatgccctgttccctggccagcccacaaaccaggtcatctcacctctctgtgttctgagaatggaggctcctcccctgcatgggcaccacccaaatgggcaagtcttgcctgctaggagcagtggcagggtgaggtggggggcagtcacacaatctgctgcctaggtgtttcccaggggaacacagagctgtgcccacctgcagcgttcaagcagggatcatgtattattcatatctgtaccaattaactagcccctctctttgaacatgtacaatgttcttaaaagggtgtcatataaaattaaaagaaaaagtcttgctctgtgctctgaagaacagttctggaaaataaatgtcagcaatatgtgagaaatgatttttctaactgaattataagatacacttgctgaaagttctctgaagatttatttataatataataagatagatgcttagtgaagagataggacctatttgtccatggattgcagattttgaaatcaaacaaattggtttatttaggttatttctttagcatattttattagcctgtgtaaaaaataatataggatattttattgaaaagggagagttgaggcatactaaattagaaggatttgttaaatatattctgataatatatttattaaaattattatcacaaaattagatattctatcattaaaattatataacaaattgtactgttatacttagaggttttttttcagggagtagttactttctttggttaaaatcttaaagaaaactaactaaataaataataaagcttgtatgaggaaagaaactataagttcagctgacagtggaagaattattttatttttacatttttcattcattttttttcttttcctgacagcttgtggtcagagttgtattattgtttgtaaattttttttttaattttagaagcaagactcattgaaataaatttcctatgaagtatagtttccatggcaactgtaactgtcttttattttcacatgtaccatttagaattagttgacaataattatagaccacttaagctaaaacattttctgtacagcagagacatgtataaagacagggtttcagaaaaatagttctggtttagagaaacttaaattacttgttaagaaagacttgattttcttacttaagtagatgactgaaattctatctaaatatccagtgtgaagtttgagatgactattgagatatgtcaagggacattttccctactataattttaaaattccatttgttaccaaaacttttcatttctcttgtgctgcgtatgtttacatgcacattcctgacttctcaaatcttctttagttcaattactacttctttggaaacaatttgggtattgggcaacagaataatgtagaaagtatgtgcattaaaattaacttttttatttaccaaacctcttagaccatagttttctaaagaaggtaaagcaaggtttcatataattgaaagaactgccaattaacttgagaaggaaatccatacgttaattaattaagttgcatcatgctattgaaagtgaatatatttatttatctcaatggccttccagaagttaatttgtaaacatgaaattatttttcagtcattggattattactagtgtccattgaaacaatatttctctgggtgagatgttaccagtttagaaaagaaaaaaaatgagatttagatggttgtaaaatctccccctgaaatacttttactcatgccatttctttgttcaataataaaggtaaatagcatgacaatgacaatcttgtgcaggaaaactatgctgtgctttagtacacaacaaaaagtgtgttctagcatgtaaaattattctctgaggttaatataggcaggctaaaattttctttataacttttttacgatgctggggtatagtggaagcaattatgtgctttgatggagtactgtggacagtggaagaaggagcaaatgaccacaagctgctgtccagagactaactgcaacaatgagggctctagtttatttcgcaagctcttttactaagcttcctctcagaagaggccatgggattcatggtggggctacttctgaacctgcattagctctatggattacctgtggtggcaataaaaaggtacttttcatatctcctgctgaatgaagtataattgactgacagcctgagctgtagaccttttggagtattaatgtagaggcataccttattttatc

SEQ ID NO: 477446 - DNA, 1491 bp, Homo sapiens
tccaggtctcctcccctgccagtgccagcaggggcaattgtggactggatgggcaggcaggttcttaggcctctgggaagcaggcatggcattggtgatggcagtagaagtagtgggtacatcttgggaccttcctgtggcatacatgggcacagtagtggcagcagtggacttggaaggccagttcccaggcctccaggtggcacatgaagggaaagaaacttgtgtatggcacagtggaaacaatgaagttgaagggtacggcttaatggatgatgaaaatgagatgttcgggggacaagagagggagtttattacaataattcagttaatgaataataatcttaaccaagaagtggctgtggaaaaggagaaagaaatgtcaattatcaaaatattctggggaagcttacaactcaattgcataagcactttcctttggtattcaactgatttgcttaatatatacttctcattttgtcacatggcatattacaaacacattgtattcaagggttgagatttaataaaattaataattctcattacttcatcaaagatgttatttagtgaaaatggctgttttttttttttttttttttttaacttcatgaactgtcagtttaactaaagactgatatttttttcaagtggagagaccattatttgtaaagctttaagacacatagctaaatgccaaccagtcaccataaattttcggctttatttaaactttggtatacattgacaattgctttgatcataatttaatttgagagtcaagatgatgatcagaacatgtttgaggtaaatatggttaaatattttatttaaaaagaacaatgttttcagtaagaagcctgggggtgaaacggactatattttcttgcttttgtaaactttcatggataattatagacttcgggttaatgtcaccagaaaagaatctgtcataagttagcacttcctcatttcctctccaatgtgtctatgaaatcttaaatcaaaagtgtaaaagttctgtaacattactcagacaactaagtgttgagaagagtgttatttaagtaacaaacatcatttactgaacatattatgtgctattcgtgttatatgcacagtataatattgcttgcctcaacaattatgcaaggcaggtatttttatttaagttttacatataagaaaattgagacccatagagtttcactgagttgtccaatttaatactagtagtaccagaaaaagctgagactcacattcagtcccatttgaagttacttttcttttctctcaaaaccccatactgcctttttaggtttgccctgtaatctaaaaccactaatatttaccattaagtctattaaactgtattagctatattcacagttatttaagatgtccattccttagcacttaatcaatcacaaaaggtgtttttgatactgaatgagaaagtaaaaaggatcattacttagttaagctgttatt

SEQ ID NO: 477447 - DNA, 613 bp, Homo sapiens
ctctttgctagctttaccctcttcagtgtggatacattgaactatagtatatctcctaatgctgtatctcccccctccccccaccccacaacaggccccggtgtgtgatgttccccttcctgtgtccaagcgttctcattgttcaattcccacctatgactcagtggagtttgttattacccagcttctgaagcctacttctgccaatttgtcaaactcactctctgtccagttttgttcccttgttggcgaggagttgtggtcctttggagacccctctactgcaggtctgctggagattgctggaggtccactccagatcctgtttgcctgggtatcaccagcggagcctgcagaacagcaaagatggtggcctgttccttcctctggaagattcttcccagagaggcacccgccagatgccagctggagctctcctcagagcttgagcactgtgctgggagatctgctgctctctttagagctggcaggcaggaatgtttaagtctgctgaagctgtggccacagctgccccttccccaaggtgctctgtcccaattactggggaacctgccccgatattcacataggttcttttctattttccttaagc

SEQ ID NO: 477448 - DNA, 1294 bp, Homo sapiens
agctcggagggtcctatgcccatggagcctcgctcactgctagcaaagcagtctgagatcgaactgcaaggcagcagcaaggctgcgcaaggggcatctgccattgctgaggcttgagtaggtaaacaaagcggctcagaagctcgaactgggtggagcccactgcagctcaaggaggcctgcctaccactgtagactccacttctaggggcagggcatagctgaacaaaaggcagcagaaacttctgcagacttaaatatccctgtctgacagctttgaagagagtagtggttctcccagcatggagtttgagatctgagaacggacagactgcctcctcaagtggatccctgaccccaggggagcctaactggcaggcacctcccagtagggaccaactgacacctcatacggctgggtgtccctctaagacaaagcttccagaggaaggatcaggcagcaacatttgccattctgcaatatttgctgttcggcagcctccgctggtgataaccaggcaaaaagggtctggagtggacctccaaaaagggtctggagtggacctccagcaaactccaacagacctgcagctgagggtcctgactgttagaaggaaaactaacaaacagaaaggacatccacatcaaaaccccatctgtacatcaccatcatcaaagaccaaaagtagataacaccacaaagatggggagaaaccagagcagaaaagctgaaaattctaaacatcagagcgcctcttctcctccaaaggaatgcagctcctcgccagcgatggaacaaagctggatggagaatgactctgaggagttgagagaagaaggcttcaaacgaataaacagcttagagaagaccttaaatgacctgatggagctgaaaaccttggcaagagaaccacgtgatgcatgcacaagcttcagtagccaattcgatcacgtggaagaaagggtatcagtgattgaagatcaaatgaatgaaatgaagagagaagagaagtttagagaaaaaatagtaaaaagaaatgaacaaagcctccaagaaatatgggactatgtgaaaagaccaaatctacttctgattggtgtacctgaaagtgatggggagaatggaaccaagttggaaaacactctgcaggatgttatccaggagaacaagagcaactccaagacacataattgtcagattcaccaaagttgaaatgagggaaaaaatgttaagggcagagagacagaaaggtcgggttacccacaaagggaagcccatcagactaacagctga

SEQ ID NO: 477449 - DNA, 535 bp, Homo sapiens
caccataggacactactgaaggggttattactatgaattccagctctgttaaagatatgagacaacaattctggcaagtaaccatccttgacagtcattttgccatgccctttgcccaatccagaaccttggatggcatctacttctttgcttgtcagaaccttcttctcaagaaggctatgagggagctctgtgatcagccagcttccttgctatggtcagaattaggtcatatgcttatccctggacctattattggcaagggtcaggatgagcagggaggctggggccagttccggaaggtcagtcagtggaacagcaatgtcatcatcacctgggagctgatcagaaattcagattctcagactccagccaagaactgtggaatcaaaatgtctgggtgtggcctccctcccaaatctgcatggctattaagtggagattatgatgctaatttgagaacctgtttggattgacctcctgggatgaaaggtttgctgagattagctacaatgatgaattcaattatctttat

SEQ ID NO: 477450 - DNA, 654 bp, Homo sapiens
ctgttatgctaacccactctcacgcatgcttcaacaccactgcagagcctgctttcaggctacttggtagccctacgttctgagctatctgatgggttcaagaaaagttataattgtgcggttcattcagctttttgttgttgttagggtctacacagaccaaaaaccttggagtcatacttggcaccttctctcggatcccacatctaatccatcagcaaatcttgttgactctgccctcaaaacatatccagaactaactgcttctcacagtctccactgtttttacccttatctaagccacagttacttgggcttggattcacatgtaaatgagaaagttactgggaactggagtaaaggtcaccagtgtcacaccttatcaaagagcttggctgtattatgtccatgtctttgggaactatggaagtttgaacttaagagtgatgacttagggtgtctggtggaagaaatttctaagcagcaaagtattccagaatcagtgtttctgcttctaacagcctacaatcagatgtgggaacaaaggaatgacttaaatttggaacttatatttaaaagggaagcaaagcatacaactttggaaatttgcagcctagccctgtggtagagaaagaaaccaagtaggttgtgaag

SEQ ID NO: 477451 - DNA, 715 bp, Homo sapiens
gcacactgtgcttcagctgatgggggcggcaggactgattgtcattctggataatttcaaggagagattatgaagaagaatgagaaggagagtaggaagcaggaggaggaggaagaagaagagaagaggaaagagaaagagagaaagaaagaagaaagagagaaagaagaaagagaaagagaaaaaagagagaaaggaagaaaagaaagaaaaaggaagcaaaggaggaggaggaggaataagagaaagaagaggaggaggaagaagaggagaaggagaaataaggggaaaaaggagttatcctggtcaaatggcaaggaacagcaattcttccacatgccaggaaagagacaagttggaatatttctgagcaaacaagtacttaccgaaatttgtgattttacaaaggaccttcacttttcaaaatgtatcatcatcatctacctgccaatgacccccccccaaggtggatttaaagtagaatttgacctccatcagctggatgttatcttctataatctttatgtcttcaggtcttagatctaagtctctcatccatcttgagttgacttttgtacaagtgtgtccttgatttccagaagttgtgattgctttttatttatgctatctatttcactgaagaattttccttttatatcctgtgttatgttttttatttatttaagctggacttcacctttcctggtctttaatt

SEQ ID NO: 477452 - DNA, 603 bp, Homo sapiens
tggagaacctttatgtctagctcagggattgtttatacaccaatcggcactttatatctagctcaaggtttggattgtaaatgcaccaatcagcgccctgtcaaaacagaccactcggctctaccaatcagcaggatgtgggtggggccagataggagaataaaagcaggctacccgagccagcagtggcaaccccgagaccacgaacccaccagaaggaagaaacgccgaacacatccaaacatcagaaggaacaactccagacgcgccaccttaagagctgtaacactcaccgcgaaggtctgcagcttcactcctgaagccagcgagaccacgaccacgagcccgccgggaggaaggaacaactctagacatgccgccttaagagctgtaacactcaccgcgagggtccgtggcttcattcttgaagtcatagagatcagatcttccactggtggaaatatacctccaggagttcatcttgcctttagcagaagatgactgtggtccatttttcaccttgatccacagtcatagaaaatcttccttcatctcacttctcagtccactacttcagttgggccatcatgaacacttgagaga

SEQ ID NO: 477453 - DNA, 548 bp, Homo sapiens
cgacactgactagtctccataactggcagggccagagctcctgggggcccaaactgggggcagcacaacctccaggactcctgcagcggccccgaggtgaggggctgagggcagagcgaagggcatggaaagggcaaaggtgcctgttactttgaagaactggccaacgtccaagttttgtatctgcattcagttactcgcggaggtttggggccacagctttgtcctcctgacagacaagcttccagggacaccagagccctggccccaatccatccagatgcttgggcagctacgtcagcattacaatatccacgttaaggatgagaagatggaggctttggctggttatgtaaacagagctagtgaattggatccaggcctgaacccagttccagaagccttgctgttgagcgcaagtctattttatacactcagtgacttacttaaggtcaccccactgaagttcagaagggagaagtccagggctgatatgggcatctcctctttggccctcattttcatgggccaagatggctactagaatt

SEQ ID NO: 477454 - DNA, 724 bp, Homo sapiens
cagggatgcccaggtccatagccatgggtgggcagccacagctctgcccagggaatgtgaggctcttgccctgccaactcagaagtggggcagggcttctgcctgttcctgccttcagcaggtgttctccagtcttcccagtcttcatttgtgagaacttctcccctgtagattgttcctttgctttcttaggcccaaatggtggagggggaggggaagtgaaaatattcttcaaagatgaaggcaaaataaaaatattttcagaaaagcagcaacccaaaatattaattgccaagagggaagaaatattcagagaaaagttgaggaaatacagctggtcctgggggcatttgttgattcttggtgaaggtgagtgtggggatccaggtttggcttgggtagagaatcccggatggaggacaaataaatcagcagagattttggtggtcacatgggacagaagcaacaatattggcaagctgaggagcatcttgccctggattccagagaaatttactgcatgatgaatacatgataatttctgctgccaaggaggtcatagtcgcgtatggaagacaggtctaaatgattatataagaagagtgttgatttttgtttcagtaaatgctaagttactgacactatctcatttctgaaaagatttagttttagggctttattagggaaggtttattttggttctgtaaagacacagctcttaatt

SEQ ID NO: 477455 - DNA, 1226 bp, Homo sapiens
cccacagcgcttctctccacagaagaggcagaggcgcagcagtctgagatccatctgccaggcagcagcccagcagggagaggggtgtccgccattgctgaggcttgagtaggtaaacaaagcagcctggaagctcaaactgggtggagcccactgcagtgctgcaaggcttgctgcctctatagactccacctctgggggcagggcatagctgaacaaaaggtagcagaatcttctgcagacttaaatgtccctgtctgacagctctgaagagagcagtggttcttctagcacggtgtttgagctctgagaacaaacagactgcctccttaagtgggtccctgacccaggtgtagcctaactgggagacacctgccagtaggggccgactgacacctcatacacgcgggtgcccctctaggacaaagtttccaaaggaaggatcaggcagcaatattttcagttctgcaatatttgctgttctgaagcctccactggtaatacccaggcaaacagggtctggactggacctccagcaaactccaacagacctgcagctgaaagacctgactgttagaaggaaaactaacaaacagaaagggatagcattaacatcgacaaaaagaacatccacaccaaaaccccatctgtaggtcaccaacatcaaagaccaaaggtagataaaaccacaaagatggggagaaaccagagcagaaaacctgaaaattccaaaaaccagagtgtctcctcttctccaaaggatcacagctcctcaccagcaatgaaacaaagctggacggagaatgactttgacaagttgacagaaataggcttcagaaggttggtaataacaaacttctccgagctaaaggaggatgttcaaacccatcacaaggaagctaaaaaccttgaaaaaagattagatgagtggccaactagaacaaacagtgtagaaaagaccttcaatgacctaatggagctgaaaaccatggcacaagaacttcatgatgcatgcacaagcttcaatacccgattcaatcaagtggaggaaaggaaactctacaagccagaagagagtgcgggccaatattcaacattcttaaagaaaagaattttcaacccagaatttcatatccagccaaactaagcttcataagtgaaggagaaataaaatactttacagacaagtaaatacggagagattttgtcaccaccaggcctgcctt

SEQ ID NO: 477456 - DNA, 847 bp, Homo sapiens
gttcttttccataccatgtggttccgcttctctttttcttagttcctatgaaaaccggttgttgaaaacagcatggctcctcctcctcctcctcctcctcctcctcctcctcctccttctctctctctctctctctttctctctccttctccctgcttacaccatggctgatcgacccagagctgggcaccagatccaagctagaccaatccagtgtcccatctctccagctacagctgactgttccaggggtcagcacctatctgaagtcgtgccagatgaagagaaacaccatgacaatagccatgcagctgacctagagaccaacttgtccattttagagcaaaacagagggctctcagaaagatttcttcaagaagatgaaaatcacaaaatacttcatatgcttaaatatactgagaagagatttatgttgctgaaggaaagtttgggattgaataatcagaacgtaaagactaaacaaagaaaaacaaatgaagaaagaaggtacttacaatgccagggaaaaacgaatgctaggcagctaaggatgagttgtcctcactgtccctgtctctgctatgaatagctttttcatggacataataatgtaactacttatgattgatctcatttgaattttactacatatacatagggaggtttggaaaatgtaaaatgtgtgtttgcatgtaaaagaggtcacatttgcatgtgaaagaaagcaaaatcctcatttttcaaagggggaaagtcagtatataaggactaaactgaaaaaaagtaaaattaagaagctcacttgtacaatgataggaataataataataattgagtctgccttcac

SEQ ID NO: 477457 - DNA, 765 bp, Homo sapiens
gccctataccctccaacatttggcagtatttttgattgtcacaatgtggagggacaggaaggcctcaaaagtcaatattgctgagcttgagaaatcctgctctaaggaaagtggaataatgaaatcgaagcattgccagccccccttcaccttctgccatgagtggaaggagcctgtggccctcaccagatgcagatgcccaatcctgaacttttccagacgtcagaactatgtgccaaataaacctcttttctttgtaaattaccccttctcaggagggaagaaaggttcaacatggtattatacaccaatgcagagcctgtgggacacgatagccttgagaagaggagatttgcatcctcaggcaccagctcggaattgccttaggagcgtgggagcgggagagggcggagcagaggccatgaagctggtctcagagcctgtcccctggagtgtggatctctgctgaccggcccgctgccgcgctaataaatatcaaacccttcaacgggaaaataaattatccccaactgctaggcaaaacagtcttgataaattgtcgttttagccaacagtgtttaaagtaaaatcagtaaagtctgtgctagctagacttgctgcatcagcctcatctgagaaattgttagacatgcaggttctcttttgttggtggttaatttttcttaacttttattttaagttcaggggtacaagtacaggtttgttacgtaggtcaacttgtgtcatgggggtttgttgtacaga

SEQ ID NO: 477458 - DNA, 1411 bp, Homo sapiens
caatttcaaggggcctaatattatgggtaattggggcaccaaaagaggatggagggaaagacatttgaagaacaatggccctaaattttccaaatttgatgaaaactataatcccacagatccaagaagctcaacaaacccaaatccaagcaaagaaaaagaaaaaagaaaaaacctacacccagctgcagcttctcatgcagcaccagcttttaactctggcaaagtaaatattgtcgccatcaatgactccttcattgatctcaactacatagtctacatgttccagtataattccacccatggcaagttccatggcactgtcaaggctgtgaacagaaagtgtgtcaccaatggcaatactatcaccatcttccaggagcaagatcccaccaaaatcaaatgggttgatgctggcattgattatgctgtggaatcctccagtatcttcagtgtcttggagatggctggggctcacttagagtgggtagccaaaaggatcatcatctcttacctctctgctaatgcccccatgtttttgaagactgtggatgtcccctctgggaaactgtggtgtgagggcagggctctccagaacatcattcctgcatctactggtgctgccgagggtgtgggcaaggccatgcctgagctgaatgggaagctcactggcatggtcttccatatcctcactgccaatgtatcagtcgtggacttgatctgccatatggagaaacttaccagatatgatgatatcaataaggtgaatataggaaattctagacaagatcttgtaaaatcgaagttcagaataacagccatccttaagagagcagccggtttagaattcggaaactggagggagaatttcatgaggaaggtatccaggaacaacataaaattgatacatcatctggctttgaacatgaaattctttcacactctggcaaaaatctattgccaagagaaccgtcataaaagaggcctaggcagtgatgacagtttggagcttcctgtgatttcaaccccaagtatcaggtatgtggtaaaggctgtacagtgataaatgttttattgatgttaaaatgtgttactaaaagcagtaacacattttaattgtttcttctgcaaatatctattgagtgcctgctgtgtgttaggcagagttctaagcactgataatacaagagtgaatgtgttagatctttcagtggggaagacagaaaatgaatatgtaaaataatatgtatttaaatttatagattatatgtgtaaatttaaataatcaatcagtcaatcaatctttttgctaagtaacatattgcaccaaaacttagcaccttaaacaaacagatgcttgttatctaagacagtttctgagggtcaggaattcaggagtgcctgggctggt

SEQ ID NO: 477459 - DNA, 584 bp, Homo sapiens
gaaaagtactagaatggtgcttggtacacaagccaagcagcagatgctcattctctgcagcaccgcagcagctctgggaccatccccggtccggcattgttcccagagcttctgtttgaaagtggcccaccacagggacgacatgcagccatcggggtccttccactggaaatgcattgtctttttaagtctggccagagccagggcaggttatggagaaagcactagtctactgaccgatggagaaatggaggaaagaggaaatgaatccacgaaagttaagtacctttctaagaggtggcccccattctctctgacggagcaccagctttctctgaggggcttcagccaaggttgctggcagctctttgctgacttcttgtcaactgtgtcactagagagaaaaaggaccatcttccccaactccatttagaaaaatctgggcaaaggcttctgattggctcagcacctgtctttctccaaacctagaccaaccacaggggctggagggaaggaaataactcaagactcaccgcccttcctttctgatgagaaattttctgatgggctgagatggcctcaac

SEQ ID NO: 477460 - DNA, 477 bp, Homo sapiens
ttctcagaggatgaaactgaggcacagcgatgaaataagttgcccaaagttaaacagtttgttagtggtggatacatttgtgattgcactcaagctgagcctgggattttgtgactcaaatgtagtccagagaaagcggcaggaagacacaaaggtttgcagaatgcgtcaaaacattgggaaaagaatccacgtggagtatggggaccctgttcaagagctggcatctcgactgatttcaggccacagaaacacagggatgtcaaggccggagtctgcctactcacaggacacaaaagacaacgaaggccaacaccagttattctgtccacagagcacgcaaccagccaaccacccctggagccacctgaagagtggcttggaggtgtggccatctctaatcaagcaagcacctgagatctgagtctccttccaaggaggaggaggaggagcaaaggtgtggcggtcaccagggaa

SEQ ID NO: 477461 - DNA, 592 bp, Homo sapiens
tatctagcacctcttgttctcagatgagagccctagttcccacttcgacaacatgcaagagatttattggaagaaaattcctgtgaaggataaaaggcaaagagcaggaatgggcaaggacagtcttagactccaaggcgggtctgacatctgtgaaagaagagtgtctgacaatgtaatagaaaagaaaaacccattttctggggagaacttcaagccaactgcagaaatttgcgtaagtaacaaggagtcaaatgttaatcaccaagacaatggggaaaatatctccagggcctatcagaggtcttcacagtatcccctcccatcacaggttgggaagcctaggaggaaaaaatggtttaatgggccaggcccagggccttgctgctttgtgtcatctcaggacttggttccctgcatcccagtcatggctaaaaggcgccaacgtacaactcaggccattgcttctgagggtgcaagccccaaggtttggcagcttccatgtggtgttgggcctgcatgtgcacagaagtcaagaactgaggtttgagaaactctgcctagatttcagagaatgtatggaaatgcctgg

SEQ ID NO: 477462 - DNA, 454 bp, Homo sapiens
cctgagctgcagaagaaagttccctatggcagagaacagagaaaacatgcatgcaaaagttttaacaaaacaaggaattgaagctggcagtgaggcaggcagcttccagaagaaacgctgctctgctgacaccttgagattagtccagtggaacccatttgagacttccgacctctggaactgtaagataatacatttgtgttgttttactccgccaagtgtggtaatttgttatagcagtcataggagactaatacacaccccactgccactctcctggcagtggtggctgaattctggattggaaaggaaatggggctacaaagaggccacagagtacagggactcgggagagaaaccacctggattcagaactcagctcagtcacctgtttgcagttacccttagtgaagggatgcaacctctctgagtgttaatttcctcatctgtaaat

SEQ ID NO: 477463 - DNA, 640 bp, Homo sapiens
gtccagttcattgatgagaaaatggacactcgaggagataaaggctccagtcctgggggacaaatggaggacgagagcatctgggcaggctcctggctgctgctgcattccagatggggaccaaccgggtgtgggttctatgtggtgaaagttcacacacactcactgacgtgtgaatatccacggagctttatagccatagctacacccttaccgtcactccctctctgcatcaatctcaggcatttccctaaaaatgcactcccaagtccagggttaagccatgttttccagctcctagaagcagtgctggcagcagcagtggttgggtccatagtggtggtcaaggcaggacccacagcaggaagactctggtgctacagcagcagcagcaacgtggttctaatggcagcagcctctgtgatgaactgaactccctgggtgcatcattttgcctttttctccatggcctgaggagcagtagcaactctccgcagttactaatctgtggtttcccttactgttctccttatgccatctagatttttcagtcaactccccaaatagaattctctctgattgaaatatgccatctagatttttcagtcaattacccaaatagaattctctctgattgaaa

SEQ ID NO: 477464 - DNA, 683 bp, Homo sapiens
ccaacattttcctgcctaatgtgaaagaaaatgaagcatggggtcaggaggctttgaggccaaggctgcaggatggaaggcagttccctgtgggcttccacactcaggactcctgcttttcacttccctcctgggtttctctatgctgtagacaccagcactgcttcccaaacagacacaagtagcccagaagtgctgggagcaataatggccccaggaacaacccataagcaatgtgggcaaggagctgatggagaaatagtcctccagtcagtccccaggtggataactctgagatgcattctatgccctcctcagaggttactggcaagactgaatgtgagaggaaacctggagccagtgcgaagaacagcatggcagcatcaggcaccagccaccactgtccacacactgcccggcgtgcggggtccagaatgcaatcagaacaattacctgaatagtcaacttcttcccccacaactggcttgctttcccggtaaagacggtgtcttgtcacatccagaaaggccaaagtgtgcccacttcctggcaccactatggacagaatcctgggagctgtgctaggagagcatgtcaccaagaaacggcaggtcataggaagtgggggcaatatctctttttaaatcaaagagagaggactgattttaagacagaatccttat

SEQ ID NO: 477465 - DNA, 537 bp, Homo sapiens
cgggtttgaatcttggccccagcactgattgctgatgactttgggagtcaaaatatccttaggagagaacatctttctgagtcaaacatcttttatcttgcataaagattctttggagggtgtaaagtgttatcagaaggagtggtttagggcctacagaggtgtccgtgtgacacaaagtagatgtggggcatgtgacatgaatgtgagctgcccattttctctgaatggtggcccagcacctggagggacagagtacaaaggactctggcatgttgaattcctcaagcaacctgctggtaaggtgggccctattgtttctaagggcactgacaacagcatctgtgttctctgtgaaggatgtaaccagagaggtcaaggactcctaagaatcacctggtttattcctgttcctctaacacgctggctcccacgtgctggccttggaccctgggagggctgaagggttactgcagtaggtctaggaagccacgagcacatccagcaccacaatttttcaaatgtttccagatgctt

SEQ ID NO: 477466 - DNA, 604 bp, Homo sapiens
agcagtgctttgcttgcagtatagcagaagcttaggtagagatgaggaatgccagaagcccaggtagagatgaggaaggccagatgtttgcattggtttgggtgtgggattttgccaggcaggtgcaacaggaggacagatggagtaagggatttgaagatattggcaaaggagcggctgaactaatgagctgtaggatctggaccaggaagagaagaacgatcatcaatggcaaatggcagttgcagagaagcaacactgagagctcacttcatgctcagaagagaaggcagcttctcctcacggtttccagaagatgtcaacacctgtacactttacggaaggacacaggcctgcatctgactggtgctgtggaattcctgcaccccagactggtgtcagggagtaaatctccaggcttgactggagcagtctggagtatgaactatgcaaactctaacgatgatggcttcaaatcctatagaagcttacaaccccctaagccttaagaaggatttttattttttattttttaactagaaaggaatgaagaaagggtcataaaatgttaaagtatattgctgactatattgctgacccatat

SEQ ID NO: 477467 - DNA, 1111 bp, Homo sapiens
agtccattttgtgcttctgcaacagaatactacagactgggtaacttacaatgaactttattgaatcatgcttctggaggctggaaaatccaagaccaaagggccagcatctggtgaaagccttcttgctatgtcataccatggcaaaaggtggaagggcgagagagagaggaagaaattataacatcttctggatggcacgctacccagtctgcagccctgctggccatgaaaagaaggcatatctaggattgtcaacagtgtgtaggattccagactcatattcaggcttcagagcatcctccataaatcctggacagaaggtttttggggaacaggtggtgtttggttacatgaataagctctttggtggtaatttgcagccagtgaacagggctaagaacttgccccggaccatgaacctccacattgaggaagcaagcagactcacagtttttcggcatctcagggagcctgcagtggtgatccagttccttcaaagggtctgtggattatctcagctttcctggtatgttcctgcagtagttcttgaagcaaaagtctatgatgtgagtcttcacatgctgctctgtccgttcaagtggcagctgcaagctagtcctacctcctatccgccatcttaatccattgtgattaaatctattacaagcctcttatgggtaataacacagaaattggctatctgaatggtgaaaaatctaatccaatcacaacagaaaaaaataataattaacaacatggctgcatctaagtacatttgaaattacctaatataaactttctaaacttgaaatatcatttcctggaatttttttactttccttattttgtttttagtgggaaggggtatggattgtaaatgaacttacagcaagcaaatgaatagggaaaagtttttaccttcagtttcagcatcatactttatctttcaccattcccagggtataaatatgaagaaaatatacccataacataaattataataaacaatataattccatatatgcaaattagttaataaatggttcttactgaagcaatttctaagcaatactctataacctataactatagctttaaattgttaatc

SEQ ID NO: 477468 - DNA, 548 bp, Homo sapiens
tcctcaaagagaaagaaagtggggcctgtacccagcaaggtatgctccgtaaaagggcagctcaccacttggaaatttaccaaaatgcaattgacagaataggaaataattttgccctagagcctcagaaagatttagacactgccttccaggacctggagacagaggccaagttctttattacacgggaaatgctttcagcaatgatttggatagagttggtgcccagggatataatctggtgggtagagcccacagcagggagtccaaatggacacctgacactagagaggcaggatgtcagtctcagacctaaggatagtgggaatcctttgaagtattttaagcagcctgacagggttggtctccaaggaggagcctgtcattttccaactgcagctgtcactgcttccaggtttatgtttttcctcttctgtgagcccagacttttccacaacatatactggtcagtttcataaactttctttaaaaggggtggccgtgagtgtaattttccattctgctttccagcgcactcagctgccttt

SEQ ID NO: 477469 - DNA, 509 bp, Homo sapiens
tgcagccctgctgctgggttaccaaagaatgactgactttgtatgtgcccacattaaaaatggtgtcctgcttctagtcctggatctgggaaaatgcctgcagcttttcctggtgtctttccctcatggtgtctccaagactttccccatattaactctggctcaggagaagcaaagtgctcttccttggcctgggttgctcagatccccagtggaaagaggctttgtccggcaaactggatattctttaatcccttccagcccatcttgtgctgagattctgactcctttctcagggacttcagtctatggagtggaaagccttttggttgttggtgtggataaaggtggatggacagacagtgtcatcggttggttggtttgttgtaataaagaaatagaagaaggcaatttcaggtttttctctatcactcagtttctgctgccaatataattcttcttctttttcagtttgagttttactttttatttcagtagtttttggggag

SEQ ID NO: 477470 - DNA, 522 bp, Homo sapiens
cctcacttcctagacgggatggtggccgggaagaagcgctcctcacttcccagactgggcggccaggcagaggggctcctcacatcccagacgatgggcggccaggcagagatgctcctcacttcccagacggggtggtggccgggcagaggctgcaatttcggcactttgggaagccaaggcaggcggctgggaggtggaggttgtagcgagccgagatcacgccactgcactccagcctgggcaacattgagcactgaggagaccctggagagggagagggagagggagcgggagcgggagcgggagcgggagcgggagagggagagcatcaagtttgtgttagcaattgagcggggtgcagttaaagcagacatgaattgcagtgacagaagcagtttaattagctgtcaattttctaaacaaaacgttctggtgtaggtcaggattttgaaactttcatcttggtttctgcaggaactggcaaggttgaaaagggaagcggctggagggtgtttcatc

SEQ ID NO: 477471 - DNA, 996 bp, Homo sapiens
gcggctgttcagtttttaaaaaacgcaacaggcccgtagcactgcaggatgggcaagtgtcgtggacctcatactgctaggagtctctgtagtcaccaacaagatcagaagtggcatgataaacagtacaagaaagcccatttgggcacagccctgaaggccaacccttttggaggtgcttctcatgcaaaaggaattgtgctgggaaaagtaggagttgaagccaaaaagccaaattctgccattaggaagtgtgtcagggtccagtggatcaaggatggcaagaaaatcacagcctttgtattcagtgatggttgcttgaaccttattgtggaaaaccataaagctctggttgctggatttggtcaaaaagctccaacaaatgggcagctggccggatatgaagatgtttcctctcctggccttctacttgagggagacagggaggagctctaatagtttacataggactcaaacactgtctgtcacctagggaaacagtgcacgtgagatgacattgcaattttacatgtctcctcatgcattcagtagagctttattttaggtttatagacctgaagatcatcccacaaggtagaacaactcatttaacctatttgacttggccccaagtgtaatttgtacatagattaactattctgaagaattccaatagaactccctggggggaaaacacccattttaattggcatacaccagagtcactggaatcagttactaaattacaatttccttacaatttggaagggtttggggattgttattgttttcctggtaaattactggatcacactggtgtcttggaataagtcaacacattttaaatttaagtttccataaactgtagctcaacttcccaagttcctaggggattttcactggcccagactcaggaagaattttcttctatgggatccaagacttcagagaccaaacatttcctgaagactttcctctgctttctgacctccacct

SEQ ID NO: 477472 - DNA, 1897 bp, Homo sapiens
cggaggttcccctgactccgtgttgctcctggatgggtgaaggattttcttaaattttcaatgaaatgccagattcttggatacgatgtatgtgggctttcctatagtcatttcagtagatgctatagatattatggtatttgggaaactatatttcaatgtaaagaaggcaaggtgtcatgctttgacattgatttggtggaacttcctagagacttgttgaatggttttgaccaaaatgctgatagtgatatggacagtgaagtccagattgaggtgatctcagatgaagatgaggaacgtactggcaactggagcaaagacaacagagtaccaacaggatacctgaagcaaaatttgacagaaatgaagggagaaatagacaattcaacagtagtagttggagactttactatcccacctttaataatggatagaacaactaagcagatcctagaagaacggcaagttccagttgttgtccagacacctattgtccagatgcaactgtatcaccagagaagaaggggagtaaagatttagagttgattctaagggcagagaataattattgtaggttttaagccaaagtgtaactatttatgtattgcttaatttaaagattacccttggagatagtctacagattgggatactgtattttactcagtttacatttagtttcaggatgcttgcattctatgaaatgtatttcaagactccctaaaaagacaaaatagacactctttaagcagtttacaagatacagatctttatctcttacaaaggaaaggaaacaaggaagctgtaaataataagttctgaatagaaatgacataaactgcctaatcaatgtcttccagaactggcaagtgacacctctttgttttttgcaaataaaaaccttcttcccatcacaatataaaccattatctctgcaggcaaggtatatttagaaatgtacaaaatgtacatttcctgccagcctctagatcagtaggtggagatctaaagtcatgcaaatattacagtaaatgcaggcaaccaatttctaattattccatatcagcagatttgtgaggaatataatttattaaaaaagaacagtttatgatcagcagaccttggttatgactgtttaggaattcagtgcattttgatctaatcacaaaatcaaaatattcatgaaacacaatgatatctccccaaagcagccgggcagccattaattttgaaattcgggtaatttattaacacttatctgaagctgtaaaagcttacctctgtgtttgtaatacggagaaaagtgaaagcagttttaaaactgattcctaatgatttataatggtttgctgtaatttgagccagaaattcaattaaaatgtatgtctagttttgtttcaagatctttagttaaaaattctattaaaattctatttccttcttgcattaaatgtatctgttatctgcatatacaagaaatataagaaaattctatcatttattccccagtccccataaatgctttaaaaagcattcatttttatttcataattctgctaagcaagagtctatgagcagaaatagtaaatgaagctaataattttttgaagatttgctatgtatagatacttcacatgtgttttaaacatttcaatctcctcaatagtaggtatattagacacagatgttatttatattttactgaagtggtagcagaggcaggacaaagtttcatagggctggtggttgaaataattgcaagaaccaccagcatggcttacctttggggggatgggagtaaagacaaaatgaaatgtgaaaggttcaaggaggatttgaaaggaaaatgagttttataggaaaaaaaagcacattctattaaggtgagattttt

SEQ ID NO: 477473 - DNA, 1337 bp, Homo sapiens
gttacagatgcttgcacttggaaacagaagcatgagttgccttaccaagtacacactggcttgctgcgggtgtagttcatcacggttttcacaggcctcgcagaccggaccttttcctaaagcacctgattcagccgatggcagctcccgattcacgaggccagagcagcgtgccaaccttctgcaggttccccagaaagaagagaagaatggctccagcaggtataaaggcaagtgtgcgctctcacctgagttcagggcagcaaactggggagacggcagtgatactgggagctttctccgcacccaaaggaatggacactgccttccacgaagcatctgtttttcgcacggtgatggaggtgcaccccgtgatgcagaagaggccacacctgctgagatggttaatttcaacctgtccacaggactgggctaagagaggcccaggttgctggcacacctgaatttctagtgggccgactccatccaattcattgaggactcagatgggacaaaaaggtaccgaaagagtaaacttgttcctcctcctggagttggggcatccaccttcccctggctcctcctcctggagttgcaacatccaccttcccctggttcctcctcctggagttggggcatccaccttcccttggctcctcctcctggagttggggcatccaccttcccctggctcctcctcctggagttggggcatccaccttccccggctcctcctcctggagttggggcatccaccttcccctggctcctcctcctggagttggggcatccaccttcccctggttcgtcatcctggagttggggcatctaccttcccctggctcctcctcctggagttggggcatccaccttcccctggttcctcctcctggagttggggcatctgccttcccctggctcctcctcctggagttggggcatccaccttcccctggttcctcctcttggaattgggacatccgccttcccctggttcctcctcctggagttgggacatccatcttcccctggttcctcctgctggagttgggacatccatcttcccctggttcctcctcctggagttggggtatccatcttcccctggctcctcctcctggagttggggtatccaccttcccctgatcgtggacactggcccctagtgctcaggtctgcagtttggggaattataccagcgacattccagggtccccaccgtacagactgtgggacttctcagccacggtgatcgcataagccaattcccataataaacctccttctatgtctcagtatttgtcctaatggctctatttctctggaaaaccctgact

SEQ ID NO: 477474 - DNA, 997 bp, Homo sapiens
gcctggaccctctgtcagtcaagatgtccttggcttttctccttgctgccctgttccttgtacagccacacctatctccaaaccagctgcatcgacacctttgttattatgaggatttgattaatgaagagctgttccaggatgaggagctgtttcagaatgaggaaccattccagaacggggagctattccagaatggggagcccttccagaatggggagccattccagaatgagaagctgttacagaatgaggagctgttccagaatgagaagccgttcaagcatggggaacttttccagaatgagaagctgttccagaatgaggagctgttccagagtgggaagctgttccagaatggggagctgttccagagtgggaagccattccagaatggggaatcgtttcagaatgagaagccattccaggatgaggagctgttccagaatggggagctgttccagactgatgagctgcaccttgtacctgcctcacacctgatcacatagccttgatgccagaaacctagagtgctctatttaggaacgttaggctggcagcaggaacccctgaagaaactcaggacactaggtgcttgagcgcgcagctaacccgcaggagaaacatctcccttctgctgacctgaggcttgactcctctcccacaggaggggaaaagaggcctccacccacagtccactgttatcctaggagaaatcctctgccctcctgcccaggaagtgacagagagagagagaagctgaagctgctttaaccttcaagatgaacctatttcttccatgaggttttctcttgcctgtacacgtatctttatgtccacgagacacatccacactctgctcgcacagcgttgccagggccagtgccttctctcccatcctgtgtttgcatttgccatttggtgggcctgtcctgctgaccagcaagtctctgtactgaatttggtgactttgatcttatgattcatgtttcccagc

SEQ ID NO: 477475 - DNA, 1476 bp, Homo sapiens
gagcctcacgcatcaaatgacagccggcagctctgtcacatcccagacccaatacaatgcccagcttgtgtcagcagcttgcagaagtgtatggatgggactccaaatgggatgaagacccacaggttttttaattattgaattctgcatctgacggcgttgattcataatgaaaaacagccagcacgccttcaacctacagcaagccctctgctgcattctggaggcgctttgcctggtagatcctcccaacaccccacaaggtcgcattactcccccagacctacagcaagccctctgctgccttctggaggcgctttgcctggtagatcctcccaacaccccacgaggtcacattactcccccagacctacagaaagccctctgctgccttctggaggcgctttgcctggtagatcctcccaacaccccacgaggtcacattactcccccagacctacagaaagccctctgctgccttctggaggcgctttacctggtagatcctcccaacaccccacgaggtcgcattactcccccagacctacagcaagccctctgctgccttctggaggcgctttgcctggtagatcctcccaacaccccacgaggtcacattgctcccccagacctaaagcaagccctctgctgccttctggaggcgctttgcctggtagatcctcccaacaccccacgaggtcacattactcccccagacctacagaaagccctctgctgccttctggaggcgctttgcctggtagatcctcccaacaccccacgaggtcacattactcccccagacctacagcaagccctctgctgccttctggaggcgctttacctggtagatcctaccaacaccccacgaggtcacattactcccccagacctacagcaagccctctgctgccttctggaggcgctttgcctggtagatcctcccaacaccccacgaggtcacattgctcccccagacctacagcaagccctcggctgccttctggaggcgctttacctggtaaatcctcactcttgctacccaaggcagagcatgcagcagcagcagcagcatcacctaggagcaggtccggagctacccacaatctgcaaaatcaaaggggagacggcggcggacgtgcagagcctccgagagccggatggaggacaatgtcatcagcgggccactgggaccacctcagccccaggcaaggcccaagcctgcctgctccagccgcccgtggtcctccgcagccaggacctgctttctgggctggcttcaccccccaccacttccacagcccagcggtgccctccaggctccaccgtcacatcgcatgtgtgttccctgcgctgctgagggacagctcactgggtcttcctgtttcaaattcttggggactctgtacttgaggctgggggtgccagcagctgaggaggggagggccttccgaaagcccgtctgcctggaggctg

SEQ ID NO: 477476 - DNA, 569 bp, Homo sapiens
tgttttggggttcgtcccatctgcacagggtggcccatggtgatgctatgtggatgtgcgttgagatccggaatcagcagccccggacacctgagacagggggtgcgggccgtgtcccctccacaggtggagacagtcagcccctggctgagatcgccgtcctctcattccaccctggtctgctggttgggaccacgggcagcgagtccacggcaggactcccgagcagtggctgtcgccggtcaccccggacggctcagggcaacacggaccgtggcgccccaggaaaggcgcccacagccacagccagcctggatggggcccctggagctgcccggaaaagccgaaaggatccaggaaaacactgcaggagaacactgacagaggtgtcagacaaaagggctcaacttggtatcactggaaacccggccagtagctcatcagctcgtcttccaggcaggttgctgcgatcctggcaggcctgacggtgtctttcagatgtccctttattgtctaaacttctgacgacttgtgctcagtgtctggcaatcttgagaactcttctctgc

SEQ ID NO: 477477 - DNA, 1154 bp, Homo sapiens
gctgatcatcctgagagggctcagtcagagactcacgctgtacggtaacttttcagatcctttattcttctcagcagcaggttatctttgtcaaatcagaatttactcagaagcacacgggaaagccatgaatccacatttgctctggttgagtcggggcttggacgaccgagaccacgctcctcaccatggttacccatccaggaaagactcaaagagggctcttcagaaactctaggactcactggagcagactgaacattccagatgtaatcaaaccgattaattttgcagatgaggacagtaaagctgagaaagcccggcccacccacctgaactcctcagtatgctggctcatggccgtggccagaatccacatgctcctggctgccctctacctcggggccgttttcaagtacaccaagattctgattctgatgtctgaatccacctgggtcagctctatcagtagcttgctgaggaccccgtcactcagaagtacgaccctgcagcctccactgcaggaaagccaccgtgagaggccggtgtcagaggcctcagggcttttccaggacttttcagcaacagaaacctgggagttttatcctaataaaatcagagctgggaacgatgcatgccacacagctgttctaggaaactaccagaacctatctttagccccactggcatggacacagcctcttcacaagccgggtgtgtctttgaagagactggtgcctggaagggacttttgtacagtagaataattttttaattaaaaatttataaaacttctactgtatcttttatgtctccaatatattaaagaaattgcttactgtatcaaccaaatgattcagattcaacaccagttaatatgaaatctaggaaacaggttgtaaaatgtcaattaagaaaagaaaatgaattaaagaaaatgcacaaaacaacaaacacccaaagatgttcagctcaaatataaacaggttagtttcatcatataattgctggagtaacttgttttttaataaaaataggaactatgtataatatatcatgtagcaaattgttattataattgagtcatttttaagtagccaaataattaatatagtcctactgttttaattgttccctgtatagaagatattttt

SEQ ID NO: 477478 - DNA, 1352 bp, Homo sapiens
gagcctcacgcatcaaatgacagccggcagctctgtcacatcccagacccaatacaatgcccagcttgtgtcagcagcttgcagaagtgtgtggatgggactccaaatgggatgaagacccacaggttttttaattattgaattctgcatctgacggcgttgattcataatgaaaaacagccagcacgccttcaacctacagcaagccctctgctgcattctggaggcgctttgcctggtagatcctcccaacaccccacgaggtcgcattactcccccagacctacagcaagccctctgctgccttctggaggcgctttgcctggtagatcctcccaacaccccacgaggtcacattactcccccagacctacagaaagccctctgctgccttctggaggcgctttacctggtagatcctcccaacaccccacgaggtcgcattactcccccagacctacagcaagccctctgctgccttctggaggcgctttgcctggtagatcctcccaacaccccacgaggtcacactgctcccccagacctacagcaagccctctgctgccttctggaggcgctttgcctggtagatcctcccaacaccccacgaggtcacattactcccccagacctacagaaagccctctgctgccttctggaggcgctttgcctggtagatcctcccaacaccccacgaggtcacattactcccccagacctacagaaagccctctgctgccttctggaggcgctttacctggtagatcctcactcttgctacccaaggcagagcatgcagcagcagcagcagcatcacctaggagcaggtcccgagctacccacaatctgcaaaatcaaaggggagacggcggcggacgtgcagagcctccgagagccggtggtttccacccccgaggtgccaccgtttccggcccaggaacgctgagaccttcgcgctcccctcgcgtcacagccaagtgtaactgtaagaagcagctgggtgatagagcaagactccgtctcaaataaataaataaataaataaaaataaagaaatagtatctcccgtcttttggtgtctaaatgaaggctgcttttagaaaggggttgtagtgtttgttctgcttggtccgcttagggttttttaaccctgccttctgcatttccagtgggacaggaatgttataatgggcttggtccgcttagggttttttaacccggtcttctgcatttccagtgggacaggaaagttataatgctgaaaaccaccggagttcagtttgttttacagaggaaaatagaatggggaggtttccccgaagtgtccttcttttcaagatgattgcttgcct

SEQ ID NO: 477479 - DNA, 712 bp, Homo sapiens
tacgtaagccagggcctccgctcccattagaccacagcgcagagagatcaatcaagatggtggccttgcctgtgcaggttctgccaggtcaagtgaagcgtcaagctggagaagatctaaatgctgacagaatgctggaacctgcagccatgtggccaggagacagattcgcctccagacttcacatgaatctttttgggcagtttaaccagtgtcacccagaaaccaatacccaaggcagtatcaaaaatagcaacacgctcagcaaacagcatctacagctgctcaggaaagaacagccttcattcaaatgcactgcagaaaggacagctggtcacattggtctttcagccttcctgctgcacatatttagtaacagagtcggtggcagtttctttgaaatgggaagctcaggtcttcgggattcagatcctggtcctgcccctccacctgctgttctctgtggcctccaccaagcccccctaaagccccttgatgttccttcccggcctccttctctagtagcttgtccattggcgatttgacatttaaaaatatcttcagcagtgtaagaagccctttgctagccttggtctctctgtcttcttcctttgtaaatctatttttggagatatagcctgaaaatgtggttgtcaaggtaaacatctctcggtagcaaagaaaatcttgaaggattttggaactgattagt

SEQ ID NO: 477480 - DNA, 864 bp, Homo sapiens
agcgccagtgttggcagtatttaaagtttctaaagcctccctggaggcttgggctggagggtcagcaagtgtatctagaccaccagcagtgtgcattgggctctgggtagtgccaagcatgtgcatgaatcatgggtgtttttttctacatcacagggggacgctgctctgctggactcactccattcccagtgtcctttgccttgttaccaatgggaggagaactggctttagcgaaggctggaactctccaactcactcactcagccatcgttccttatctgacaccccagaagtctgataccagaaatatgatcaagaaaggggtcgtgggaaaaacagtggaggtaacccagagatgctggcatgagctgtggcccatgggagaccccatgcccaatctaaagacattcacatttcaggaaaataaagaagtcaagttccaagagataacatacctattggctgccaattccagacctctggaccagatggtggaaccttcctgtggttgttctgcatacacggtccagggttttcagttgcgctaagcggcaggaatatggaaaagtattcctactccatctttccagatgccaacgttccccactccccaagtcatgttcttgtacctagtctagatttttcacattcttgtactggctctccttgaaactttaggaatatttaccatgtgtcttctgacaaaattatatcagaacagtattaaatggatttaataagtatccaggcatacctgaacttccaattgtgttttctaattaaacaagatgagatgcaggaatagtctgttctgtacacgatgctaggttttgtgataagtattacaagcatggatcatcc

SEQ ID NO: 477481 - DNA, 992 bp, Homo sapiens
atcccacggtgatgtttaatccacacagtgaaaacaaaggcttaaaacaagactcgtctgaaagtggctatgtgcaatacctgcaagatgactgatggagagatcaggtacaccccagacatcacaggaaccaaacaatgccccggaggaatgttgtggaaggtctacccaggaaaatctggcaaagctcccaaagcagctgggcagcaagtatacactgatggtcgacagcatgctggggctgagcacagtcccgggcctgtaatgtttgacaagattgaagtcgggggacagcagctctacagggagctgagagagaaagacagcgggagaatgagaataccgccaaaaccaatacaagcccacttcctaacttgggtgaacagcaccaggggagaactcaattactataaaacaatcatcctggttcttcagaatgtgctagactactggtttagacccagagaggagagcctacatggacttcctgctatatttgcaggttaagaactttagccagataacatttgctttttccctgaggaaatgagcttcaaaagcaataagaaatcttatgccttattaaaaggaatatttgacaatagctgggaggatattatgtttgtcttaatcatatttgtcaggcatcatgattaggcacttctaacatattttagaaacaagtacatataaaggattatgtaaacactttcaataataagataactcattattgggttataataaatacttttcatatatctcaacctgggaaacaaaatattaaatacaaaattttaacaacaatggcttatacctttgaataacatgtattatctcttaatagtaagactgtatatgagattttacaatcttagaattatttgaaaattgaacttcaacttgtcattaacattgaaaagtgccgcatttgcaaagtcattatggaagcacataagcataagcacatattaagaggaggggaaaatggt

SEQ ID NO: 477482 - DNA, 682 bp, Homo sapiens
ctaaaggtttgtgaaggcaccaatgagcactctgtgtctagctgaagcatggcaacccgttggggtccccttacatgctgtggaaggtttattcttttgctctttgcaatcaatcttgctgctgttcactctttgtgtctgcgctgcctttatgagctgtaacaccatgaaggtctgcagcttcactcctgaagtcatcagtgagaccaagaacctaccaattctggacacactatggtctccaatttcagtgaaagcaggacttagtgaacacctgcaaactcccgggtacacagtgtgtggcctgcaaaagccactgacacagacaaaagctaaagggccaagcagtggcaaatctcagaaagtgccagcagaagtccacttcccaagggctctgaccctgggcatttggctggcaaagctcaacgcggtgtttcatcaggggcaactagctcacatggaccccatgaaaatgcattctgactcccagaaattaagcacctattaggaatattacactgattaccctatagagaaaggaagactcagggtgggcttataaagtgtccatttttgtaagctttctggctaagaattaatgattactggctcctttaattttaacaataaaattggcgattgttggagagaggtcaaatttaagcatcacacaatcatttca

SEQ ID NO: 477483 - DNA, 632 bp, Homo sapiens
aaaccaagacgcccggtgcacggatgagtggacttctgcagcagtgccctcagaagtggcagctcgggctacagagaatatctggtgcaggcatccttggcagtcatctcgggcagcaaaagttcctgatggtgctttatgagattcgcatatacacaggcacaatgacaggtgcagaaacagagtctaatgtatttatcaacctcatcggtaccagaggtgattcaggaaaacgaagacttcatcagtccaaaaacaatgaaatcaagtttcagcgtggacagcatttactgaatgctttccaaggaataggcttcatggtaaagccagaactgcacacagatactcatttgatccccacagccagcctacagaaagaacccaaccaattgggttactgtgtgttcccagtgcacgtcctgtgggtccacttgcagtttgagcttcgagctggtgacagagtcctgcaggcagagagcagcagagcgcagggcagatatctcacatccatcggtcactttttctcatgaagcctcaaatacttgtcaacttggtgccacaggtgccttcttctaatccgttaatttggcacataagctaaaactcatttgccagccccggagaggtcagga

SEQ ID NO: 477484 - DNA, 569 bp, Homo sapiens
cttcagtgtccctttccctgatatgatcttaaaaccaggtgtatagcactcgtgtgactccccgccgccccctcagctgcaatgaagatctggaactattccatcctgagaaagccctccccgggcaagttggttgatagtattgatagtgttctatattcctacttattttttgtaaatatctatcaattattgagagaagatgttaaaatcgccaaatatgattgcattaatctcaaagatattggtgaaatctataaaatacgtattggacatgacaacactggaaagaatcccaggtggtatctggaagaagttagacttgaaaatatagccacatatgagctattttgtttacctgttgattcctggatagctgagaatgaaaatgatggcgatctatggaaggaaatacccatcatgggaccaaagaaagcacctttgccagaatggcacagaacacatgggtacgtgcccccagatactagttgattaattcagacacagcaagaaagatttgggactagctaatgaaactttatccattagcatttcccatttaaaggggg

SEQ ID NO: 477485 - DNA, 639 bp, Homo sapiens
accaatgtgtatcagttcagtgtcaatccccagaataaggtgagccatcatgacttcgaaggtgaccatgcaacatatgaaaagcaagaagatcctagattttgcagcaaacgtatggctgtctcggattcaggcagatggggatgttgtcttgagataccaggttgacgtctacactgggcagctgaagcatgcagagacggagtctgaggttttcctctgtctctttggggagaggggagactctggcctcagacagctgtacaaatctaacatgcaagtaaaatttcaaagaggacagataactttaggacgtttattctcgacaacaatctacgagaaagtaatgtgtgaaggagttcttttgattttaatcagtatagcactgactttaggtcctgaatctctctggaaatgtcagtgtatttttgatataacaaaccaattctatttaggagtgaagagtccaggctactcttttacaacaaacccaagaatgtgctctattttcatctacagaggaaggtgcaggggaaggatgtattgaaggagggagggaaggagggagggagggagggagggaaggagggaggaaggaaggaaggaaagaaaatttgtcccacatgtctcaaagcatat

SEQ ID NO: 477486 - DNA, 515 bp, Homo sapiens
caggtagccttcagacaagacagaattttggatgtatggtccactctttcgtttctgtcctgagggaggttctggactgtgggtggtttccttcctgttgcactgcactatgccagtggactgcagaaagctggaagtttacaaaaggaaatactcttcagttctataacaagctgactggagggtttgtccgtttgcatccagatggcacagttagtggtgaagccaccactgagctgcgggtgctttatcagcctaaccgctgtgcacttcttgagtcggcactggttcctggtcacacagttgtttttgatcgtcatggcaaaatagctgatgcatcatcagcaggctatgcaaatctttcaaaagaatttgtgatttttgtcaagtgtgctggttatctttttcttcccagtgagtaaacttcctctgtaagtttttagcagaatctttttgtcctacacttaatattcatgctttttcttcctatttgtgctatgggtgactcagctcta

SEQ ID NO: 477487 - DNA, 638 bp, Homo sapiens
tggtaggttcatgggaaaacatgacttgtacatcacaggaattcattatattgagagtgaaagtggtagtaactggaaagtttttataatcaccagtgacttgccagatgcagggaccagctcacagatttatattattctgtatggacaacatagaagttcagcccccatatatctttatggaacagatggggctcgatttcaggttggccatgaagacatatttactatacagctgcataatatgaattctggaaaacagttttatgtacctgttcaacgatggttggcacgagatcaagaggatggggaaatctgtcgagaatttcctcttttaagtaaaggacaacctgtccttccaggtaggaaagattcaactccagtgacaatatatgaagtgaatgtggcaacgggtgagctatggaatgctggaacagtagcaaacgtctacatttctatccatggggaaaagggagatacaggatccagacaactatttagatcgaagagctccttcaattttttaagaggacaagtggtttagaggccagtccctcaggtagaagctgtaaaatatgggacattcgatgtatggacaaactccttccagggagaagatgaagattggctttattgcc

SEQ ID NO: 477488 - DNA, 1231 bp, Homo sapiens
agcagcgacgtggcgttcaccccgctgcagaactcggaccactcgggctcggtgcagggattggctccaggcttgccgtcggggtcgggagccgaggacgaggaggcggccgggggcggctgctgcccggacggcggcggctgctcgcgctgctgctgctgctgcgccgggagtggcggctccgcgggctcgggcggctccggcggcgtcgccggcccgggcggcggcggggcgggctcggctgcgctgtgcctgcgcctgggcagggagcagcggcgctactcactgtgggactgcctctggatcctggccgccgtggccgtgtacttcgcggacgtgggcacagacgtctggctcgccgtggactactacctgcgcggccagcgctggtggttcgggctcacgctcttcttcgtggtgctcggctctctgtcggtgcaagtgttcagcttccgctggtttgtgcacgatttcagcaccgaggacagcgccacggccgctgctgcctccagctgcccgcagcctggagccgattgcaagacggtggtcggcggtgggtctgcagccggggaaggcgaggctcgtccttccacgccgcaaaggcaagcatctaacgccagcaagagcaacatcgccgcggccaacagcggcagcaacagcagcggggctacccgggccagtggcaagcacaggtctgcgtcctgctccttctgcatctggctcctgcagtcactcatccacatcttgcagctcgggcaaatctggagaactcaatactgatatgggaggggtgaaagcaacatggaaaatggctgatggtactgaggatgatgaggtagaagagaagcccgaaaacttgagagctccatatatcttccctggagcatcacaaatccatatgccacccctgagtgctggctttggcatcaagatctctgagttagctgacagggctgctgagctggccttgactttgcttcagccaagaatgggcattcatgtgtctctggatgaaaacacagggatgcacagtgacttaatcaagtctgactttgaggcaagccttcaaagtcagtatacaattacttatcctgaaagcacccacctcttggacaagaagggaaaagagctgagcttgctggtgacggttaatctattaactgcgggaaaaccaaaccacaagcaacgaccagatgcggcatcaacttttagttgaccggcacaaccaaga

SEQ ID NO: 477489 - DNA, 539 bp, Homo sapiens
agtgcagccatggagacggttcaggaaaggtgggggtattctcacacgcagaaacttacggccatggcagaagaagaagcaaatacatccttcttcacaagcttaattcagcttaagcgccacagggcccagcgggactgtgcccttggcaccatcctacccaaccttgataaaatgggtggctgtccctccacttctctgtgctccgggagggatttccacaggccttatctaggccctggcatcagcagctcagacctgactcaccccacatttgccagtggatactggaggcccacaataactgacattcaaggcctgcagatatccaagggacttccttttgcatgtactgcacactcttcagctcaaagtaccactaagccacagagcaacactgacggaccttctagaggccggcgcccaaaagtgaaaggtcactgcttaccagctgcatgcagagatgcatggggaccactctgcttgctgcccaccaatgcacatagatcccggcctattttctgggagagtgtctaaag

SEQ ID NO: 477490 - DNA, 585 bp, Homo sapiens
aaacaaagatagcaggggagggtggccaggagctgaatggagaatgagttccctaggagcgctgtttcacttgcaggctgaggagcagactgagtttctgcagtcagtttggctccactgttctttggctacgctgcctgtcttggttgaggctgagctgggctcggtgccggtgaagtggtgtctctgcctgcatgggtctctgcctggtgccaagagcttctactccacgtgcctacacttctctgctgctcctctgagtctctgtaagagggaggtgtcttctgtaagagggaggtgtcttctgtttgcatccccttcactctgcaaattaccaggaatgcttgttcccttggtacgagcctggcctggagtagcccagctaatttttgcattttttcatagagacggggtttcacccaggttggagtgcagtgatgtgatcacagttcgctgcaacctctaactccagggctccgtggttcccatcatggctgccttcttctccagctcccctggtccatgagacagacctgcttgtgcccagaccgaaaatgcagacagtatccacgggtacagatgcat

SEQ ID NO: 477491 - DNA, 566 bp, Homo sapiens
agctccctttgagatcaggggaagcctttgttgtgactggatcatggttcagcttcttcacgtgcctgagctggcttccttcattttcccacgtgttgaccctaagagcttctccatggacaacaacctccatctcggaatcttcttcccagaaactacctcagatagttctgtccctctaactggtaacagaagtatactaccgaagtggcaggatgaattagggctcagagaggagaagaaagggagagaaaagagagagtccaaggacgttgcgaataaaattccaaatgccctgctcccagagctctggaaggaaagctgttcttgccctctggctaatgcaggatttaagctgatctgggtcagtgctgagtctgcttctgggagcatggagaagctgctgctgggagtgccaagaggactggagtcttagcttccctcactgctaggcatttggtaagagctagaaacagaaaggaagtcccttcggctctcttcttacctaggagttggtgggaaatgatgacaatccagctggtgagggggtctggggaatgtggttc

SEQ ID NO: 477492 - DNA, 862 bp, Homo sapiens
tcagaggaacattggggcagcagccagatttcaaggagagtttcagggtggaggaatatgaaaatgatgttctacaaaaaggaaattcaaacgattttcttattcaagttcaaaataggtcgtaaagcagtggagacaacttgcaacatcaacaacgcatttggtccaggaactgctaacgaacatacagtgcagtggtggttcaagaagttttgcaaaggagatgagagtcgtgaagatgaggagcatagtggaaggccatcagaagttgacaacaaccaattgagagtaatcattgaagctgatcctcttacaagtacacaagaagttgccgaagaactcaacgtcaaccattctgcagtcatgcggcacttgaagcaaatcgaaaaggtgaaaaagctcgataagtgggtgccacaagagctgagtgaaaataaaaaaagtcatctttctgaagtgtcatcttctcgtgttgcaggcaacaacaatgaaccatttctcaattggtttgtgatgggtgacgaaaagtggattttgtacaacaatcagcaacgactaagtcagtggctggacccagaagaagctccaaagcacttctcaaagccagacttgcaccaaaaaaggtcatggtcactgtttggtgaagcattagaaccagaacgacttccttctgaatggaggaaggttataaagaccctgctgatgaaacaggatgcagtaaagaatctggcccaaacccaccaaaaccaaaatggcaaggaaaacgacctctggtcgtcctctctgctcattatacacttactataacgcattagcatgttaaaagacacttccaccagctccatgacagttgtaaactgct

SEQ ID NO: 477493 - DNA, 4091 bp, Homo sapiens
ggggacaaacattcagaagaccgtagcagtgttctggaatcctatgtgagggacaaacattcaaacaacagcgggagtgttctggaatcctatgttaggaacgtatattcaaaccgtcgttgcagtgttctggaattctaagtgagggacaaacactcagaacccagctgcagtcttctggaaccctgtttgagagaccaacattcagacaatcgtagaagtgttctggaatcctatgtgagggacagtcattcaaacactcgtagcagtgttctggaatcctatgtgaagtacaaatactcagaacccagcaacagtgttctggaaccctatgtgagatacaaacattccgaccacagctgtattcttctggaatcctatgtgagtgacaaatattcagagccccgtagcagtgttctggaatcctatgtgagggacaaacattcagaccccatcagtagtgtactggaataacatgagagggacaatcattcagaccctcagagcagtgttctggaattctgtgtgatggacatacattaggaacctcgtagcagtgttctggaatcctgtctgagggaaaaacattcagaccacagcaggagtgttatggaatcccctgtgaggaggaaacattcagaccctcgtagcaatgttctggaatcctacgtgatggacaaacatttagaccataccagcagtgttctggaatcctatgtgaggtacaaacactcagaacccagcagcagtgttctggaaccctatgtgagggacaaacattcagaccactgcaggattgttctggaatcctatgttagggacaaacactcagaacacagcaggagtgttttggaattctatgtgagagacaaattttgagaccctcgtagcagtgttccagaatcatatgtgagggagaaacattcagacaatcgtatcagtgttccagaatcatatgtgagggacattcagaccctcggagcattgttctggaatgctatgttagggacaaacatttagacaatcgtagcaatgttctggaataatatgtgagggacaaacattcagacagtctcagcagtgttctggaatcctatgcgagggacaaacattcagacctcagcagcagtgttctggaatcctatgtgagggacaaacattaaaacaacagcgaaagtgttctggaatcctatgttatgaacaaacattcagaccctcgtcgcagtgttctggaattctatgtgagggagaaatactcagaacccagcagcagggttctggaatcatgtgaaggacatacatatagactccagcagcattgttctggaatcctatgtgagggacaaacattcacaccccagcaacagcgttctggaatcctatatgagggacaatcattcagatgcttgtagcagtgttctggaattctgtgtgagggacaaactttcagaccctcgtagcagtgttctggaatcctgtgtgagggacaaactttcagatgctcgtagcagtgttctggaattctgtgtgaggaacaaaccttcagaccctcttagcagtgttctggaatcatatgtgtcggacaaacatttagacctcagcagcactgttctagaatcctatgtgaggggcaatcattcagacactcgcagcggtgttcaggaatccgatgtgagggacaaacactcagaacccagcagcagtgttctggaaccctatttgagggacaaacagtcagatcacagctgtattgttctgaaatcctatgtgaggaacaaacattcagacattcgtaacggtgttcttgaatcctacgtgagggacaaacattcagacgccagcagcattgttttggaatcctatgtaagggacaagcattcaaacaacagcgggagtgttttggaatcctatgtaagggacaagcattcaaacaacagcgggagtgttttggaatcctatgtgagaaacaaacatttacaacacagcagcagtgtcctggagtcctatgtgaggggcaaatattcagaacctcgtagcagttttctggaatcctaggagagggacaaacactcacaacccaacaggagtgttctgggaccctgtgtgagggaaaagcattcagacaacaacaagagtgttctggaatcatatgtgagggagaaacactcataccacatcaggagtgttctagaatcccctgtgagggacaaacattcagaccctgcagtgttctggaatcctatgtgggggacaaacagtcagaccacaacaggagtgtactagaatcccctgtgagggacaaacattcagacctttgaagcagtgttctggaatactagtgagggacaaagattcagactagagcagaattcttctggaatcctatgtgaggaacggatatttagaccacatcaggagtgttctggaatgctatttgagggacaaacattcagtccctcttagcagtgttctggaatcctttgtgagggctaaccactcagaacccagcagcatgttctgtaatcctatgagagggacaaacattcataccacaggaggaatgttctggaatcctatgtgagagacagacattcagaccctggtagcagtgttctggaatcctatgtgaaggccaaacactcagaaaccagcagcagtgttgtggaatcctatgcgagcgacaaacattcagatgccagaagcattgttctggaatcctatatgaggggcaaacattcagacctaagcaggagtattctttaatcctatgtgatggataaacattcggacccctgcagcagtgttctggatacctatgtgtgggagaaacagtcagaagccagcagaacggttctggaatcctctgtgatggacaaacatttagagcctagaagcatttttaagcaatcctatgtgagggagaaaacatccagaccccagcagaagtgttctggaatcctttttgaaggaacaacatttagtccccagccgcagtgttctggaatcctatgtgaaggacaaacattcagaccctcctagcagtgttgtggaatcctatgtgagggaaaaacatacagatcacagcaggagggttattgagtcttatgtgagggacagccagaacccagcaggggtgttctggaatcctatgtgagggacaaatatacagaccacagcagaagttttctggaatcctttgtgcagaacaaacattcagaccacagcaaaatttttccagaatcctatgtgagggacaaagcgtcagaacctcttagcagtgttcttgaatcctatgtgagggacaaactttcagactcctgtggcagtgttttagaattcgatgtgaaggacaaacaatcaaaacccagaggcagtgttcttggatcttatgtgaaggacaaacattcagaccctcttagcagtgttctgaaatcctatgtgagggaaaagtattcagactctcgtagcagtgttctggaatccgacgtgagggagaaacattcagaccacagaaggaatgttctggaatcctatgtgagtaacgttcagaccacagcacgattgttctggaatcccatgtgtgtacaaacatgcagacgccagcagcagtgtaccgaaagcctattttagggacaacattcaaacaacagcgggattgttctggaatctatgtgagggacaaacattcagaaaacagcaggagtgttttggaatccaacttggaggacaaatattcagaccctcgtagcagtgttctggaatcctatgtgaggagcaaacattcacataatcgtagcagtgttctggaatcctatgtgagggacaaacattcagaacttcataacagtgttcttaaatccaatgtgagggacaaacattcagactgtcgtagcggtgttctggaatcctatgtgagagacaaaccctcagaacacagcaagagtgttttggaatcctatgtgagagacaaatattcagatcctcatagcagtgttctggaatcctatgttagggacaaacattcagactatcgtagcagtgttctggaatcctatgtgagggacaaatattaagactatcatagcagtgtt

SEQ ID NO: 477494 - DNA, 754 bp, Homo sapiens
ttagaatataatcaagaaataactggagtgttgccattcagggatgtggccatagaattctccccagaagagtgggagtgcctggactctgctcagcagcatttgcacagggatgcgatgttagagaactatggaaacctggtgtctctgggtcttgttatttccaagccagacttgattacccttctggagcaaagagccctggaatgtgaagagacagaagacagtagtcaaatacccagatatgtttttcttgcaggaccgatgctgctttcaagtgcatacatggtggttcttttgctcagccatcagaagaaatcctggtaccttcacagcacctgcctctccccaagaccttccccagagcagagtgccactcagaccatcctgctgctagtgagtttctttgtggtcgtgtactcggtcgatttcatcatctcattctcctcagcctcactatgggcatatgaccctgttgtcctgggtgtccagaggcttgtgtgcaccatccggcagggtgtccgctgtgctccggatccaacgagactcccattgccactcccgatcgtgctgaaggctgccattgttcctgcagggctaagtgcctgggtccagggaggggctacgggcaccatccttgaagagggtcctggaactccactgagccctcctgcctacgggggccttagagggtgccctgtcctgtccgtggcccctgggtcctatctcacccgctagctttttttttttttaa

SEQ ID NO: 477495 - DNA, 529 bp, Homo sapiens
atacacctaatgtaaatgacaaggattttcccttgactaccgtcccgtggtcccggcacaatggggagagatgcggcgatgccggtgcagagctgcccagcgagagctccaggccatggcacagtcaccgcgcagggaggagacaggacgcccggggtcctggctgtcagctcagccgccatcttatggctgaaggggactgagggccgagctgtaccaaggacaactctggccaaggattttggagccgacagcggggaggccggagtcccgccacagccacttcagactggcttcccagggggtcctggcatcttagctgtggatctcccaatacctacaggtcacagggacacagaagctgggcctctaggagcagaagacacagaacagagaagaaaagacctggagctacgactgcagccagagacaaaggccgcgccaaatctcgaaagccgtcctgtccactccagctgcgtgcctgattggatggatcccagcccagagtccctgattggataacgtttaa

SEQ ID NO: 477496 - DNA, 700 bp, Homo sapiens
gtttattcatccatccatcaatccatccatctaaccacaggaactggcaggtattcccgatctgccatgtattctagaaaggccatgtataagaggaagtactcagccgctaaatcaaagattgaaaagaaaaaggagaaggttcttgcaactgttacaaaaccagttggtggtgacaagaatggtggtacccaggtggttaaacttcacaaaatgcctagatactatcctaccgaagatgtacctcgaaagctgttgagccacagcaaaaaacccttcagtcagcatgtgagaaaactgcaagccagcattacccctgggaccattctgatcatcctcactggatgccacaggggcaagagggtggttttcctgaagcagctggctagaacacaccagaaatttgtcattgccacctcaaccaaaatcgatatcagcaatgtaaaaatcccaaaacatcttactgatgcttacttcaagaagcagcagctgcggaagcccagacaccaggaaggcaacatcttcgacacagaaaaagagaaatatgagattacagagcagcgcaagattgatcagaaagctgtggactcacaaattttaccaaaagtcaaagctatttctcagctccagggctacctgcgatctgtgtttgccctgacgaatggaatttatcctcacaaattggtgttctaaatgtctt

SEQ ID NO: 477497 - DNA, 685 bp, Homo sapiens
gcagaccgcaccatgaccctctgtcccttccctcctggcccacaggcagcttttcaacaatgtgtctgtgcatcaacacatgtgggtgatggaggaactggtgtgcagggacaagaaccaccccgccgtggtgatgtggtctgtggccaacaagcctgcatcctacctggaacctgccggctactacttcagggtccacctctgatgttcactgaagagtaccagaagagtctgccagagcagtaccatctgggtctggatcaaaaacgcagaaaatacgtggttggagagcttatcgggaattctgccgatttcacgactatgcagtgtaagtggcagtttggctcatgggataacgtacctgtcctcattttttcaggttgccttgccaattctggccattttgattataagaatattggaaacaaaggagggaagctggcttactccatcgcattaggatttctggacagtgggtaagatgaatcttgcagggctgttaccatttgtacaactgttccttgaaccccatggaccaatgaatttcttcctttgcctacactagttcacaatgagtttctctcatttgcaatcgagttcccctaagtaggtcctgagtctgcagggtggacatctgtctctccttgagtgttgcgggaagtcagggaccctgaatggagggacc

SEQ ID NO: 477498 - DNA, 681 bp, Homo sapiens
cgacacgctagagcatgaggggccgacagcagcagtctggtccagggacagggtggccttggcagagtggaggacctggatctgaggagacctgtgagctgaggtcaagggactcagggcaagggcccagcgaaccactgtcctccgaccctaggtatcccaagggttactttgtccagaacacagactttgacttcttcaactatgcgggactgcagcggtctgtgcttctgtacacgacacctaccacctacatcgatgacatcaccatcaccaccggcgtggagcatgacagtgctgggattgcatctgtttttaaccctaatgagggaatagttcatgagtgcaggatatctttggatgagattaacatgcggatgagaatttctattgagaggatgtttggttatcgaattcgaggagttgaagttcttctggttttaagttggctgttggaagtatataagaatcgaaacttaattcttcataatctatatactcgtagcttcaataccattgatgttaagaggaaggtcttggtaatgaaatatgtagtatagagtttggtgaatatatagtgtgtaatgttcctagaaaaaatgtagtagttagggcatttattacgataatattcatatattctgttataaagaagagggcaaatggacctgcagtatattc

SEQ ID NO: 477499 - DNA, 831 bp, Homo sapiens
gtcatctgttatggttcccacaaccacggccgttttgttttcctggccaggaagcttcattttcgggatcatccgggaaagggacagaggtggctggttgaagaacgcaattctatattcggaatacagaagaacgcaattctatattcggaatacagaagaacgcaattctatattcggaatacagaagaacgcaattctatattcggaatacagaagaacgcaattctatattcggaatacagaagaacgcaattctatattcggaatacagaagaacgcaattctatattcggaatacagaagaacgcaattctatattcggaatacagaagaacgcaattctatattcggaatacagaagaacgcaattctatattcggaatacagaagaacgcaattctatattcggaatacagaagaacgcaattctatattcggaatacagaagaacgcaattctatattcggaatacagaagaacgcaattctatattcggaatacagaagaacgcaattctatattcggaatatagaatatattcctatattctatattcggaatacagaattatattcctatattctgtattccgaatacagatttatattcctatattctgtattccgaatacagaattatattcctatagtctgtattccgaatacagaattatattcctatagtctgtattccgaatacagaattatattcctatagtctgtattccgaatacagaattatattcctatagtctgtattcggaatacagaactatattcctatattctgtattcggaatacagaactatattcctatattctgtatac

SEQ ID NO: 477500 - DNA, 1056 bp, Homo sapiens
attgctagcacagcagactgagatggaactgcaaggcggcagcgagggtgggggaggggcgcctgccattgctgaggcttgagctggtaaacaaagcagctgggaagctcgaactgggtggagcccaccgcagctcaaggaggcctgcctgccttagtagactccacctctgggggcagggcatacccgaacaaaagacgcagaaacctctgcagacttaaatgtccctatgtgacagctttgaagagaagtcaggagcccagctggcttcacccagtggatcccgcactggggccacaggtggagctgcctgccagtcccgcgccatgcacccacactcctcagcccttgggtggtcgatgggactgggcaccgtggagcagggggcggtgcttgtccgggaggctcaggccacaccggagcccacggaagcggggaggctcaggcatggctggctgcagttcccaagccctgccccatggggaggcagctaagggccggcaagaaattgagcgcagcgccggtgggctggcactgctgggggacccagtacaccctccacagctgctggcctgggtgctaagctcctcattgccctggccagcagggccagtgggccgttccaagtgtggtgcccgccaagcccacgcccacccggaactccagctggcccacaagcaggctcaacttagaacagaagtacttaaacgggacactacaactacacttaaagcttccagtaagtttttcaatggtcccatctttgacataagctacaccaagtgtcaccaggcacctgaggagagcactagaagaaagtcagaaatccaagcaaatacaaacaaagaaggggacaaagaggaggaatgttctccaaggaagactggagaaagaggctcctcccaggagctcagggaaccagcttcttgggaaagcaggaccaaagtgcaggcccgtgttggtgcctgccagcctggcaggactttggcacaggaacacaggtccagagccttgcctagggtcactggtcctcctttctatagagctccataaggt

SEQ ID NO: 477501 - DNA, 1039 bp, Homo sapiens
gaaaatcaagtactttcgatctttttctcccttctttttttcctcctttcttcgtgagcaagatgcccaactctgtggatgttgtcagttacttttcctattcaaccctgaggcttgctcaatggacgtgtggcaagggcagaagtccctcagctgcaggtctgttggagtttgctggaggtccactccagaccctgtttgcctgggtatcaccagcggaggctgcagaacagcaaatattgcagaacagcaaatattgctgcctgatccttcctctggaagcttcgtttcagagggatacctgcctgtatgaggtgtcagtcagcccctactgggaggggtctcccaactgctgtgctagcagtgagcaaggctctgccagcataggaccctccgactcagacatgggatataatctcctggtgtgccatttgcttaaaccattggaaaagcagtatttaggtgggaatgtcccatttttccagaactgctctggttcttgggaagtggcctatttctatgaaataggcactgcatctaagaatggtgaagctgagtttagagaaactaacttatcaacatccctaactcataatgaagtaagcagagacgagtgtccaaggagttcaactgcaatgcccatactcttaaccaattcccagtacctgtaccacaggattacagtccctcaacaagtcatggcattgaaggaagataatccagagagggctacccttgcagctttgggggccaaaaatgcaattccaggtgattttaaccatctgcaagttcttgagactgccactaagaggagcacaaggtgcaagctttcagtaggtctaccattctggggtctggaggacagtggccctcttctcacagctccactaagaagtgccccaatagggactctgtgtgggggctctgaccccacctttcccttctgcattgccctagcagaggttctccatgagggccccgcctctgcagcaaacttctgcctgcgaatctaggcatttccatacatcttctgaaatct

SEQ ID NO: 477502 - DNA, 486 bp, Homo sapiens
ttattccctgaaaatcactggaatgaagcactgtgtagtattgactgtatactctgggatggtagaattcaatggtatcccagagtctgtgaggccagttgcagcagcagcaagaaacacagaatggcagagtacagccatcatttggaccctgcagcaaggttctggggcatgtgattgctcttggcagccaaaggaacattttccggcatatagggccctgcttcaacacaggcaccttggagacataactgctctgacagctaaggtaatatttcttaggagagatggtaccacttcagctgtaggcacagggaacaaggggataagtggttggagtggttctacttcaatttggttccacaaggaaggatataacatctgcttgcagcttggctttgggatgttagcccaccagaccggtgtggcccactggcaacttagtctcattaatgaagggcagcaatgactgcttgcccccagtgt

SEQ ID NO: 477503 - DNA, 1174 bp, Homo sapiens
cctggaaaacagtcctttgttatggagaatgaatgaccaagacatttccacaatattactgttctcctgcccctgcccaagccacagagtgatatttcttggatttttaccacgagaatgtggttggattcttggaagcaaaacccaggaaattgttggggcactcttatatctacatgccctcttaggaaattctcaatctcagtccagcaattcagcttcaaacaatttattaaaattagcatttaagtgtacttactactctacggttccagtagtgtttgttctcagtaaacggttctcagctgtgacattcaacatttgcctgtggaaactcctttctctgccacatctaacaagagtcattgattttgcatttgttcagtattttcttgtcataaggacacaggtaacaacttccaggatttttacatgtcagtgctgaaagtggaaacctccatttagaaaaattgttgataataatatgttaaggaaaaaatgatatgaaagaagaaacctttataagttacttctgtctaattctcatcttagatctgtttaagtacctgaatctatgtgtttaatagtgtggttaagttgtagttttatgctgatttaataaaccataaaagcaaaggaatattggattcaaataaatgtgtaattgaaattctgcaattaataatttatgttccccttgtgtggttagccaaaatactggatcctggattagtctggctgccagttatatctcaaagaatgtttgaaaaaaaaatatggctaacactttttaaaagccccttttattttctcatttgtaatattctacttgtttattctgaatgttcacattcatagtcagatgtgagcagtgtttccattttggcctattctagtttttgagtatttttgtttggagatctttacttttctatttcataaagatttttatttattgtttcaagatttaattacaaatatttcctttttttacaagtgttgtcttcatatttgaagatgaaaaactgaaagtacctctgattggtttcttcctgcaaccaatcagggctgttcatgggccaagtctttatttgcatagaagtataactttgtaactttactttagcctctgattggtcactttctgcaaccaatcagactgatcacaagacag

SEQ ID NO: 477504 - DNA, 886 bp, Homo sapiens
tgtacatatacaccgtggaatactatgcagccctaaaaaagaatgagcaagatcttacattgccttgcaatttctctctgctttactgtcccttgtatgagtggattgtttttacatttggcactctttcatttcctgccaaaccataattccattacagtcttcgttggtttctccctttacctgagcatcttcactatcttagtaagggtgctcttctatttgatatataacaagccagacacacttcttcagaaatggaagctgccaccagatataaatttcttatttctccctgaaattaatttaaccaaagcttttttgtatccactcttcctttttaggcaatacaacatttttatttatatttttgcctggtatattcttgtgatcagcatagatgtaaagattttcttcattcttctacatcctatctacatgtgaagttcctaacatctaattttaaagcattttacctaggatgatattgagaaagttagttataaaatgacagttttaggacatgttacccccaaataaggcaccttgaaagtcattgtctgaccttctcccatctttctcttatatttacattacttcaagttcacagattcttctacttgatttgctgttaacgttctgtattaacttttttttccattcattatgtttttaggctctaaaattttctacttgatttttaataatgtgaaattatttaatgataaagatagtcatagaatcaaataattaaataattcaaaatattaatcatttaattatattataattttataatgtaaaaaaaataattttaactgctaaatttctcatttcaaatcacttatcctttttctgatttcaataaattgtttctctgtatttt

SEQ ID NO: 477505 - DNA, 2964 bp, Homo sapiens
cggggcagattccccaatataatgccgttctttgccttcattgatctttgttgtgcctctttcaggagctgtcataagttgtggcagggcactggcagggacaggggtgccagcctctttgtgggtgtcactgcagtcatggtggcagcatggtgtggggacacaggagggcccacaagcaactttatgtgtacattcgcaccggcggtgttgtctgcatgggagagaggtcctggtgggcatggggctagcaccttctgtgctcacattcacaggggcagcagtggccatgcaaggagttacggtggttgcccacaggaggcagcacagctggacatccgaacctgcattgcaagcaggtgcagacagactggggcccttggagaggccagaagacaaacgtgctctcaggttggaccagccccatctcatgggtgagattgccctacactgttcagattttttattattgctttaaatagaaaaaaagtactgtacatgtattcatctatatttaccacttcttgtgctctttattaatgtgtattaatccaaattacgaatgggtatattccttgtacatttaaattcatatggtattgctatgatacattttaaagttaactattctatgtatttttccaagttctttgattttcttttgccatttcagtctattattaacctcattccatgaattttattactaatatactacctttcagttctataattttctatctattctttttgcataattttcattactttgcagaaattctctaccttttcactcatgaataatttatttttgtttattttaccatattttatataattattgaaatatgcatatagtatacacttaagtcagtcttctctcatctggttcatcttaggatcaaggtctatttcctattttaaattttcttaattacaaatcatagttttatgcttcttcataagtctattaatttttgatggaacgtttgacattttggataatacattgtagaggcactgtgttttcttattttcttgtaaatcattttaattctgagtatagcaggcagtttacatactggattatcagtttgaacttgtgtaattttgtttctttacctgttttccaagctcctttacctttattggattcaagtccttctgaattttgtcagagtttagttttaggtcttgttaaagcaagtgtggcctatatgatttctgcattctcagctcagtgggataattatgttctgcttggattccatttctctgtgtcacaatctacaaattgtctccagtcatggaattttgattgtggggatcacctcattatcattagtgtctattctttcagggatcacagtctcacactgcctattgtccatttttggaaaactaattttatcacacattttgtgcaatattatgtttgtttatgttggatacactagtttttttcttcctagctaaagcagaatttagttcatcttttataactaatatttattactcaataaatcaattattactattttcagcaattatgacttatttatgtcaacattatcattgacataaacacctttgtaaaattaggcagaaattattatattaataatcactattattatcacttttatgccacagcatatcaggaatcacagtaaaacagaaaatatttttcagaatcctggtaaagtctgtgtttattctaaggactgatatctactcctttgacctacttcttaaaatgatcccaaaccttagaacagagagagtaagttaggttaaatggcaattaattggtggtgtcttctagagtgctgtgttgagggggtcactgaggaaacatccagtattatgagaagagttcataaatcattagtaatgtgggcccaagggattatgtcatacactgcatatttttataattattgcattggtcatttacataaattatggaatcaaaattctcaatcatgcaaaaaatattttagatctatttttagcaggatactgtataccactttattactggatatctcaaaccaattgtagggtacataattctgcccagaattataaacatcaacaataaaagactgaaagaatgatcactcttaggaataaaaaggcatatcaagcaacattaaatataaagttataccagggctttttggttctgactaaagacttgtcactgtgcaacaaagcctatgtacattgtcagaatctttttttttcatcttttgagtgaatcctggtaaagtgaatttatgttgccacttatcaactggttgatatatagactattgggaatatgttcaactcccaggagcttgatgaaatgactcaaggagtagaaaattctaaatagtttcacaagttgcctatcatacttgtttgaccattggagccagtttaccaataagtctagcaatgtacaataagaatatcctgtgtttgtacagctctatgtcatttaaaatgcattgttacatactaacatattttacttcatattgaccctgaaaatatctttgttctccttgtttaatcataatagtactttatatataatgaatattaatttaacttcatatttattgaaattttttccctctattccttatttaaattcattaaatgctatttttttgccatatggaagctaaatttcatatagtcaaatctattaattacttcagttaagtttctccccttcctattacacttagcaaatactctttccaaacttctgttagcattttccaatatttattaagctctttaaaaatattccagttataaaatatttacattcttaacgttagcaccagaaaataacaaataccattttcttctacctaagagaaataatagcatatgtaaggttaaaactctgtatttctcttaaaccacactggcttaattttgatataattatatcatagttac

SEQ ID NO: 477506 - DNA, 870 bp, Homo sapiens
ccttgtgaagaagccatttgcttctccttcatctttcgtcgtgattgtatgttcctggggcccccccagccaagcagaactaaaattgaagaggaaataattcttccaaatgcattctacaaggccatcattaccctgatgccaaaaccagacaaggacaaaacaaaaatggaaaactatgggccaatgtccttaatgaacacagatgcaaatatttgcaacaacatgcgaggcagtaccaaacgaaaatgtgggttggagccccccacacacagattctccactggggaactgcctagtggagctatgagaagagagccaccatccttcagaatgcagaatggtagctcttccaacaccttgtaccatgtgcgtgggaaagccacagttactcaatgccagcctgtgaaagcagccagaagggtggctgtaccctggaaagccacaggggtgaagctgcccaagaccatgggaacccattacttgcatcagcatgagctggatgcgagacatagagtcaaaggagatcattttggagctttaagatttgactgccctactggatttcagatttgcacggggcctgtagccccttcattttggccatttttctcatttggaatgagtgtatttatgcagtatctgtaccccccttgtatctaggaagtaactaacttgcttttgatttaacaggctcataggcagaaggacttgccttgtctcagatgagaatttggactgtgaacttttgagttaatgctgaaatgagttaagacattgggggactgttgggaaggcatgactggttttgaaatgtgaggacgtgggatttgggaggggccaaaagtggaatgatatggtttggctctt

SEQ ID NO: 477507 - DNA, 502 bp, Homo sapiens
cctcctcctctgtctgctggtgggatgagcatatctttcaggataataatctataggagtctgctcatctataaaatcagaacaattagagtttctaccccacggggttgttgtgagtgtgtagaatgcttcgattactgtccagcatatgaaaagcaatcgtcacagtcatcattatgtcctgggtggatgacaatgactttctggtccagccttcacaacattgccagaatggtcttcctggaagtctgctcctgtcctctctcacattcctgctccctaacacaggatctgcctctccccctaggaggaagtcaccaggtgataaactactttcactcagaaggcaggaatgagcaggaagcctccaggtcacaacaggaaactgagctgctttttcaagatgttcttcaatttttttggggggggtggttattaacctaggtgaggagagttgagttcatttcattcctcagttcaaggcacatgcttgtgattagtc

SEQ ID NO: 477508 - DNA, 654 bp, Homo sapiens
aggccttaacgggcttgggaggggaagagagaaccatccccacatgatttcgccacctcctggccttgcatatttctttagccaagattgcacggcccatggctataatcattcttttgaaaatgtgttaacttcaactcctctgtctcctcttcctccaagcacttggctggccaacctgtgctcctgggaggctgtctcctctgcccagcccacctgtggggtggagggctgcagaggaaagtgccctgtgaggttgctgcctgccacctcagtgaccctgggctgcagtccaccctcttctcccttcccatttgaaatccccctcccaagaggtcatcgctgtgaagtctggtgggcattcatcccttttcctcgcagcacgctcagactgcacgggcagtctgcagttaactgtccatcaccagtacccactctgcgggctcccagttttttcctgaagggcttggagaaagtcactccccctaaccagttaactctactggctttacatttttaaacaaagtttctcttccttagccaattgcaaaccagaagatgtttaaatctacctatgacatgagaaggctaagcattctgtatgctgagatcagagagaaatttctcacgtacatgtaatgccttcaaaaggat

SEQ ID NO: 477509 - DNA, 874 bp, Homo sapiens
aggcctgaaaaactggagggactgcttatatcccagcacaggctatggtcattccttatgatgtactctttggagagacgtacaatttgttggctaatgggtcaacacaaaaaatggcccagccttaccaccttcaaactcttatggttcatcttcctatgcccctggctcttgcccttgatgttcctgccaactggattatcatcatcagccccctaacccacggtactatttttggcttctgggtctcagtatctgctgctagcttcgctggtgctagctctacttgtttgtcaggtctaatctcagacttagctgatgagaggctggagaggagaggcctggggtgctgccatcaacagaaatctctctcggtcccaaccatgaagatgtgggaggttccggaagagttaatgatgcttgagctgctggctaactatgctgaaattctcttgacttctcctcatggcaacaagatagctgccaccattgtaaacattacaccttcaatctgacaacaccagcaaaaggcagagtcttttccttagacacaaaccaagctcattgaattgcatcagacaaaaaccatatattttaacctgaataataggaacagttatggctataatcttgtcctataattattattattttttctgatggctaagcatccatatcccaaggagggtttgtcaatgcaaactccttttcatatacaaaatcactctgaagaggtcttttgtttctaaatgttcaccaattaagtgggtggatatttaaaagctgtctaatttgtactgggaaggttggcatgggaagctcattttatgagccagcattaccttaatattgaaaccagacaaaataattacac

SEQ ID NO: 477510 - DNA, 894 bp, Homo sapiens
ctgaccccctgaccttcctcctggatggggcggctggccgggcagggagctgacccccccatctccctcccggacggggcggctggcctggcgggggctgactcccacctccctcccagacggggtggctgccgggcagaggggctcctcacttctcagacggggcaactgccgggcggagggtctcctcccttctcagacagggcggctgggcagagacgctcctcacctcccagacggggtcgcggccgggcagaggcgctcctcacatcccagacagggcagtggggcaaaggctctccccacatctcagaagatgcgcggccgggcagagacgctcctcacttcctagatgtgatggcagccgggaagaggcgctcctcacttcctagatgggatggcggccgggcagagacgctcctcactttccagactgggcagccaggcagagaggctcctcatatcccagacgatgggcggccaggcagagacgctcctcacttcccagacgggtctcttccttcctcaaatcatattcaagaatgctggcaaaatgaccattttaacatgcaaatctgatcatgtcattactctgagtaaaatatttcagtagatcccaaccgtctatggaagtccaaattccttagtgtgtcatataaacacttcatgattttcctttatccacttttctaaatcacgtctactctttgtgcattcatatgcaccttgtcctgattgcactgaatctataatcaacttgggaataactggcaccctaacaatattgagtcttccaatccatgaacacagatacttctttctttaaagattgtgattctatcatcaatattttaattttcagcatataaagtttgcacatattttgttagactt

SEQ ID NO: 477511 - DNA, 578 bp, Homo sapiens
gtctttatgtccatatacatccgatgtttagctctcacatatgatggccagtgttttaaagtctccaaagtatgtctcagatgctcatctaaacactggatggcaaagaggtcaccacccgtgtcaggcttattggcaaacaaatggtgcttgcacagtgtccagttcaaggtgccagctccgaaaaggcacactgagcgcacatgggccctactgcaggcagaagcagcacagtagggcaccttcttgcacctccagggccagactttcactccagcactttctctccatgcagagtaaagcacggctgcttttggggacttggtgcagccaagcagatgaatcctctgttgactttggttcggggctggtgactcagagcatcagggatgatgcagaatccgctctggccagggccacagcagcaatagcagctgcatctggttcccagtggcagcagacacagctgttctgaggcaatatgcagggtccagctcccaaagacttggcagtgcaagccatgggaactttgtgtatttctgttctatccttgaattgaattctgcacttcaaaatgt

SEQ ID NO: 477512 - DNA, 459 bp, Homo sapiens
cgggcaaggagaaccactacaaagtgcgtatgtatgaattcagtgtcaatttaaacagaagcacaactttgcctatggtagttattcatctccaagggatctctgaggtccaaagtaagctggaagaagtagatatcaaagaagcttttaacattgataatgagcctccagttgttcattcattgaccaatggtgaaatagctgaaattgttctggatcaagatgatcacaataatagtgacgatgaagatgatgtcattaacaccaaagaaaaggtgcctatagaagacatggcctcattaaagttaatgtcatcctttttgctgactgtctttggagaggctcctcgtctatttcaaagtaacatcacacaaaatttaccacaaaaacaagggacaggagttgagaaaattgttaggtttatgctttggggttaaatataggtcttgcatttcaaca

SEQ ID NO: 477513 - DNA, 767 bp, Homo sapiens
ccccccaaataaaaataaaacaaattttcaattacaatgagcaatgcacaaagatattgagatctccaggcctgtgatgggaggggctgccacgaagacgtctgacatgccccggagacattttccccattggagttcaaaactttcccacattttcctgtcttcttctgagccctccaaacttttccaacctctgcctattacccagttccaaagttgcttccacattttcaggtatcttttcagcagcaccccagtctactggtaccaacttaccttattagtccattttcatgctgctgataaagatatacccgagactgggcaatttacaaaagaaagaggcttattggacttagagttccagatggctggggatgcctcacaatcatggtggaaggcaaggaggagcaagtcacatcttaagtggatggcagcaggcaaagagaaaacttgtgcaggcaaagtcccatttttaaagccatcagatcttatatctattgagaaagattttttgtgaagtgtagtactcacttgtatgttttctaaattattatttaaaattatttctgtaactagcaagctgtatttggagtgaatgcatgtttgactagtatccatccatgcttgtcagatagaaggaactgcacagcattcattgtaagatgcaacaggaataaacgcagtttgtaaagttatagggatgaattatagtcgcattttccctaactgctcatctcaaaattagtcacacaggttattccctt

SEQ ID NO: 477514 - DNA, 648 bp, Homo sapiens
caggtggatgagtttgagcctgaaagatgactgagggcccctgctttttgacagctgtctgctggaggccaccttcagatcctagaggcctcctagttccctggaccctctcacaacatggcagcttacttcctcaagccagcgaggacaatctctttcttcagtttgctaagatggagctttcaataatgcctcctcaagccctgctggcttcagaggctgggcctgagcatgaggaggagaaagtccaggggaaagagttattggacttattttggataaagcacctgaaggagtcccagaagcttagctttaatcccaagggatgctcaaataacaatatcaggctcctgtgtcagaactttgtggacacaggtgcaagcaaacctgaggaaaatcacaaattgcccactctgactcatcagagctgcttgccaggctgaaagccattcctactcagtgatatgagctacttttgtggactctaaattttgtaaaaattgcttatcacttttctaaaaataccttgtacactcatggttaagtcataactttagttaaaacttattgacttcacctttgaggttgcctttggcaaagctcaaaagacacaagtatttgccatttggccaggctaaagtcaggtat

SEQ ID NO: 477515 - DNA, 1688 bp, Homo sapiens
gctctctccttccctctgctctgccagaatttcacgggaaagaactaagggttatgttgaaagctctcaagtttccctgccaggtctagagaataatcatgtggtttttgtcattggttccgtttatgtgatgcattatgtttattgaaccagccttgcatcccagggatgaagccgacttgatcgtggaggataagctttttgacgtgctgctggattcgtcaggatcctctgctgcaggtctcctggagtttgctggaggtccactccagaccctgtttgcctgggtatcaccagcagatgctgcagaacagcaaagtttgttgcctgttccttcctctggaagcttcatcccagaggggcacctgcagatgccagccatagctctcctgtatgaggtgtctgtcagctcctactgggaggtgtctcccagtcaggatacacagggagatgccctgcccagagttgaggagtctagagaggaagtctggctgcagaggccttgcttagctgcggtgggctcccctcagttcgtacttcatggcagctttatgtacactgtgaggggaaaaccacctactcaagctttagcagtggtggatgcaccttcccctatcaagctcaagcgtcccaggacttagtcaatgaataatataaaaatacagtcagcagatcataaatatttattgctacatcaaaagtctgctagtcgatctttcaataattccttcagcataaaatgcttgagtcaagatattggaaaaaatattaattaaaatttagacttagctctgaaaggacaggaaatagaaactctaccaaatattttctactgtcaaatgtctttaattttttgtcttagtttcattttccctgtgggtttgactgcaggttcttaaatttattaacctactacacatgcaattatcattttaaatctgacaatgcatctacttgcttagtggggaaagattagagctaagtggtggaattttattttttttttccccaaaggcaaagggaatactaacataaacttcagtgtttatttcacttaagtatttttctttgttcagtcaaaattttcttatagactctttactaattttttttaaatcaggaaagatgcatgaacactaattttaacaatttactgactatagttgattaacagtcaattgagtgaatataggtaaaagataattgcagttatgagttaccttacatattatatgtatatgaaatatacaatatcatctttattttcagtatcttacaagctaaagatatatttaaaatgttaacctggttatctatgagaatagtaatatcactggtgtgcatgaaaattcatggtagaggagaagaatgatatgtgcctggtaaattctagtggaagggggaggagacttgtaaacattgaggggaggggctagagatacaaattttggagtcatcaatatagagacctaggtcctaagcattcacttccagacttcttatttctctctgcattccatatttaaaacgattttccaatctcaatcttatttattaaattagttctatttttactaatttaactactagttgtagtttctaatcagcatgagtgagtcaactagtgtaacttacattagtttgatgtatttttgtcataaaaaataattttaatgttttagtaccca

SEQ ID NO: 477516 - DNA, 530 bp, Homo sapiens
actgggtccttgcacagcacagggaagatgccacggtacagggagaatgaaaccgcggactgggactccgcacttgcttcgtatctaggacacgtctcagtcacacacactcgacatctgaaaatgtccaaccaccaaggaagtacttatagtttacttttcccaccttggctcgtgcacaaggttgcctggttgctgtggtgcctgcttttctccctgtattgcctccgttgcctcctgaataacagtctccggtttgtctatggcctctgtcaggagctgggacacccagacagagtgggccacctactcccctctcggcaggagtcccactctatgcaggcacagaggtcccagaaaggcccccaggtttgtgagaaacacacatttacccatccaaacccgaagaatagactcagagacgtgaagaacagtggaagtgagacttttaatggcagtcttccaagatcgagtgtctgcatgagcgatgcagaagacgggtgatttctgcatttccaactgagggaagc

SEQ ID NO: 477517 - DNA, 516 bp, Homo sapiens
aacagaccgattgaacatggcacagggattgattagtactcccagtcctaccatcactgtgcagactctaaaaagaaaagaaaaaagtccatacacttgcatgacccgtttggtggtcagacatttaaaaacactaaagctgcaggcgtggccttcaggaccggccaccctagttggccccacattgacccagataaaaattagtctttattttgcgctcaagtcacagatcagaagcacccagaatttaggtcacttggaaaatctgatcaaagttatggtatattatggactgaatgtctatgtacctccaaattcatatgatgaatcttcaacccttagcatgactgtatttggagatgtggcctctaaggaaataattaagggaagagggacccccaggaagtgtggaggagctgctccctgaacctgtgtgaatatgtctaaatgacacaatgggtggattgtggtggccaggagatatgagggatggggggagagaaagacattgaaaaa

SEQ ID NO: 477518 - DNA, 884 bp, Homo sapiens
tttccgaggactcccagccatgtggaactatgaatactctccacttctcatatagctttaaattatggacaaatgcttgcaattgtgaactccctacattgtggctgcctgttcccaggcttcatcaaccagggttgtccaatgggattactgtaagccttcacggcagtctgccagccactgatgagaaactcatatccctggatcatatcctcattcttcttgcatatgggacaggagcttgggacccactgaatgtgggtacagagaaggctgtaacgtcgtggccctctgccctccgctggcagagggcagctgcctcatgccacagcagcagtagtggggctgagctagccccagagccctgtgctggagcaggacaaggggctgacagagctgttaacatgcccccattcattgggctgcagagggcaggacaaagaatgctaattaacatgctgttacatcccctctggagcttgagtttgcgagcacccctgcctgggcatcaccacatccctgtcatctggatgccagagtctgccacaggagtgacatgtgacatacctgttccagccacaagcaccgcacagggcctacttctgtgctggcacttggaacagtgggccaggcaccacattcattcgcttgcatgcccgctccagccaggggctgagtacgcagtcacggtggctgcaggatctgtgctggattgccaccaggtgcagcctggtggaccgagtggacagggcatctcctctggcaaacccaggcccaagtaaggcctggtcaaggacatttccagccaggggtcaccagctggcaagtgactgagaaaaaccctgtgttagtgttttttctcatttattattttctcagttcta

SEQ ID NO: 477519 - DNA, 582 bp, Homo sapiens
aaaggggtcaagggaactatcccaagtctcactgatgaaccacgatgaggagtttgaaatgcattcagattggcagtgtgggactgaaatctgtgggaaaatcacaagctaattcattgattgccccttggaaattactgctgttaattgttagaagaaagtgctctgaggggagaaacggtgctataggacagcaagtgagtgggacaggaaacccacgtgcacagatcagattcaaaaaggctatcagagaaggggacaaaagaattgtcacctggatgatgaagatgaatgagctaagtgaggatttggaggactgggcttccccctttgcttggcgctcattctctctcctgctgccctgtgaagaggtgtcttctaccatgactgctcacggactgagtacatggtatggtcagaatttgaagctatggcagtctgtcatcaagtccatgctctttacaataattctaaactatatcctacatgaatgacccactatattatttaatgtttttaatttgttgacccccatatatgttatttaattttccccaaatttttgaagtagtattattaact

SEQ ID NO: 477520 - DNA, 607 bp, Homo sapiens
aaaaagttcctcatcatctgagaccacatcagcgtggaccttattgttcacatcactatgagcatttttgtcaaagccattcaacaagtctgtaggaagttccaaactttcccatattttcctgtcttcttctgggccctccaaactgttccaacttcttcctgttacccagttacaaagttgcttccacattttcagaatgtgtctggaaatgtcatctgggagctatggcctggaatgtggaccccacaattctgccgaatgctccatcctactgtggctaaacagggagatggtacagagtggaaggagaagcaggcgaaggatggaactgtggacaacagccatatgtgtgtggctggtagaaaatgtggaagagaaaacatcaagctgacaaacggaggaagcagcaaagagttacgagagtcgtaatagtttactgcttacagagattagaatattaatctcttggagagaataggtcatcacagatggatcacagtgatgtgtagaaaatagtcatattattctcagtatatttgactcgttactgcccatatgatataaaagcccatgttattgttgtttctgtgaatattcatcctca

SEQ ID NO: 477521 - DNA, 485 bp, Homo sapiens
ttaagtctggcttctttctctcatcctaatgaatttactattaattgatgttgttctgtgtttcgatagtcagtttcttttattgtcaagatggttttctcatatatggaatccttggtcaataattttttacactggcactgaatacatcaactcccttctggtctctgaagtttctgatgagaaatctactgttaatcttattgtggataacttgtttgtggcaggaagcaagaaagaggtggagttgaaggaatgtcattccttcagcaagactaataagaaaagagagaagaatcaaatagatgcaataaaaaatgataaaggggatatcaccactgatcccacagaaatagaaactaccatcagagaatactataaacacatctatgcaaataaaatagaaaatctagaagaaatggataaattgctcgacacataccaccctcccaagactaaaccaggaagaagttgaatctctgaat

SEQ ID NO: 477522 - DNA, 556 bp, Homo sapiens
gcgggaacacaaacattcaaactatcgcaaggtgctgagttcctttagctctgggtgggtccagagatgctgtctgggggccagggcctggagccaaatactttaagaatatatgtggtgttctattctgttgtggttgtgctggctacaatcacaagacaaagtcccccgtgctctttcctccctcttccactagccaaggattctctccccatggccaccaccagtgcaggcctgaagagagtactactacctatgctcattgaaggctcaagggtttttcagtcagcttgtggtggatgctgtcagacctgggactcccctttcagggaagtgggctcccctctgatccagggaaaatacagaaatgatgtccaagaagcaaggcctggaatcagggtccaagggctctttagtcagcaggtgttgactcttgccaaaactgaatccttcccttcaatccagcaggttctcttctggcccagcatatgtcaagaaatgtcatctgggagctttgacctgggataagtgcctcaggacttgcctagttccctgt

SEQ ID NO: 477523 - DNA, 784 bp, Homo sapiens
cccagaagagaaagatctgcgcgtcctgcccgcgcactccacagagtctgtaatgtcaaatggacagcagggaagaatagaagagaaggatggcgggtctgggaacgaggagaccctctgtgacctgcaagcccaggagtgccccgatcaggccagatcatgtgcgctttccggttctgaagacggtcagctggctcattatgagagtcaagaagggcttcgaggattggtactcaggctattttgggacagcctatttacaaatcgaatgtttgtagcctttgttttctgggcttcatttgcatacagcagctttgtcatctcctttattcatctcccagaaatcgtcaatttgtataacttattggagcaaacgaaggttttccctctgacttcaattatagcaatagttcacattgttggaaaagtgatcctgggcgtcatagctgacttaccttgcatcatgactgaagacttggttggcattgaacatttggccaatgcctacggcatcatcatctgtgctaatggcatctctgcgttgttgggaccaccttttgcaggaaacgcagggcagaaaagagtgacatatcagatgcacacaacgcagctggttggcagactggacaggtaagctgttgtgaactctgggaaggactcaccaaagactgagatgttgaggataagggcaagcatttttgttttttcttttgttttgtctttcatatgccatcaacggacttgagcatttaaaaaatataatttatatttatttaaacatttt

SEQ ID NO: 477524 - DNA, 1193 bp, Homo sapiens
cacagcagtctgagatcgaactgcaaggcagcagcgaggctgggggaggggtatccgctattgctgacgcttgagtaggtaaacaaagcggccaggaagctcgaactgggtggatcccaccacagtgcaaggaggcctgcctgcctgcctctagactgcacctctggcggcagagcatagctgaacaaaaggcagtagaaacttctgcagaattaaacatctctgtctgacagctttgaagagagtagtggttctcccagcagagtttgaaatctgagaacggacagactgcctcctcaagtgggtttctgacccccgagtagcctaactgggagacaccccccagtaggggctgactgacacctcatagagctgggtgcctctctgaaacaaagcttccagaggaaggatcaggcagcaacatttgctgttctgcaatattctgttctgcagcctccgctggtgatacccaggcaaacagggtctagagtgacctccagcaaactccaacagacctgcagctgagggtcctgactgttagaaggaaaactaacaaacagaaaggacatccacaccaaaaccctatctgtacatcaccatcatcaaagaccaaaggtagataaaaccacaaagatggggagaaaccagagcagaaaagctgaaaattctaaaaatcagagcacctcttctcctccaaaggaatgcagctccttgccagcaacggaacaaaggtggatggagaatgactttgataagttgacagaagtaggcttcagacaattggtaataacaaacttctctgagctaaaggaggatgttcgaacccattgcaaagaagctaaaaaccttgaaaaaagattagacaaatggctaactagaataaacagtgtagagaagaccttaaatgacctgatggaactgaaagccatggcacgggaactacgtgatgcatgcacaagcttcagtagccgattcaatcaactggaagaaagggtatcagtgattgaagatcaaatgaaagaaatgaagatgttatcctggaaaacttcccaaacctagcaaggcaggtcaacattcaaattctggaaatacagagaatgccacaaagatactcctcgagaagagcaactccaagacacataattgtcagattcaccaaagttgaaatgaaggaaaaaatgttaagggcagcc

SEQ ID NO: 477525 - DNA, 905 bp, Homo sapiens
cccctataccctgctctgtcaaataccagaagaagcagaatggttcatggttctggaccacaaggatgccttattctatattcccctgccctctgactcccagtttctctttgcctttgaggatcccaccgaccacacatcccaacttacatggatggtcttgccccaagggtttagggatagccctcacctgtttggtcaggcactggcccaagatctaggccatttttcaagtccaggcactctggtccttccatacagcgagatagccaggcccctctatactctaatcaatgagacccagaaagcaaatattcatctagtagaatgggaaccagaggcaaaaacagccttcaaaaccttaaagcaggccctagtacaaggtccagctttaagccttctcacaggacaaaaattctctttatacatcacagagagaacagggatagctctcggagtccttactcagactcgtggaacaaccccacaaccagtggcatacctaagtaaggaaattgatgtagtagcaaaaggctggcctcactgtttatgggtagttgtggcagtggccatcttagtgtcagaagctatcaaaataatacaaggaaaagatctcactgtctggactactcatgatgtaaatggcatactaggtgccaaaggaagtttgtggctatcagacaactgcctacttagatacaggcactactccttgacagactggtgcttcaaatacgtacgtgtgttgccctcaaccctgccacttttctcccagaggatggggaatcaatcgagcatgactgccaaaaaattatagtctaggcttatgctgcccaagatgatcgcttagaagtccccttagctaatccttaccttaacctatataccgacggaagttcatttgt

SEQ ID NO: 477526 - DNA, 633 bp, Homo sapiens
tgctctcgccggagcggcttgactctgcaggttcccggcagaatgattgaagccggcaccacttggagagaggcaggtctttttgggaacatcagcagttcaggaaaaatactgttttgtttgattccgttttccaccctaatgacaaaagtgcagcaagggctttctctccccctctttggcaataagaaagctgcccctccagatgatagggtccttccccgcttcctgcaggtgatatggtttggctatgtccccatccaaaatctcatcttgaattgtaatccccattatcctccaagggttccaccagttggagagcatttgtcaatcaaatttaaggttctgaataatgataacagtccattgcggggcttgagaattcagaagataagggcagaaccaaaagagtggttgtataagtcctttagcaaatccaactcatatccattgaaccctacaaagagcatagttatactgacagatattaaatatgagtaaaaatttttaaggtccatgtacagatggtcaggtttttattaacaggaaaaatataattaaggtaatttttaaacattaaaaatttacacttttttttaacttttatttgaagttcaggggtacaagtacagg

SEQ ID NO: 477527 - DNA, 786 bp, Homo sapiens
taactgcactcaagtcacctcttgaatgttttgcggcttagaaatttcttctgccagataccctaaatcgtctctttcaaattcaaagtcccacaaatctctagggcaaggaagttccaaactttcccacattttcctttcttcttctgagccctccaaactgttccaacctctgcctattacccagtaccaaagtcacttccacattttcaggtatctttacagcaatgtcccactctgctggtaccaatttactgtattagttcgtttttgtgctgctgataaagacatatccaagactgagaagaaaaagaggtttaattggatttacagttccacatggcttgggaggccacagaatcatgatgagaggcaaactgcacttttcacatggcggtggcaagagaaaatgaggaagatgcaaaagtggaaacccctgataataccatcagatctcatgaaacttattcactaccatgaggacagtatgggagaaaccgcccccatgattcaaattatctcccaccggtcccttcgacaatacatggaaattatgggagtacaagcaaaagtcttggtgtcccaagaaagaatgatgtatactataatctattaagttttctcttttattttgtttatttgtcctttcagtatttgttgaattactactatgttctagatactgttttaagctctgaggagataatggtaaacctgatggaatctttcaaattagagacaaacagataattagaatataagtgaataaaaatagagaatgtttgt

SEQ ID NO: 477528 - DNA, 740 bp, Homo sapiens
gtaacaattattctgaattttggatttaatattcctttgctttgttatgtttctcttaatttcctaccatctcttctgagaagaattctcagtacgtgagtgggtttggtacgtgtgcaaagacgatggccaggtttcagtcatctgtgcagagttcgggctacttcatccatttcctctccaatacctcatcagtgaaggaagaggacaagctggcctcaaaggtggagctgactctttctgcatcttatgacaggttctattcattaaaaagcctgctagagccatcattgtttatacctgtttctaagattgctgctttagcattttatgagttgatctccagtgttccagaaataatattccacagcatgtttcataactgccagaaactaaaaccatcccttttcagaggggaaatgcctgcctccttgctgggacttgatagctcaaggttatctggggagaggaaaggttatttcaagtacttggatacttcttctatacttgtatttcccaagaaaataaaacacttcttcaaaaccgcagtagcctaaaagcaggcagatgttcctgcatggtcctaactgaaaatgccttatctaagtgaattttctttttcagcttgaattacctggtttctctggctatcatgagcagattaactgaatcattgccaaatctactcttgattttgttttcttcaaggacatatttttcagcttaagcaaagaggtata

SEQ ID NO: 477529 - DNA, 521 bp, Homo sapiens
gatcctgcaacatcctggaggagctgtgagtgagtgagctttcagatgacgccagtgcccaagcttcaagatgctcccaatgatgccaagtggaatggagttgagctgcccctgctgagcccttctatctatgtttgcatggccattggcacattcaatataaaactgcatcacgcaaaaggagcagcagccagttctagcatcacagctgtttttgtcttagcacaatgtgaggcccgattgggagaagagaaagcaggaaaagcacaagaagctgccaaaagaattaaacgcgatgcagtccagagccctgctctctgtttctacctgcttcttctcaatgtcactgtcggccaagagtttgataaaaaacagatccccagaagtattccagtaactcctcaggaccaccagggcaaaaacaaaaacattcagggcttgacacttaccagggcaacttgccaagcttatcacatgtgaaaagagctgctcagagagaataatcttgctcgcgttcacaa

SEQ ID NO: 477530 - DNA, 943 bp, Homo sapiens
gtttggtttgtggttgttgttttgttttgttttttgagataagtatttgttgaaatcactctccatttcgatgtttgttttgattaaacaagggccgaaaatgtttggtggctctgacaattcgggggctaaatactgggcacctgtcggccagttaaaagcaactagtgcagccactggactaaagacacgggtgtcaggctttctgggaaaggactctctaacaacccctgactcttcagagttgggagcattggttttcgagaatgcatctgtaagggccaataaatccgactttcctcggtcctctttgtggtctaagaggaaaattaaggtttttgctgctgtgtcagtgaatgcaactattccaatcagcagggtccagggaccatttcgggttcttgggcaagaggagtttctgctgctgcatcagaaggaaacaagcaaagaaatctccaagggaccacaaaaacccctgggctattggttatgtccccttcaagctgtagggggaggggaatttggcccaacctgggtacatgtccccttctccctctctgatttaaagcagatcaaggcatacctggggaagttttcagatgatcctgataggtatgtagatgtcctacagggtctaggtcataccttcgacctcacttggagagaagtcatgctattgttagatcaaaccctggcctttcatgaaaagaatgcggctttagttgcagcccgagagtttggagatacctggtatcttagtcaagtaaatgatagaatgacagccgaagaaagggacaaattccctagcggtcagcaagccatccccagtatggatccccactgggatctagactcagatcatggagactggagtcgtaaacatctgctcacctgtgttctagaaggactagggagaattaggaaaaagcccatgagttagtca

SEQ ID NO: 477531 - DNA, 541 bp, Homo sapiens
acatcacacaccggggcctgtcgtgaggattctcagtgacaaatgatagaggatgaccctggtcaacatacttttaaaagagggggtgaggttatgggagaatccctgtgggatattgataaagacattgctaaggatgctagagaaggcagccagccagaaagccccctgcttaacagagaatccacaaaagggatgagttcatttacagagggctggattgattataagggtgatgctggactttctgggagagcatggcagaaacccaagccaatctgcaaaggctccagtgatgcgagagattgtcttacctcttctccttcccagattgatgacgaagtcttagggcagtttgccatgtgtcggtggctggtggagggggtgttaggagggagggcttcagatctgcaggagagtcccagagttgttttctggctccctattggactctacagcctggttactcttgtccacaaggtcactgctacccctgcctgctgcagcctgtggctggagagcatataaaaagctcacttgt

SEQ ID NO: 477532 - DNA, 615 bp, Homo sapiens
ctgaggggcatcgcagatgagacccgtgaggctaagcaaatattttgtgcttcgtatccttccctacaccaccagccacacctcctcccatggaggtgaagacagggaagctcagagcggagctataacttgcacgagccccacaggcaaatggtgcagagccgggactaatgccgggttcctggagtcaagcccacactgcatcatgggaagtgcccctggcagaggcgctgatggttatgggatagcccaggaacagcgcccccactggtctgtggcactttctcagcagcagagcgacccccacctggagaagcagcccactcagaggcccttggcaccatgggtctctcccacccactgctcgccagcctccatttcccacctgtgctcttgtctttgggttcaagagggaaaaacatcaaatttggattcaattctcttgaataagatgtttaaaagaaaacaaaacaaccaaccttcaggctgctccaagagagacatccgtacctgaatgctagatttatcataaggaatcaagtctgattccatgataactgccactgatttcagaaaatcatttcttatgctttggctttttatgtattagtaatt

SEQ ID NO: 477533 - DNA, 1515 bp, Homo sapiens
ggtagcaaggtttattgcgaagagcaaaaggacagcttccacagcatggaagagaaccccaggtgctggctggtggtggccagcttttattcccttgtggtcccctcccatgttccatttctgtcctatcggagtgcccctctttcaatcctccctgcgattggctacttttggaatcctgctgattggtgcgttttacagagtgctgattggtgcattttacagagcgctgattggtgcattttacaatcctcttgtaagacaggaaagttcctcaagtccccactggacccaggaagttcagctggcctcacctctcaagacttgttgaatgactttgaccaaaatgctgatagtgacatggacaataaagtccagactgagatggtctcagatggagatgagaaactttttgggaattggagtacaggtcactcttgctatgcaaagagactggcagcattttgcctctgtcctagagatctgtggaatcttgaacttgagagagatgatttggggtatctggcagaaggaatctctaagcagcaaagtgttcaagaggaagcagagcataaaagtttggaaaatttgcagcctgatgatgtgatagaaaagaaaaacccatcttctggggagaaattcaagccagctgcagaaatttgtataagtaatgaggagcagaacattaatcaccaagacaatggggaaaatgacttggtgtcctgtgtcccagctgcatcagctgtggcagaagggcccaagggacagctcaggccacggcttcagagggtacaagccccaaaccttggcagcttccacatggtgttggtcctgcaggtgcacagaagagaagaattgaggtgtgggaacctctccctagatttcagaggatgtatggaaacacctggatttccaggcagaagtttgctgcaggggtggagccctcacggagaacctatgctagggcagaagggaaatacggggtcagagcccccacacagagtccccactggggcatcacctagtggagctgtgagaagaaggccactgtcctccagaactcagaatggtagatgcactgacagcttgcaccatgtgcctagaaaagctgcagatactcagtgctacctcaccggcatctgctgtttttagatgttttggacttttttaaaccaaggtcatgaccgttatgagctggtatctcattgcggttttgatttacatttctctgatgattagtgatgatgagcattttctcatataaacatgcaaaaaatattgactgaaccaggaactatataaactgactaataatattggttatgataaaagcaagaaatgatgagggtatgaaagaagaaattggcaatgttatattgctttatagaattatttacaacatataaaggagataaatctgtgattttttaaaaaaagaaggatagtaagaaacctagaatcattctatatttggctgcttgtatgtcttcttttgagaagtgtctgttcatgtcc

SEQ ID NO: 477534 - DNA, 1557 bp, Homo sapiens
agttaagcttctgagctccttcctcgctattcctctaagtagggatagggtgggctcagatatgtaaaatgaagattcctaggtcatggaccacatcctctagatctgaaccttttcagggcttcagccttcagtctgtggccaacgtcccgagagcccctcggcaaatcacgggtgtaaatccaagagttcagaagctgaagaacttgaagtctgatattcgagggcaggaagcatcgagtacaggagaaagatggaggccagaagacttagcaaaaaatgagggagattttaaggaactgactcacatgaatgtgggcggagtctggcaagtccaaaatctgcaggataggtcagcaggctggagacccaagaaagagttgatgctgcagtccaagtctgaaagcagtctgctggcaagttctctccatctctctctctctctctccccacccccgcaaatatctaggtaccatggtgtaaaatagttgacacgtgctattgtgcttagagttgactgtgaggcaagcctctgcatctgtacaggaatagaactacgataccaaaaagtacttctgatctccttttattggttgtgaataagcactagtatcctcattttacagatgaagaaactaaatctcaaaggtgctaaaaatccttgatgttgcctacgaagactccaaatcatctattatcattgaatttagggctaaaataagtacatttaattgtaacccagttaataaaaagtaagtgctgagaaaaattattaaaagcttctgtgtaatgataattgtattcctgagcctaacaattgggttaggatacaacaatttttgtattggttagagctataccctgctttggtttgacagtcagagccaaagacacagcaatcttccctcaaatattggaaggactttgtcctcctgaatgactctttcaaataatttcttttatgaccaaacttagaaagtaaatatctattcagatgatgaaaaatactaatgtttgaagagctataaatataaaatcatgaatgccaacaaaacaaggcattgtacatattatgaaatataacttaagattttggatctcaatacttggaaacattgaactatgaactatgtactattattatcttagaaagctttactccattttagacggactataccacttcaaatgggctgttgatgcaaaatgagcaaaaaaaagtgcatcagtggaacttattttagtgaaatattaactggccacatttcaaaattatattctatactgtcctgtgaccaaagatgctaaagaacttcctatttaagagtaccatgaaagggtatggctggagggtgaaataagaaaagacacagaatgtattgtatttgtaggaattaagaataaaaatgtgcttcaaacggaatgttgaatatcatcatagcaactacttttttgatcaacaagaatcatgaaaaaccagaagctatgtcagctatgctttggataaagttactgctttttaaaaatcaagttaatgattcacaacagtaaagacat

SEQ ID NO: 477535 - DNA, 817 bp, Homo sapiens
cacagtctaagtttgttttctccagtgggtgtgtgtgttcgggagagaagggtctcctttcccacttctgcagctggggcactcacagtatttgggatgtctctggggtcgcacggaagtagtccacttccttcagagggtctgagggtcctcttgggactgctgatttgttcttgcagagcacccagcagtcagatgattgcaaggaaaaaaggaacatgctttgaccctgagggtggtacttttattcagttggcactcgctgaaccaaagcttctgcagcatgaatgcagcctgaagcaggaatctatccacaagaaagtgctttgtcatgctaattttaaattcaggattcatactaccaaaacggaacagagaagaataacttgctatgaaatagcattagttctatttgaagctggaaaattcattgaagttctagttccagaccaggctagtccatttacccaatttgcctttcatgctcacagaaaactcattttgtccatttcactattcaggatgatttttaaattgcatcgcacctgttcaaaagctgagaggaagcacggagaccacatactggagatggtaagtatcacacttcacagtgaaataataatgaagagcccctaaaaaatcacccatcagacagccacaataatcccagatacgaacgagtctaaagaccaggagtgcacaattacagtgcttgggttattttcatcaatagcagacaggctgcttctttgcacatggataaatagcttattcatttgtgttggagtatatatatatatttgttaccttgaaatgt

SEQ ID NO: 477536 - DNA, 945 bp, Homo sapiens
gactgatgggaaggatccaagatgacagatgtgactctggcggtcccgaaggatgccctaatagggtggcctgtgtctgtctccttgattaatcagtccgtgctcgccattctaatctattccagccagctgcatgaagcagattattaccaaggagtagcaaaagccatgacttccaaactattcagccagattcaccagagcaagagatcagatcccaggttcagtgccactctagtgatggcagaacaaccagatataggaacttggacaatccgtgaatctgagccatattccactctggactgcctccatgtactcatactgatggacttacatctggttcatcttcacatcacggatgtgccctttgaaatcccagttttatggctgaaggattttgtcccagtcccccatgcctgtgtgttcatgaaaatcaaatcccaaggccatcttgttcagcaaagaaccttcgaaccaaggtcgtctcagtcctctgtgtgcctatctatcaagagagtcagtctggataatttgcccgccacatcattggtaaggggagtcttgattgctatcttgagtggcctgtgcttaaccctggataaggatggagttgcatctcctcgggtgtgctgctataagaagcccttctgcagttgctgccctgaggacagggacctcattctgagcctgattgcctcttggagagacacattgcaaggtacctctgctgggtacattgcagagcccataaaagattttttgttttggatgaacgtctaaacagcagagtatattattctagaaatattgccatgattatttcctccttacaatacaggactatgaactataaaaaggagaatccacgagtgtatgtagaaattttgttgctaagtgatgtctttgttcctatactagactgcttacctctccccatataac

SEQ ID NO: 477537 - DNA, 2090 bp, Homo sapiens
tttcttgtttttgtcagtttcagaaggaatggtaccagctcctccttatacctctggtagaattcagctgtgaatccgtccggtcctggatgttttttggaccctcagctgcaggtctgttggagtttgctggaggttcactccagacgctgttttcctgggtatcagcagcagtggctccagaacagtggatattggtgaaccgcaaatgctgctgcctgattgttcctctggaagttttgtctcagaggaatacccggccatgtgaagtgtcagtctgcccctacttggggggtgcctcccagttaggctacttggggatcagggacccacttgaggaggcagtctgcccattctcagatctcaagctgtgtgctgggagaaacactactctcttcaaagctgtcagacagggacatttaagtctgcagaggttactgctgccttttgtttatctgtgccctgcccccagaggtggagcatacagaggcaggcaggcctccttgagctgtgagtgactgtaccattttacatttccaccagtagtatatgaatgattcaatttctctgcatactaaccagcatttggtgttatattatttttcattttagacattttgatagctgtgtcatgatatttcatcacagtcttactttacatttccctaatggctggtgatgttaaactcttcatgagttcacttccatccatgtattctctttgccaaaatgtctgcttttatcttttgtccattttctcattggatttttttaactttgaggtttgatctttttatatattctagatatgagtcctttgtcaaatatgtggctttcaaatatttttatctccttaactgatcagaagtttttaattttgatgaagtccagtttattgatttttaaggaattgtgctttgggtagaagtctaagattgccttccagaaatattgttcaaatttacattctgactagaaataattatttttctaatcctcattattcattgattaaaatataccaatttaatggacaaaataataacttttaagataaatggtttttaataatgtatttaatttttgtgtttattgtttatgaattccctggtcatctcctttgttcatttttctaaaggtaactttcttcttctaatgtatttctgatatattaaggtacaatttatcaatcataaatattacaaatatatttttgtacatttaccttttatctattatatttggatgtacagatggctttaactagtatgaagccaaatctatcagatttttactatatgccttctatgtttacatgtataattgatttagggtttattatgtggctagttgagaaagattctttttccgtaaatgattcattaattataacatcaaagtatattgaataatctatccctttcaggagctgaaatttcaggttaatcaaatgcaaatatttcttggctatcttttaccatttttcatacaaagaaattttagagttatttttctaagttacaaaaatataactgaaattttttcttagaattttattaaatggttgacttggggagagtttatatctttacactattatcttcctgttacaagaatgtgattattttccagttatttgtctttgtttatatccatagtaaagttttttaatgtttaatataccctttgagtttacttcatgtattttatatttcacaaagctattgataatgactcttttttctttatactttttaactggttactgttgatgagtaaaatatttcttttataactggctgaaatgtctattttcccattccagtcaattttctgtttttcctagttattgcagtttgatactcacataatctagaatagtgataattttgtcttcccaattgtcacctttgttaagttgcatgaagttaatatttcagaataatgttatatattacagtggttgctttgtcttattcttaacttttattagaaaatctcttgtggctcaatattaataaaatattggttgttaatttgaaacagactcttcaatatgttaaagaagaaaatgtatcctagtttactaa

SEQ ID NO: 477538 - DNA, 2631 bp, Homo sapiens
aatggtacatccactgacagcttgcactgtgcacctggaaaagctgcaggcactcaacaccagcccaagaaagcagctgtgatgggggctgtatcctgcaaagccacaggggcagagctgcctaaggctgtgggagcccacctcttgcatcagcatgacctggattttgtggctggcagcagtgtcagtgcagggatgtggtgctggtgggggcaggtctggcaggctccatgcccatcaacactaccacatcactggcggtgccgcttgggggagctatgatgtgggcccccaggaggtaactggcctacaccaaaccctctgggctctgcacctgctggaggtatgcccctaccacttctctaatcagctttcaagtgtctgtggtggttgggagtttcctcctgccagaattaccgaggcctatggtgagagcgagttgctccttgcctgttcaactcacctccactgcaggagtcctggggggccaggaatgagtcctggtgcgcagttgtcccattcagggttcccaacttccttcaccttcagcctgtgttctgtgtcttccctctatctgttgtcaattccttccttctgaatatctgctaggagtgcgccagtctttcagatgtcccggtcccttagtgtgagatgttcttcctggctacgtctagttggccatcttgcaagtattttcatagtaggcaattatcagacttttaattatttctttatatcttttaggcaattggttaggcttaggcaagttttcctaacaatcagctggatgtgctatacccataagattaattcaaccagtgatcatatatgcatattgtgaacacataaacatcacactctattaatttgtaaacgtttttgaaaagaaacacttattaattatataatgtattattaggcaattatttatccagtttttaaataaacagagtttctacaatctgtatttttcaacatattaatttaatgtaggaattaattgcctgtgtttcaaattataagttttatcttaataaatgcttacagaattaacaagtctacactgttagagtgatcctagacttgttagtgaatcactaggagaggatcaagatgcccagacactgaagagacagtgtagcaagaatgcatcacacaggaatgggagagaatcagaaatgagaaggggaagatgccatagaatccatgacactgagcacttagtatgtccctagtaagacttactatgtatgaaggaaggtaacactcagcaactagcatcgtgggaaagagcctaagacagaacagatggagtaaaattgtaaacacttcagcacgcaataccagagacaggagttaaacatattgcactaatattctaaatgctgtcacaatggaacgatttaactcagttcagtgtttgggacatcactatcaccatagctaattacaggggaatccacatgaagcaataattgcttagaacatattcaagggccaggactgctttcatctgtgaattttgactttaaatcactgcctgtaaataatcacagccaaatatttgttgatttctcaaaattttgccattggattattaaaattttgccattttaataatgtcacaatattataacatagtttactgactgtatatatgcctcaatatataattgaattagttatgctgtttgttttaaatgttaataataatctttcattagatcactttcactcctccacatgacttccagaaacaatttgctaggttataaaagtattttcctttggattttttactaatatttcatgaagatatataggttggctttgaaacattggtgtttgatcacctcattcaagaaaatgccgtttcttcagatatccaagtcacttttatctccacttgcaaacttttatagtcttgttttgtaggttatgcatccttctcacagtatatcctgaagaattttaaatgttagttgctatagtgaaggagatcttatatattctatgcagccagaaggggctcatcatgggggtattaatttttatatatttataatatgtgcactatttattggacttttctaataatatttggcattgattggagcctttagtgcctccttgttcaataccatgggtatgtctgtattgatatagaattgagtctcagcagactagaagactctgaaatatctgtcagaaactaaaatcttgtgggaatgcctgaagtgaatctcacctttagaagggcaacaaagtgagaaactggttaattttggactctataatggatactattagattttactcttgaaacatctgggtggcagaggtcaattaagcatggttgttgaggaactggaaagtttttgttgtagtcttttgctgtaccatctatttacagaaagtattatttttaaacttttgcaaatataattttatgtttttccctaatttatattgctgccaaatgggagagcacaggtctaaattattgtacctgccacacctacatgaggtggaaaataccatgaaagtatctttgtgcagaaagggaggattcatggtgctttcatctgtggacctccagtggaaggaggacaatccagacctaatttagag

SEQ ID NO: 477539 - DNA, 746 bp, Homo sapiens
tgccaacccagagcacaggccatcaaacagcagcagctaccttctcatagatgtcttgctataggagagcagtaatgccatttttgatcaggcattctgatacttattcccataggagcaggaaccctattgtgaactgtgcatgcgagggatctaggttgcctgagccttatgagaatctaatgcctgatgatatgaagtggaacagtttcatcccaaactactcccctaccctgtccatggaaaaatcatcttccatgaaactggtccttggtgccagaaagtttggcaactgctactttagccatgcacaagcccaggacatccggcccagccccagcgagcacactggcctcgagcacactggcctcatgacaatgcttgggaactcctctaaaacttgcctaggcccaagaaaagagagaggggcatcaaggtcagaacggggaaatcctggaggccggcagacccgcgtgctgccgggaagcactggccacgccaggccattctgctctcatgaggagctgctctccaccaagttctacaaaaagccacgtccgtccctacttccaggaacccagttttgcagatactcttcctccagactgtcattgactcttgataattttgagtccccagaaagcttcaagggcacctaaaaatattcacttctaattttaattccatcgcaaactgtcccggtgtactttcagggctatttaaggctcttaagggaatctatctga

SEQ ID NO: 477540 - DNA, 1217 bp, Homo sapiens
ttctctcctgacccaggtgtattttttgaagattgtcaggcccagccatggctgaaaggggccaacatacagctcaggctttggcttcagagggtggaggcctcaaggcttggcaacttccacatggtgttgagcctacaggtgcacagaagtcaagaattgaggtttggaaacctccacctagatttcagaacatgtatggaaatgcctggatacccaggcaaaagtttgccttagggtggagctgtgagaagagggtcaccatcctccagaatggcagatccaccagcagcttgcaccgtgcacctggaaaagctgcagacactcaacaccggcctgtgaaagcaaccaggagggagactgtaccctgcaaagtcacaggagtggagctgcccaagaccatgggaactcacctttttcatcagtgtgacctagatgtgagacctgaagtcaaaggagataattttggagcttttaaatttgactgccccactggattttgggcttataagagttgttcagcgcataagagttatctctggtatgagacacaattacaactgtaaatttcctttataaatggaaataattttccttacaaaagggaagatttattctctatttttaggcagtaagcatttggtattggctgcccgctggatgctccggggttttcagcattggaattcccctaggggaatcttggtcttgccttttcttgctttctgccctaaatatatcactttccataacaggattttcttattgtcagtttatttacacttttcattctacactttgcttgataaaaatacttttttgtcatgctttgttcattggcaaatataatccactttcataatgtcttgctttctatactttcaccttctctgcagttagtaagaatctaaaaaggaaaagttgcaagagcccagttgcttttactcacactagaattagaaaaacttctgagtcctgtagcaaaccatgggaacaatgatgagtatcccagatgacttgccaccggggtgtcttttaggttcttggagcgaattcaaatttgaaactcattttctattgcatcactgtttgggtctgttaccaattagaaaataaacagatccatcctaggcctgggtctttacattattttacattagttctgtagaaggaaattgggaagaggtcccttatgtgcaggcttttagagcttttta

SEQ ID NO: 477541 - DNA, 683 bp, Homo sapiens
cgccggaagctctggttgcttcccggcccctttgtttacctactcaagcctcggcaatggctggcgcccctcctccagcctcgctgctgccttgcagtttgaactcagactgctatgctaggaaagtgcgaggctccgtgggtgtaggaccctctgagccaggcgcaggatataatctcctgtgggttcttggtctcgctgacttcaagaatgaagccgcggaccctcacggagtgaagccgcagaccttcgcagtgagtgttaaagctcttaaaggtggcgcatctggagttgtttgttcctcccagtgggttcgtggtctcactgacttcaggagtgaagccgcagaccttcgcagtgagtgttcagctcataaaggatcagtggtaggaaccttttttgtctgggatgtttccttccaatataggaggtgcaagtcctccaacggttcgcaggtgtatcgaggctggatagtgacctattctttgttcccccaaaggggccttacaatggaccaagggattattcctttggcacacctcacaggctttgactacttgtcagatgatccagaggagatttggccctgtacatagggatttggccatttgatgagtgttttcaatacccatatgaaaagtttggtggaggattttaagtattttccactggctggctttggg

SEQ ID NO: 477542 - DNA, 640 bp, Homo sapiens
tctgatggtactcacagcttggtgatagtcccttcgtggttgccaaaatgtgtccggaattttttccttctggtgggttcttggtctcactgacttcaagaatgaagccgtggaccctcgtggcccctctgctgcaggtctgctggagtttgctggaggtccactccagaccctgtttgcctaggtatcactggcagagcctgcagaactgcaaagattgctgcctgttccttcctctggaagcttcgtcccagagggacacctgccagatgccagctagagctcttctgtatgaggcgtctgtcagcccctactgggaggtgtctcccagtcaggatacatgggggtgccactggggtatgaaaaaaaaactcctggggctagctcagtgtctgcgcaaatggccgtccagttttgtgctggaaacccagggcgctggtggtgcaggcaccagcgggaatctcctggtctgcagttgaccaatattacaaaaaatcatactgaaatattgtatttttaattttgtcaataaaaattgtgaaaatgttttctttcatcatatgaaaaactatataatatcctcaagttttccttttgtccacaaagcctgaaaccgttgccatctggatttacagaaaaa

SEQ ID NO: 477543 - DNA, 1084 bp, Homo sapiens
tgagatctggtggtttacaagtgcgtggcacttccccttttgctctctcttcctcctgctccagcaatgaaggacctgctggcttccactttgtcttctaccatgattgccagtttcctgagggtccccccaccagccatgcttcctgtacaggctgtggaactgtttaggtcttattatttacttcctattatggaagaagaggagattaagacacacagagagaaaccaggggcagtatgcaaagaaggaccacctcatgaagacatagcaagtgcgcagccatccgtcaacgcccaggctatggcagccgcttcctcatgtcagcgctgctccctccaccctcaccccttccacctcggggcagttcgaaatgaagctgttgtcatttctggaaggaaactggcccagcagatcaagcaggaagtgcggcaggaggtggaagagtgggtggcctcagacaaggatgtcgatgacttttatgtaattaatgtagggcaaatgtgtttggaccagtattccacgttaccagctgccccatggggtgtgtgggaaataattaagcaaactggcattcccaccctagggaagagtgtggttgtggctggaaggtcaaaaaatgttgaaatgccagttgcaatgttactgcacacagatggggcgcatgaaggtcccagaggtgatgctactgttacaatatctcatggatacactcccaaagagcagctgaagaagcataccattcttgcagatattgtaatatctgctgcagacattccaaatctcatcacagcacatatgatcaaggaaggagcagccatcattaatgtgggaataaatagagttcaagatcccgtaactgcaaacccaagttagttggagatgtggattttgaaggagtcagacaaaaagctggttatatcactccagttcctggaggtgttggccccaaaacagtggtgatgctaatgaagaataccattattactgcaaaaaaaaatgctgaggcatgaagaacgagaagtgttgaagtctaaagagcttgaagttgccactaattaactaattgtgtcttctatgtcac

SEQ ID NO: 477544 - DNA, 860 bp, Homo sapiens
gaaagttcccattgtaatgttcgttgtcctgcacagctgccagctcctgcaaggctgcagctggaccagaggtaccacaagtggcttctgctgtgggcaccagtgtctggacaaggggaaagtaatggcacccaaaagcttagagatgccaggaactgcaaagccccaaaaaggatattacagctgtcgcaaccctggcttggggagccctgatgtctgggctcccaaaagggctgaagctcttctctccttctcatcccccgccacgtggggagtggaggatgtgtttcagccatgtttgggttacagctctttctgtcctaccattcagcatgtcctgagttcttgtcctgtgtccatggagaatgagcctgtggggacaggggtgtcttcctgggcccctgagagcacagggatacctgggtctggagctgaggctgggcagctgcagctgcacccaggagtgcagggcttctgccacaccaactcaataggggaagaggctcctcaccagaagccaactgtgttggtaacttcatctcagttttccaactttcagaactacaacaaatatatttctgctgtttataagccacccagtctgataatttattattgcagcctgaactaagtcagtgatctaagaccttagacgcagtttagttatagaacttacctaagaagcaagcaattatttatgcatacacatgcaaattaatacctttttaaaagacatctgttatgtcctttaaaaagctgtatgcgtatgaaatttgaataaataagattggcataaaagaaggttgaagggtccaaagattcattagactaaagataaatttgttgccaacttttcactt

SEQ ID NO: 477545 - DNA, 647 bp, Homo sapiens
aaactgtatcatacaccatggaatactacgcagccatacaaaataatgaaatcacgtcctttgcagcaatatgaatgcagctggaggctgttattctcagagaattaatgcaggaacagaaaaccaaatactgcatgttctcacttataaaagatgggtgatttctgcatttccaactgaggtacttggttcatctcattgggactgtgggacagtgggtgcagcccacagagggcgagctgaaacagggcagggcatcccctcacctgggaagtgcaaggggtcaggggatttccctttcctagccatgggaatctgtcacagaccgtacctggaaaaacaggacacttctgcccaaatactgcacttttcccaaggatcacactcctcgccagcaatggaacaaagctgcaaagagaatgatgagttgactgaagtaggcttcagaaggttggtaataacaaacttctctgagctaaaggagcatgttctaacccatcacaaggaagctaaaaaccttgaaaaaatgttaagacgaatggctaactagaataaacagtataaagaagaccttaaatgacttgatggagctgaaaaccatagcatgagaacttcgtgacgcatgcacaagcttcaatagccaattc

SEQ ID NO: 477546 - DNA, 2714 bp, Homo sapiens
cggctgaggtggtggcggctggagaggcccctataggctccaggaggcggttggctgctggttaccgggaactgccgcagtgttttgctttgaggaaccactttgtcggtgtggtgatgggtcgcgcgcgcggcaaggcaatgcaaacaaaagcgaaagcagcgatagataattttattaaaaagccagaagaaaactacaattcggaatgcagacttgatttaccaccaatgaagaaaaacttagtcggagaatacaccattgagacacagttatctggaccaaagaaaggagcaaactcttttggaacggatcctataagtgatgttgttagattaagaggtgaagatcccctggatttggatactggatatcatgtagccaatgtaagattgggcataaaccttataggtgaatttgaaactaacatggtaagaaagaagaacattagatggtatttacatgagaaatataatttaaggaaagcattcagggatgatttttctgagtggaaaatgaaggatatgccatttcctttggattctattaatgtgactgagaagaaatctgttggagaaattatagcaagagtaaaagcaacagatcgagatgaagatagcagtatcatttattcctttaagactcagcagaaaatgttttgtttggaccccttcacaggaacaatcactcttcttcagcctttgaatcttgacaacccaagtaactccaaaatctactctttggaaactgaggcaacagataatgggaataataccagcagctatacgtttacagtttttgtggagaatgtagatgatcctatttcctgtgatccaagtttttcaacaggagcagcaattattacagtcattgtaagggtgagtcgcataaatgaactgaatccaattggaagtgcgtcagcatttaccttcagtgtatttgaaaatagtccagttgatacactagttggaaaagttacatttaccgatgcagactggccatttaataatatggaatataccattgttggaggcaatttgggaacacctcccaaattttacattgaaccagatacaggagtgataaagctattagattcactaaacagagaaattgaatcacagtacaagatagctgtaaaagtaacagacttggacaacgatgccatccctgaccccctcagacagagaagtggtactgctcaggtgaccatcagtgttctgaatgatgaaaagtattctaatacactgacaacaccaaatgctggtgagtatgtggagcagcaggaacccttattcattgctctgggaatgcaaaacaatgcagccactttggaagagtgcagtagtttcttacatactcttactgtatgatctggcaatcgtgctccttggtattttatccaaatgacttaaaaacgtatgtcaatacaacacctgtatacaaatatttgctgttgctttattcataactgccaacatgaggaagcagccaaaatggccttcagttaagggtatatgagcaaatttgttacaataggtaaactgtgtgtcatgggagtttggcatacctataattttgtcacccaggagggaatgggaatccttctgacaatgtcagcaatgtccaaaaaaattgaggattaatcaggattttcaccaacaataagcagctgttagaagcgctctcttgcgactagatctcttacagagagacaacaaggcaggatcagagattataaccttcgtgacttcaatcaactgaaatagatggggaattgctttacagtctgatacatgattcaattttgtaaatgttcatggggtcatatgatgtttgtcaaaatgaaactacagagcaatggtaaaaagatgagagtttcaagaaattatactgggcaactgatatgcatatagacatagtagaaacaatcccctataaatcaagtctaaatgcattatagacataaaatggcaataataaataaaataactatactttagaaagaatttaagagactaccttattaattttgtaatagggaaagatttcataaataagacaacacaaaactagaataagaaaaaaaattagaaaattgaatactttagaattaagaacttcttacggatgaaaggataggatgtctaacctttggattaaaataatttggggtggagaggagtaagaaagaataaagattaaataaaacagtatacattgacaactattggtattgtatgatggctatctggtggattattgtaatatttttatacttttgtgtatgtgttaggtatcataaaaagtagttgtaaaataattgaaaggaaaataatctgagatgcccatgaactttgtaaaactattagtatttaatatggtaaagtgctcctcaaattaccctcacagataaaatattctcacttatttagtgcttcactaaaactgtgttatctgctttagagcttttagtcatacattttatatagttaaactctataatttattatttaaatcatgaatattctcctggtcatcagcaaaatgcttctgagtcctgctccccactccatggcatatgacaatataactttctttcatattccacaaatatatattaaaattgtttgataagtcaggtaaatattgcctaagactaagttatattgtcagtgatattgtaaggtattatcgtagaatttcaaacagtt

SEQ ID NO: 477547 - DNA, 510 bp, Homo sapiens
cgaggaagaagcaaaagtggaaacccttgataaacccaacaggtttctttctataatgacccctcctactatcagccctggcctacagaaaacagctaccactgaggttctcaatggtgatgccactctcaccaatgaatttcttattgatttagtaagtgcagtttctgtgggtcctcctgtggaacacagcttggagcttcccaggtctatctcaggctgctgcactagcagcgagcaaggctctgtgggcatgggacctgcggagccaagcaagggaatttcctggtctgctggttgtgaagctgtgggagtagcacagtatttgcgcaggagtgtactgttcctccagcttccatttttactgctggtgcagggtccaggaccccagtgcctggatagttgtgcttctgggcacatataccctgagtgttatcctattacccagtccccagatccctactcttatctcccttaatccttttaatgggttgcttgaagatagaagtc

SEQ ID NO: 477548 - DNA, 603 bp, Homo sapiens
cagctgcttcagtgccttctccatgttcataggggacccatctatcgctgcccaggtttccaccagagcccatctgaccagtgcagctgccactgggtaccgcaacccatgtttcggccacatggctgaacaggaatcagcggggactgaaggctcactcactttgggatgctgccagctatgcagttgtcagggactactgtacgctggttccgagctgacatttattccaggtaactcaaaacttcactgtggtcctccagttaaagtaggggtttatggagatcagaaccatcctatggtcatttccccagtgccagagtgcataattggcatagacatgcttagcagctggcaggatccccacattggctccctgactggcccgccagaagcaatgtgcattcagctggcaagaccagcaacataccttcactgtcctacatcaggggtatatcaactctccagctttgtgtcataatcttttttgcagacatcttgatcacttttcccttccacaagatatcacactggtccattacattgatgacgttatgctgattggactcagtgtgcaagaagtagcaaatacactagactaat

SEQ ID NO: 477549 - DNA, 1767 bp, Homo sapiens
attagtgccaccatcaaggacatgaaagatgcaggggtggagattcctaccacatccccattcaacttttctatctggtctgtgcagaagacagaagacaaatggactctggagaatgacagtgaattattgtagttttaacccagtgatgactccaattgcagctgctatacgagatgtggtttcattgtttaagcaaattaacacaactcctggtacctggtatatagctgttgatgtggagaatggctttttctccaaccctgtccataaggcccaccagaagcagtttgctttcatctggcaaggtcagcaatacacctttactgtcctacctcagaattatatcaactatccatctctatgtcacaatttagttcactgggatcttgatcacctttcccatccacaagatatcattctggcccattatattatgctgattggacctagtgagcatgaagtagcaagcactctggacttactggtgaggcattttgtgtgtcagagggtggaaaataaatccaaccaaacttcagggccttctagctccatgaaatttctatgggtccagcagtgaatgaaggttcaccccaccagacgcatgtaacatttggtgctgaaacccaagacaggggactccttcagaagaccagccccctgtcctcaccctcagtccgggaggagatccacctacgacctcgggtcctcagaccagcccaaggaacatctcaccaatttcaaattgggaccccactggaagtcggaccatccaacttggattacagctgctcctagacctactggagcaaaaagctaaggctcctggctgattccttcccagatctcctcggcttagtggctaaagactgacgctgccaaatcatctcggaagccccctggaccatcacggatgccgagcttcggataactcctacagtggaggacaggaatgtcaggcctgtgagcccaaagtaagccatcataacccctgtgacctgcatgtatacgtccagatggcctggagcaactgaagaaccacaaaagaagtgaaacagccagttcctgccttaactgatgacattccaccattgtgatttgttcctgccccaccctaactaatcaatcgaccttgtgacattcctcccctggacaatgagtctcatgatctccccaccctgcaccttgtgtcccccatccctgcctgtaagagataaccacctttaactgtaattttccactacctacccaaatcctataaaactgccccacccctatttccctttgctgactcctttttcggactcagcccacctgcacccaagtgaataaacagcctcattgctcacacagagcctgtttggtggtctcttcacacagacgtgtgtaactaaaacttgcctaggtctttcactctgccttatgacccttggtcaaattctttcttctgaagaggcaagaattgaggttgctgccgaaccatatggatttgccactgctaacaatattgcaactaatgtttaaggaactaccatttgtcaagttttgaatattcacaattcttgaaaaggctattattgaattattgaatgcagaaatatatatgaaaatccagctaaattttattcagccaaacattaaaggaatatgaaaaaatgtaaagcaaccctactcttcacattcatattttaacaacatatttgtacaaaatattttaatgtataatgaatttattattttaaaagcaattcataaaagttttgaaaa

SEQ ID NO: 477550 - DNA, 588 bp, Homo sapiens
agcttcaagggcagcagatagaatggagttgacctcacaagtctcttggagccatttgaccagctcctgcttcattggtattcagacaaaaatcaactttattccagtggcctctgtactgctttcttctctgatgggtagacaaggaccttgcgggccacgggcactagctcctgcagggacctggggcgggacaggaagggatctctacctgccttgctctatacctaggaggaatatttttgccttcaaagcttggcctgcattttctggaattacccatcatgtgtgtctgttgaatcaacactggtgtcagagaatccgacagagaagagctttccaagagaaggtcaaaatgggtggtgatcaaccagtcaatgacatcatcatctgcccagatgcccatgccagaaacctggggattccctttggcccatccttcctctcacacactgcatctaaccagcctcaggttctgttgatgccaactccaaaataactcttggaatagatccacttcactgtgccccatagccaaagccccagtccaggttgtcactatcatacttagatgacccagtagtaccc

SEQ ID NO: 477551 - DNA, 725 bp, Homo sapiens
cctactgcctctatatagtccacctctgagggcagggcatagtaggacaaaaggcagcagacagcttctgcagacttaaacgtccctgtctgacagctctgaagagagcagtgttctctcagcgtggcattcgagctcagagaatggacagactgcctcctcaagtgggtccctgacccccatgtagcctgactgggaaacacctcccagtaggggccaacagacacctcaaacagatgggtacccctctgggacaaaacttcaagaggaaggatcaggcagcaatatttgctgttctgcagcctccgctggtgatatccaggcaaacagggcctggagtggacctccagcaaactccaacagacctgcagctgaggggtcaccaatatcaaagaccaaaggtagataaaaccacaaagatggggagaaaccagagcaggaaagctgaaaattccaaaaaacagagcacctcttctccaaaggatcacagctacttgccagcaagggaacaaaactggacagagaatgagtttgatgagttgacagaagtaggcttcagaaggtgggtaataacaaacttctccgagctaaaggagtgtgttctaacccatcgcaaagaagataaaaacctgaaaaaaggaaagatgaatggctaactggaataaacagtatagagaagatcttaaatgacctgatggagctgaaaaccatggctagagaacttc

SEQ ID NO: 477552 - DNA, 756 bp, Homo sapiens
tacagaatagaatacggaatgtggaatatgcaaagccattacaaagacaatgttcttcagcttgcaagacagtgaactgactaatattaagcatagctaaagaaataatgtgaaaatcaggagcatggtggtcagcttggggattagagtcataacaaatagaaaatataaggaacagttggcaggaccctccaaaccattgtccagaggagatgaaataatcccccttctattggtgggaccaatcccatcatttttacctcttaataccgtcacaatggcaactaaatttcaacgtgagttttggaggggacgttcaaataatagcagtgagattaaaggcaggggcccgatcatgggatggttgcacatttgcagagtgtgttctcatgcatttgattgtcacaacaacaacgacgacaacgatgaaaaagatctggctggagatggaaatttggaaagcatcagcttattagtagcagctgaagctgtgggagtagatgaagtcactcagggagagtatgtggcaattgaacaatgagaacacatggacacaggaaggggaacatcacaccccggggcctgttgtggggtggggggaggggggagggatggcattaggagatatacctaatgttaaatgacaagttaatgggtgcagcacaccaacatggcacatgtatacatatgtaactaacctgcacgttgtgcacatgtaccctaaaacttaaagtataataattaaaaaaaacatat

SEQ ID NO: 477553 - DNA, 600 bp, Homo sapiens
gcctctctctcctcctcctttctgccttcaatgttcagttgtcaccctctcgctttacccctcaaaccaagggtggggatgtcccctgcctggtgctggctctgggatgctgtattatcttttatggctttcatccaccctacccatatctttgtaaatagctcccttatggaactgccccaggtgtgtcccgtgtttcctggtaggacccttacttgtacagtcaaccagggacctgtttcttccaccttgtttcacagtattatcttcatgtgcatggggatagccggctctccatattcccacccaattgaagagaacccttgtgattacacggggcccacctggaaaatccagcatcctctccccatctcaaagccagttgatgaagaccttcattctgtcaactttccctttgccatgcagctgtgtgcctggttaaaatgtggagaagtcctattaccaaaaggaagaaggagtagaatggatgtcagacagcaatttccagcctgagcctcatgaggctcatgtgttcttgccagggtctgctttcagctttccttcccttcattgtgccatgccagtgcttctgcctaattg

SEQ ID NO: 477554 - DNA, 3102 bp, Homo sapiens
tgccctcgctgatttgacaggaggcggagctcaggtggtaattatgcagcccagttcctaacaggccacgtaattataataactctgatgcaatctgagaaattagaaggaaaggtcttatgggtacttagtgaggaggtggctatctgccacacaaaggaagaactttcactggataccaaccctgccatcaccttgaatttggttttccagtctccagaacttcagtctggagctacaattcacaatgcgaactttcgcaagctgctctgtttggagcttcaatctagtcctgcctcccatccacctgatgagttcaacagcagaacgtgtgggatcgaaagacaccggagaactgccaggcctgtgggccttaagccccatcacctccctgataccgaatacaaattacccaataaaacaaataaaagctttccaaagctgtatcatacatcatataaattgtttaaccctattcaaaaaacaagcattatgccagtcaggtagcaaaattaaataactgcatttgcaaaatttaaaagcaattgcttaaaacctagttgcaaattaatttctttccacatttctttcaaagctatttaataaagttaaaagttcacctcaaaaagcccaatatatgcccactttctttatataactttcatatgtgtatagcttttgttaatgcagttttacagagaaaatccatattccttcctaagccttcatctttgtgatcccaggtcttacatcaatggggactgggcttccccaggtagaaaaggaatgcttatccagtaaccatcaacatttcctcctttaatagggcagtcttccacatatgctaattttctttctctcatcatcatatttattctacaagtgagttaacatatcatatgctatggtaataagttctagataaatgaacaaatgtaatggaataattttttttctcttggtgctttagattttctatatgattgttgataaaacatgtcagattcacagccctggaaattaaaatctgtagtttacagaattgattcagcaactgggagagcacaagttatcatcgtcaccaaccaatatttgttgaactaaattttaaatatctcagctagttcagacataaatctctttacttattaactctttacagtcagagtactgttgcattaaatggaaattcatgaacgaatgaatgtatgaattaatatagatgcacaaactatttgttagctagtcatgtgctccaccagtttctaattcttaataaattcgggaaactcactatggatattttctcagggaagtactgactctggcggtacttgttgctgtgtcactcacaaatacaagtaaatactgaaaaattaaaattaaccatctcttgtaacatctccattccgagacaaagagagtaatagtgaagcatacagcattttttcaatggaaaaattaaccatgtgtaaatatgttacataattcaagagactttttctttctacacatggcttacacttgatttacttgaagactctttctaattcaaactaacttaatttagagcctgcaaactggagaaaactttgagaatattttaaaaagtgaaaaagcaagcatttaattatgatttctattaaaatttgagggcatcattaaccactgcatttttttttttttaactcacctcctggttccagctcatggctttttttgtaaaaccttctgtaacatactgcctccacaccacactcccatctcagcaaatgcctgctcctgggccagttgtccttgttcctcttttttggctacctttctaacttattcatgtattctgcagtatggaaaccagttgtttgaatgtatttttttctacaaatctgagagttcatagaaagaagggtcacaatcgaagacacctttgtaaacgtatcccctttgccttccacaggatctggcacaatgtggatactcagtcaatatgcatagagtaaatacatgtgtcttatgacaacatctgtcccttccaatcattactgccactcatatttcatcctgtgcttactttctggatagccccgtaaaacttttgattgctttgaggaaaaagttatactttttttttgaactaatattttcagatcttgggtacactaggcctaaatcccctaaataagcaaatagttttcagggaagcaggctaccatccagccctcattggcagagtctaaacttctctaatgaggcctggctgctattttgagccaagagttctgactgtttccatttagcagcaaaatccttagtcttcatcattctcaaaactccatttgttttccaattttttctcacattcctgacatcagccaaataaagtagttccatttcttgtccattttaatatcatatttttataggatattcatggatatcagatttttttgcatcttctctgctagctaaatcattatttctgcttccaatctgtagagaaaagttccattcccctggcttttgattttagttaagagcagccttctctattgtgaaatgctgatagtatagcatagtagatggatacacacctaaatgatcttaatgcagtttccagtgctaaatgtgaaatatgttaaggtaccaaataatacagaggacagaaagctgatctctgcttggtgctttcaaggactgactctagagtcagattaacaaagtgtaaagatccagaggtatgaaagagcctgtcatggggacttcaagaagttctgtgtctctgaagcattggagagttgaaagggtgttcaataattagggggatggtgtgattggcttcgtcttttagaaagttaactctggcagtatggtagaagctaagttaaaggggatgagaattatgagtgaatctgaaatcattctgaagtgaactccaaggcacttaaagataaaacagtaaaatggcagggttagggaattaaccattttctatcctggagaaaggaggacatttagagggttatacattaggaggaagggcaagaactctagggataaatgtgcacagaaatggggaagttgtaatcttgatggtagaacacc

SEQ ID NO: 477555 - DNA, 946 bp, Homo sapiens
tattccccaagcttcactcctttcaggagttgggttctgtgtgaggaaacacagggaccctggtggcttctgcctcctagggctgtgctgggtcctgccaagagcacttcttgagccctcacagtggtctgtgaatgaggcctttgctgtcagcttaatcagtctctgcagggtcctacagctagcagtaagcaggctgggactcacctgctcctgccatctgctctgccgtgtcctctccccatggtgggaccctttgggtctttactctttgccccagggggctggaaaaggaagtgtgcggtgggaacaagtgaaggcagcgtgagtggatgggactaatggaggctcatgataccccaggcagaggaggagcgagaggacatggagaaggtgaagctggacaacaggcgcatcctcttcaacctcctgccggcccacgtcgcccagcacttcctcatgtccaaccctcggaacatggacctctactaccagtcctactcccaggtgggcgtcatgtttgcctccatccccaacttcaatgacttctacatcgagctggacggcaacaacatgggggtggagtgtctgcggcttctcaacgagatcatcgccgactttgacgagctcatggaaaaagacttttacaaggacatagagaagatcaagaccatcgggagcacctacatggccgctgtggggctagcgcccacctcggggaccaagggaaagtcagcacagaaggcaccggagcttcctccagccccagccctgccctgctagacacctccccctagaaccctcaccctgcccctgctccattacctcccgcactggcccacctcctcagcagcccagtccctcccccaccagcccccaccttcctccctgcttgcccctctcttctcctcccatcagccttgcactctccttttccacagtagaa

SEQ ID NO: 477556 - DNA, 1144 bp, Homo sapiens
aaaaattagtccacaagtatggaaggggaagataggaagtggcttcggtcgaggccagaaagccccagttgcaggaggtggctgccagcaggctgtaacaggagagctgacagcatgcttggtccccctctgtcctgccgaggacgggccaggcgtcacagcctggtatgtgccctacttacagggaaggaagtccaggctcagagagggatcaggactcgttttgaacagccagtgctgttccccagtgcagtggacagtgtcgtgaggagaccctgcccaggggagcccgtgcagcagggcagctgcctctctggtgctgtgtgtgatgcttcaggaaggagcctggtgctaggcatcaatgttggccctgtggtggctggagtgattggcgctcgcaggccccagtacgacatctggggaaacacagtcaacgtggccagtcggatggatagcacaggggtccagggcagaatccaggatgaagcccttaaaactaagatggagattgtgaggggccacacagccctgcagccaccctcgctgggaactgcaggcctccagaggccatggagggaaggcttggtccccaggcacgtgacagcagctattcacgggggcagtttaagggacaggtgtacggttgagtggcattaaatatatttacatggttgtgcagccatcaccaccatccacctccagaacttcgtgctgtatatatatatatatacacgtatgtatacacatatacacatatatacacacacatatatgtatatatacatatatgtgtgtatatacatatatgtgtgtatatatacgtgtgtgtatatacatatatgtgtatatatacagcatgaagtgtaaatatatatacttatacttttttacaatgtactttttaaaatatacaatatttaaatattaatattaattttattaatatatattaaatatataaatatatttatatattatattaaatatgtaaatatatattatatattatattaaatatataaatacatattatattaaatatataaatacatatattaaatatatattttatatattatattaaatatatattttatatattatattaaatatatattttatatattatattaaatataatgcg

SEQ ID NO: 477557 - DNA, 640 bp, Homo sapiens
gtccaggaaagttgggatggctgaacaacagagggccaaccttgttcctggggaatggtgagtacattttctagcaagttccttgggactcctgaccaatgtcagcatgtccgcaatgccccatctagattctgccctgaaagagccaaacaggagagcagtagtgtctgccacatctttgtggaatcctgcccttttgcggtcaacctcaactcagggaaagtaaaaagattaacgtttcactgcacagccaataagcccaagacttcagaggactggctgtatctccagatttgcggaggggggaatggctcactgtggataggtacactattctgccaaaaggcaaatgtctgccaaaacacagactctggaaaaatctgtctaggtgcttctaataccttctgtgtatgctggttcctagcattgggagtgggggaagatgtgtctctctgagtctgggttggaaaaatatagaatggcaaagtcctgtgtgcccaggggaaaaaaagaagtccatgattctgactcctttagggagaacaaacgaaccctgtgccagagattcacctctatttcccagagatattgctttccaaatctgccttctttcaaaagctgtgcagaagtacctggctga

SEQ ID NO: 477558 - DNA, 696 bp, Homo sapiens
actctcctctttgcagatagacatgctgcattttcctcctagaacacagattgtcccctatgcagcttgggttgctctgccgtcacctttcctgctcctcagcaaagtagaaggtaaagccgacaaaggcgatttttacaaccacaccaagaaaagtcgacctgggcttccatacgccccactgactgcaggggtgctggagcgaagacaggccttgggtgaactaaatgtggcaatctggcttctggggccagtcaaggaaggtcctgcagtacccacagcagtcagagagcccaaagaactctccgatgctccatgtagctttccaattgataacttctgcactggtgacctgccctggggccaaggcaaaggtagaagagaacaaaggaaggaggaagtaacttgtggaatgctgagaaaggtaaaaacacctttaaataaggaagaggaacagactatgacctactgcttgcttggaccagtataagtatgctagggcaaatatttaggctaaactgtgggagctaagaacataaagtacattgatttctttatcaaggctagcagatatttaagaatgttagcacaggtctttgaataaattttgcttctaagagaagttactatttattcctaattaaatggggaggaaagtctttgaagaggaacttttactttattttttacaatggt

SEQ ID NO: 477559 - DNA, 525 bp, Homo sapiens
cgacaacatctgtgaattgggatgagccaaaccccagtgccgctgtgtccccactttaagactggagcagccagattccctctggcccccactaaaccgctgaattctaagaaggctgagtgtctgacatccctcagggagtaccaggcctccaaccccaactgccagaccccacgtctctgctttcatccaagtccacacatagaagtccattcagtcttttattctctatgcttatcatgggctgcgctgcctctcccaaacctaaccacccccaagtcttgccatggtccagtctgtaattcccagcccttcattactccattctctcatagttctgggcccacatctcctgtctgtgtctctccctcagactgttctctgagctctagacggcaggtgcagtgctcgcagacttgtgcatctgagcagcctgcaaacatgacccaaaccagcacagcccgagcaagctcgatgtctgtgccctgacgtctgctcttcctaggcgctattgttagtgttggc

SEQ ID NO: 477560 - DNA, 607 bp, Homo sapiens
aataggaatcagggatgctcccaggaaggaacctccttgtgaagtttaacttgctagctctcaaaaagaaaaggccatttaggaaagttcacagcagggcagccccacaagggaaggaggctgcccacacccgccagcaagaggaagcccctgtgctgaagttcctctcgagccatatgagggtaacaggctttttctgcacagagatcaggataagaaaaggaaaaacatcccaaggcctaacagtgaaggcatctgttgctgaccacactgagggctgtggcttctcttcagacctggactgggcgtatcttggtattaccacggcctatgattcaggtcaatggaaagctacaataactgcaatggaaaactacaataagtcaatccaggcaggaatatgggtcagaccctttagcaatgaaggcttgggtcaccccacagaagaagaaatgaatgctcatatcatcttaccatgtaaagatatttattaactttttaatgtgattttcattctatgtgcagctttctgttctttttgtaccgaacattatatgatggtcatttttatatatttttactaaaaaccattcataatcattacttg

SEQ ID NO: 477561 - DNA, 3062 bp, Homo sapiens
tggaatcgaatggaatggtttggcatggaatggactcaaatggaatggacagtaacaaaatggaatggaatagggattcgaacggaatgcaatggaatggaatggaatggactcgaatggaatagagtcgaatggaatggagtcgaatggaatgtaatcaaatggaatggaatcaaatggaatggaattgaattgaatagtaaggagcagaatggaatggggtgttatcgaaagatatcgaatggaatggaatggagtggaatggacttgaatggaatggactggaatggaatggactcgaatggaatggactggaatggaaatggacacgaaaggaatggtctcggttggaatttattggaaaacaatggaatcgaatggaatgcaatagtatggaatgatatcgaatggaatggactcgaatggaatggacttgagtggaatgaattagaatggaatggaaacgaatggaatgcaatggaatggaatacaatggaatggaattggatggaacggaatggaaaggaatggttgaaatggattcgaatggaatggactggagtgaaatggattcgaatggaatggactggagtggaatggactcgaatggaaaggaaacgagtggaatggaatggaatggaatggaatggcttgaaatggataagaaatgaaaagaatgtaatggaatcggatggaatggaattgaatgtagtggagtcgagtagaacagaattgaatggaatggcatcaaatggaatggaaacgaaaggaatggaattgaatggactcaaatactcgaatgtaatggattgctatgtaattgattcgaatggaatggaatcgaatgggatgcaatccaatggaatggaatgcaatgcaatggaatggaatcgaatggaatgcagaggaagggaatggagtggaatcaagtggaatggaatggaattgaatggaattgaaaggaatggaatggaatcgaatggaatggactggaatggaatggattcgaatggaatcgaatggaacaatatggaatggtacccaatggaatggaatggaatggaatggaacagaatggaatggaatggaatggaatggactcaaatggatggaatggaatcgaatggagtgaaatggaatggaatggacttgaaaggaatagactggaacaaaatgaaatcgaacgtgcaatggaatctattggaatggaatcgaatggaatggtttggcatggaatggactcaaatggaatggacagtaacaaaatggaatggaatagggattcgaacggaatgcaatggaatggaatggaatggactcgaatggaatagagtcgaatggaatggagtcgaatggaatggaatcaaatggaatggaatcaaatggaatggaattgaattttatattaaggagcagaatggaatggggtgttatcgaaaaatatcgaatggaatagaatggagtggaatggacttgaatggaatggactggaatggaatggactcgaatggaatggactggaatggatatggaatgatatcgaatggaatggactcgaatggaatggacttgagtggaatgaattcgaatggaatggaaacgaatggaatgcaatggaatggaattgaatggaatacaatggaatggaatcggatggaacggaatggaaaggaatggttgaaatggattcgaatggaatggactggagtgaaatggattcgaatggaatggactggagtggaatggactcgaatggaaaggaaacgagtggaatggaatggaatggaatggaatggcttgaaatggataagaaatgaaaagaatgtaatggaatcggatggaatggaattgaatgtagtggagtcgagtagaacagaattgaatggaatggcatcaaatggaatggaaacgaaaggaatggaattgaatggactcaaatgttatggaatcaaaggaatggactcaaaatgcagtggaagggaatggagtggaatcaagtggaatggaatggaatggaatggaattgaaaggaatggaatggaatcgaatggaatggactggaatggaatggattcgaatggaatcgaatggaacaatatggaatggtacccaatggaatggaatggaatggaatggaacagaatggaatggaatggaatggagtcaaatggagtgaaaccgagtggaatggaatcaaatggaatggagctgaatggaaatgaaaaatcaaatggaatggcatcgagtggaatggactcgaatggaatgtgctcgaatggaatagaatcgaatggattgatatcaaatggaatggaatggaagggaatggaatggaatggaattgaaccaaataatggaaagcaatggaatggaacgcactggattcgagtgcaatggaatctactggaatggaatcgaatggaatggtttggcatggaatggactcaaatggaatggacagtaacaaaatggaatggaatagggattcgaacggaatgcaatggaatggaatggaatggactcgaatggaatagagtcgaatggaatggagtcgaatggaatgtaatcaaatggaatggaatcaaatggaatggaattgaattgaatagtaaggagcagaatggaatggggtgttatcgaaagatatcgaatggaatggaatggagtggaatggacttgaatggaatggactggaatggaatggactcgaatgaaatggactggaatggagtggactcgaatggaatggaaacgaatggaacggaatggaatggattggaatagaaagtaatagaatggaatggaatcgtttggaagggaatggaatggaatggagtcgaatggaatagaattgaatgtcatggcatcgaatcaatggaatggactcaaatggaatggacttgaatggattagagtggaatggaatggcaccgaaaggaatggaatggaatggaatggaaaggaatggaatgtgcagaaatttaatggactcaaatggaatgcagtcaaatagaatggacacgaaaggaatggtctcggttggaatttattggaaaacaatg

SEQ ID NO: 477562 - DNA, 551 bp, Homo sapiens
gcaaactggcgtctgaagaccagaaaaccatggatatattcatgtggcttaaaccagagggtgtgccagaaaaatgttccaaagacccatgtggactgagtgacacatcagctgggaggggaccaggccatgcacggaggatccagagggctctgacatgcctttcccttgctaccacacgattatatcagccccagcctctggggagagagagcaagctgggaagatccagcattgggaagagaggaatctgggaagatccagaggaagcttggaagatcctgaggaagcttggaagatcctctggagagagagaggaagctgggaagatgcaaaagaactcaggaggggtaggagatccccacaacatcatccacctactgtccttcctttctgtacctccatatggatgtaacgatgcgttgatggatatgaatgaaactgggcattctgtgacttattgatttgaaccaacactggttaataaagcattcatttaactcattctctgttatagctccctctactgagggccatggctcttctctgaa

SEQ ID NO: 477563 - DNA, 523 bp, Homo sapiens
tactcatctgtgaaatggggataatcatagcccttatctcatacatttgtctccttgtagagtactttataatttatatatttttaaacaatgtccgtggcctaaccctcggggaccttctcatgagatgtactaggacctctcgactacagaaagagactcaaaggtctattagtgattgtcagaggtgggatcccacgggcacagggacatctggggccctaattgagaaacgtcagcccaagtctgagcgaaacctctactggtcagcttccactttgatattagttcgcttatcagacatctttgaatctaaaaatgatcctcagagaccacagaacaaataccagcaaccaacccatttcacacttctgaaaaaagagagaaaggaatggcaaaggctggccaaagcaaacaggctttggaaagcttgaaactgtgggctggaattttcagttgttcctagtcttttcacactcattttggggaactttctccactcagaagcgcagaaactttttgc

SEQ ID NO: 477564 - DNA, 563 bp, Homo sapiens
tcagtgctagatgttcttgactcacagctggacccttcagagaattacttgctatcaggagctgtgccacccagaatggcctgggaagctgcattctctccagaagtctgtcagtagccaatggccaactaacacaagggcagaaaagtttggcacccttgcctcaaggtgggaactctgtggttccacgcaggctccagagctgcctcatttatcaattatactacacaactatagtagtagtgtaaataactcctactacagccattttcaagctgccaatgtgattgctgctgaacacaaagttgaaaagacatgcatgcaattggctcatgggagtcaaacctcaactctcaatgacagcttcattaacctctggatgtaaaatttagccaatccttatccagagaaggccagcattcaaggtattgaatgaaacatcattcatcaattcttcagcggattgggcacctactgtgtgccaaccaaggttacgtgtaatttcaagtaaggaagaattgctatcttgatggttatagacttgaaactctaaatcaaatact

SEQ ID NO: 477565 - DNA, 685 bp, Homo sapiens
accttattcctgatcttgtagatgtttgttgtctttctgcgttttgcatacccttttcatgcttatctcccattcctgtctctgcaactaggggctctcattttcctcctgggaatgaaagccaccagtccagttatattcttctcatggagatgggcagaaatgcaggagaatgagtgggaatgtgccttcaacgaattagatgaggtctacctaacattgagcattgagggcggtgatcttctttacagcctactaattcaaatgttaatctcgtccagaaacaccatcacagacatacccagaaatctcaggaaagagattccaatacattttgaaagtgaggaggaaccaaataggtacacttttcaagtactttatggttatggtgccctttctgaatacttggtcctcgatgaaatgacagaaggtgttcatgaatttgtggtagaaaaaagcaagttaaacgctgtagtgcaagatgataaaaattatggaaggacatgcacagatttctagaaacacaaacagtgatgtgctaataaatatttaaccggctcacccctgatgtctgccaatatccttgagggcttttcctggttatgccttcttctgggctctctgagaagatggcaagcctatcaccaaaacatacatgtggcgggtaacttctctggttgctatc

SEQ ID NO: 477566 - DNA, 666 bp, Homo sapiens
aaccactagacctgattatcactttgcaggcttggagagctgacactcctctatcagagtcagtgtttctacaagaacataaacaaagggcagccagctcgctaccaagacccggctccacagattttcctgagagtcatcaggtagccctgggtgaaagaagaaagtccctaagatcagctccctctctacctgccagaggtgttcccaatacctaagacaaagccagggacatgatagatcgttcaaccttacctcctcccacaaggtctctctttcatagtgtttgcctactggagaaatttctcgaagtggatcctggagtgtcacaagagcccttcacaaagccattcctacaacaaaacgtggcctggcatggagctctccctccttgcttcttgtcccagagtctacgggcatcagaaagtgatatgcagggagatcccaggggcttcatcagcacgttcagagccaagtcacaggggtcaatgtttttccccatttctgctcataatcagggaatccaagcagagatggagacctgctatgttccaggaaccatgccagggatctgcataaaattcccagggaaccagatcaccgaagttaggaggaaccatgccaagcaggtgagatacagctcagtctaacactaattcacacaac

SEQ ID NO: 477567 - DNA, 510 bp, Homo sapiens
caatttccacctatgaaaatgattgttaatcttgcatatcaactttggagaaacgacgtcccattcttcagcctcaaaggtggtcgcacctggcagaaacagcttcagttctggatgacagccctgcaaggccactcagccccagctctcacctctgcagctggaaagacagagatccagcaagtggcttcttgctggctggctcagagagtcctcctgctggctcctgccacagtccagagcaggcagagatccctcaccagcctctggctctcttctactgggctgcagtgcctgcacagcaggaatcctagcctggccacgctctggcctggactggtggattcagagcattggacttctcatgtgggaatgaccactttccagtttttatgcctgaagaaggggcagacaccaccagacactgaccccaccccacccctcataatcagaaggtgtgacttgagcttctcaaggcctcagttttcttatctttaaaatgggaatcat

SEQ ID NO: 477568 - DNA, 1068 bp, Homo sapiens
gatgaggaaactgaagttggaaaataggcatataaaaatcttggctggcagaactagccacccagaaacagtgcccccttgccagagagggagctggcaggacccagctccgcatcaccttccagcacccacttgctggaacctcattttcgaggtggcagcagaacgtgtggtattcccaccagcaccaacatctggggcagaggtggaggtggggcctttattaaaatgcagtgactccattggcaccaaaataaacgtgacatttatcagaacctgctaaatctattcagcgcttgcttcctttggaagcgcagggttcatgccgtgggcctggagagaaaaggtctttgctgtgaagaagatttctgcttccccttctgccgtgattactatatgcttcctggcaggcctgtggtgggggctaggcctcctcaaatgttcctgctgctgctgctgttagcagtaggcagtgagaggtacattcagcgagtcatggacccacctcgaagcttacattttcccacctgtctacaaggatatcttgaaagcatttctgctgaatggatgcatgcttcattctggatccaaaatgtggaaccccaggcacttctgggagtgcaagatacttgctgttggcagttagaaaaccatgggcttaagcagttcgagagcattgaaagagaacttgatggagctaaatctaaatctaattatcatgctgaccaatctcaggagagccctctaaccaatgatgttagtaaatggttaacaaccagctctctgaaaaaagaaaagtcctcatagcatgtgcctatttctttggtgtaaatactctaataatggccgactttgtgagttaccaacatgatgttaaccagcttgcaaatttcctgaaaacgttaacagttggctcttgggagctgatatgaactgactccagcaatactacagcttccaaatcttcaaatactttgcaagatttggattttcaaactttggtagcaggcttcctaggtatcagatgaaagaaatgggtaagagtgtacagataacttgaatatcgca

SEQ ID NO: 477569 - DNA, 512 bp, Homo sapiens
agcacacgtacaccagccacagctatatgaccccctgccagagtatctatgttaatcttcagagtcagaacagtaaatctataaaaaggaagaggttttcctacctgcctccaagagctcttattctggaggctgggaagtccaggatcaagatgccagcagattcggtgtctgggcagggtggtaaaggtcactggtatccccgggctcaggcaagtgtggagatgggggtttgtctccagaatatgttagctctgttacagtcctctctatggggcccaaagctggctcagtttctagaagagacttctccaggagccctacatggcaagaatggtgtctatcctgcatgggaacagcttcccccgggcagcagccacagttgctgaatccgctgtttctgagaaagtgaaatttcagtccctccgctccctcttatcagcggggctgtcagggcatgtggggaagggtcagccaacctcccatgcctcttggtagaaagtggacattct

SEQ ID NO: 477570 - DNA, 723 bp, Homo sapiens
cttgaagaaagagatgatcagaatggcgtttccaacttcaagagtaccctctcctgtggttttcatgtgcaaaaatgtgatggcttgcttcctgaggctctaccgctgcagtcccttagtccttgctgactctcacctgctcccggactgggcgagaccctcccagcttctgctgctgtctccagttgtccctccttgcttcctcgtctgcagcttcactcctgaagccagtgagaccacgaacccaccgagaggaacgaacaactccagacgtgccgccttaagagctgtaacactcaccgcgaaggtctgcagcttctttcctgagccagcgagaccacgaacccaccagaaggaagaaactccaaacacatccgaacatcagaaggaacaaactccggacacgccgcctttaagaactgtaacactcaccgcaaggaaaaagggctgttattgggaactgggcagccaccctgccctaaccctcatcctcctccaaagagaccaccatgggcttcacaggcctcaaggtcagtgctgacgatgtctcctctagacctgacaccctggaaaccttcagtttactcgggcacctgcagcccaggtcaggggccataacacatgatgggcatcgatgggaaatatagtgctggctagctcagattttcacaggagactcctcacaggctgggaaacatgggaactggtccacccttggatatc

SEQ ID NO: 477571 - DNA, 1098 bp, Homo sapiens
cgggatattgcggtcaacaagacaaagcccttgctttcatggaataggcgaaagactaaatacaaggggcaccaactatgttccagatcctgaggatctccaattttgccaagctgctggtgagccgtccaggggtggcatggcagctgtccggtaccttcaggaatccaggcttcaatgtttttgctccattatccttagctttcattcccaaggtcacttcatggtccaagatggctgctggagcaccagtctacatgtccttggaaggaaaaaggaaaggcaaagtggaaaaagtggaagagggagggcgtgtggcagaaaagatactgggacacacagttttaacccagtacctccctacacactcacatattgcagggttacctattgccctcactccttctgggcataaccaggagaaaggcatatctgggtcaatacagacaaagtcagtactggcatggctctgtaagctaagtaagattctggaaagatccattggcatacaccagtacaaagtacctcaggcaaaaccgagtcagggttaggagctacaatcaaataaaaagatgattgagaagaaatgacaaagatccaggcagaatgatctgttttggtaagttggtccaaattgtggagggagagagagagagagagagagagagagggagacagagcagaaacagggacagagagatggagagagggagaaagaacagggagagagagagagacagagaaagtgtgtctttgtggtcttagaagggtactgtttattataattgaagggtcagaggcaaggcagataagggtagctcatgaatgattagatggagggttgaataaatggataaattgatgcatggatggttggtgaatgaatgaatggataaatggatttaatgaaattaggatggatggctgatgttactgataaatgaatggtgggcaagtgaatgattagttagatgaatgaacaaataaatggacaactggattggatatacgtacggatagaaagatagatagacagacagataaataagtacatacatacatacattgtgagtgaatggatgaccaaagtgatggatt

SEQ ID NO: 477572 - DNA, 521 bp, Homo sapiens
ggtccctttactattatgtctgagaaagaaacaaaaagaatataaagaatgttagtccaaggaagtccccccaaaactgctggaagtaggcatagagcacaagagatccaggttggagaaaaacaacaagagatctccaggagagatttctccatgaaaaacatgcacgtggacagtttggttgaggcaagcaggaaatatgctaagtgtagacccaaactccctggaagggtgagctctcctaggtatgcatttaattacttaatatgcccctggcattatgaggaagttacaaaaggcagaaatgggacctcaaactcccatgagtcaactcttgtacatggccattgggtttacaacaacagggacagagcagaggaagcagagaaaaccaaaataaaaagccaaaaagcccagttgttagtggctgccttaagccacctgctgcctcgaggttattcatcccagggaagtgttgcaagatcggtgtctgggctgcccagacgatagcccccaacttg

SEQ ID NO: 477573 - DNA, 755 bp, Homo sapiens
tcttaactgctcagtttggctctgagctgcctggacaagtgggaaattgtgtcaattgccctatacgtatccattgggatcttagtatggtcatgtttgttgcctgatttccaattgcccgaggctttctctggcagccagagcccactctgctagcaaagcacagcaggccagaagtaccagacaataaacactctctgggagaagccctcaacaagtgcgttatgggagttggtggatgtattaagcatcctagatctcttaaccctcagtacttcctgtgggactgggctctagtggctcacagcaggaacctgctcatgaacatatgcttgattggctttccctgcttcaccgcttcctcactggctacagaaaatcaccagcatccaagtccttatctcaaggtctcctttgaggaacccaagacaattgaagataatagaaaagtggttttggacacctttggaaatggaggacctgagataaatggtcttcttgacctgtgcaatcataatccttcttttaaacacctggtttatagtcaccaatttaatgtgactattccttatctttattctgggacacttcctactctcctcggactcttggataaatttagtgcaaaaaaaatctctttggacagacttgtggttaacaaagtataaaagaggagggccttttagtatatctgttagatgattacgtgttcttcctctttgggtggaaagattttccctccaagcagctgcatg

SEQ ID NO: 477574 - DNA, 654 bp, Homo sapiens
tcttttctcttaacgctttaagtttctgcctaggtcctgaagaaagaaatttctacccacactttcagccccctggagaggaggaatggctaatggggtcattcagggggtggcatttactgagctccacttcaccgatgggtggtgtgccatatacccttgccctcccttctgccaggttgttcattttctctgtcgagttataggtttgtttgaaaaaaacaaaacagaacaaaaaaacctccgatttaagcaaaaaggacccgacccagtggggtgtggagaggagtggctgcatgcatataggcctaacaactggactcccaagttgctaacactaatgactgactcaccacaaagccagaaacgggacatggatggaagaaggaagacagaaggcaggaaggccagccaagaggcttttgcaactgtccaggtgaaagatgacaatgaaccacaaaagagatccatcatgtggattaggaaactgaggctcagtgagtaagttggccattttattactttacatcattaaaggaaaggagtcaagggctacaaagaacacattcctagtcataggaggagatcataagagttggcaacaggaaacacatgtatttatgaaacatgtactaatatgccagctatcgctgt

SEQ ID NO: 477575 - DNA, 853 bp, Homo sapiens
cctgacagtgtgttctgataccttggagcagggctctgccaagcaggggtttttctgacagacagtatgcagctgctattcccttccccactgtcctctgcagagctagctcatggcccattttccctgctgttcctaagcacaccaaaatcacagcagattcacagagactccagcgcagccacatggtggaagaaaatttataaaccaaaaaaggaaatgacgtacagacatcggcagagaggtacagaaacagctggattggttccaggagcattttgtcactttctcttctatggagggaaggggccatattctatggcctcggatgatgttaagaagtcaggaattacagctcagctagatccttgccatgtgaaggacagaatgaatctaatacagaaaactgcacccagtggagagagtgcagatggcatgagtgtctggctgcagctgcccttgacacgcagctctggggaggggatctcattcctatagttatttgagttgccccattatccttctaataaattcccaagatggatcactctctgtttggagagagaatttcaaactctgtgctttctgtatggtcctatctcctcagtatctatgaggactcttgaagtttctggcatgtatttatttagcaaatacttattgaatacctattattttccaggtattcttctaggtacttgtgatccatcagtgaatgaacagatagataaatacccctgtttttttaaaaaaaattatttgcgatagcggtaaaatatatgtaacataaaatttaccatattaaccactcttaagcacacagttcaatagtgttaagcacattcacactggt

SEQ ID NO: 477576 - DNA, 722 bp, Homo sapiens
tgaccttgactctttgagagggagtcctgtactatcagccatggtcaaccccactgtgtccttcgacattgctatcaacaccgagtccttgggctgtgtctcctttgagctgtttgcaaacaagattccaaagacggcagaaaattttcatgctctgagcactggagagaaaggatttggttataagggttcctgctttcacagaattattccagggtttatgtgccagggtggtgacttcacacgccaaattggcactggtggcaagcccatctgcagggagaaatttgatgataagaacttcatcctaaagcatacaggtcctggcatcttgtccatgacaaatgctggacccaacacaaacgattcccagtttttcatctgcactgccaagactgagtggttggatggcaagcatgtggtcttcggcaaggtgaaagaaggcatgaagattgtggaggccatggagtactctgggtccaggaatggcaagaccagcaagaagataatcattgctgactgcagacaacttcgataagtttgacttccattttatcttaaccaccagactattccttccgtagctcaggagagcacccttccaccccatttgctcgcagtatcctagaatctttgtgctcttgctgcagttccctttggattccatgttttccttgttcccttccatgcctagctgtgttgaagagttaagtttatgatta

SEQ ID NO: 477577 - DNA, 912 bp, Homo sapiens
tgtttcccatgtgtccggtgagggcttcccgcttgtcaggaatttggctaagaggcttaaacaatgaggttgcggagttgaaaccttttggtcaagaggccttggtgggctggactggttgttttaagacgtgtgcaaacgagttagaaggcagaagaggacagtgtgggggaaggagaactgccttcacaggctggggaagcataaagagaaaacatgccagcatgctgtatgattttcaaagcaccatggaaatgcgggtgttcaaagattttagattagaagctatttgtggaaaagctgtatggagcaggagtcagaggtgtgcatcccattttggagagtgctgtgttctgctagatctgcctgagattggctgtggcagtgaagtaggagactggctggacttcttttctggtcataaccctgctgaccaaaacaggatctgctttggacaggataaagtgaagaaactggcagaaaccagcagatgatgaggagggcaatccctggccaccaccgttgctcattagtatgcgacaggatcatcacagtttacaaatgccatggcaacaacttagtagttaccacccctttccatggcagtgactcagaagttactgccctttcctagaaagttctaaataacccacccctcaatttgcgtataactgaaagtaggaataaatttaaatttcaggaagggaagccagttacacagagcatgagatggcacagaatactgccacagaactagatgcacaggctcctaggatgcctaggatgagaaaagatggcctttgccactctcttgggagtcgttatgcaacaccttgccacccctccagttgcaacaccttccccacccctccatgactgttttggacactctggcaactaactggggaaaaa

SEQ ID NO: 477578 - DNA, 3184 bp, Homo sapiens
tatttactaagctctattgatggtgtcttttcagaagaaggaagaggatgtggggagtcatgcgcgagcttccaccaggaaatgataaacatcacttccgctactgtttcatggttcaaagtaagtcctacctaacttcaaagagcaaggagggccggcatgccccccagagcatccctggaggatggtcagacagcgatggggagctcactacctctccagacagttcaattgttaggttgcacaccgagctgaccgcctcctcataccctgtagcagttagtgtcaacactgtgccctctgccccaggcacctcctgcaggttaaaggagatcctaagcatgctaaactcaagctgtgtgtatgtggcgttagtagcccccatgggcttttgggctctggctcagggcttctccatgctgaccacctctgtgggccaccccttgcccaagggcttctctggtctcagccgtctgggcacctgccaactcctttgactcaaggaccttatttagaaaactctcttcatgtattttaaagttgattccctggttttttacttctcttggcaattctcatttttctagaaaagtgtgctgttatggactgaattgcatccctctcaaattcatatgttgaagcctgtgacccccaaatatctgagacaggtctcactgtttacaagaaaccaagtctttgatttatcagttctatggatttttatgttttctatttcattagtttttatctgtatttctgcttctctccctgggtttatcgtgttgcttattttctagctccttaagttggatgcttcatttgccttcagtcttccttgttgaataacagaaacatttgcagctatggggcgtacttcggtttcattccctaagtatggctacgtggagttccaattgtcatgacgttctgaatggcccataactgcagttttgttcctttctttgattcaagttatttaggcataaatttccaagtgatttcatttttttgttgttgttgtctatccttttgtttttaatttctgtttttattgcacggtggatagataatgtggcctgagaaaacgatggcttgttagtgcctgtgaggtgttcttggtggcctaaaatgtcatcagttttggtcacttccttacagatgtttgaattaaatgtcttccctgtttatacctatttattaaatgatgcttgtttttccacgctggcattgcttggaatgtgagtcctacaagctgctctggggattgtcacactgtaccttctcctggggaatctcagtggacatcagcacagatccaagaaggcctaaggaaaagccaaccatgaacctttgcttcactcagtgtctcccaggtgcagccttttctctttagcacctgttgctacctctaccagctagtttcctgtggaactagttgagaaaactctgttttaaggttttctcgtatttcttggggagtaactatttgttaagggtcatcagtactcatttctcagaactaccccacccaaggggtgggggagctggggcatttacaccccaaccctcaagagagtcatttgttaaaagctatttctggggttgtgagataggaggtgagacttgactccagaggtggggctcaaacactggtctagattgaggactagctaaaacagggctggggtgaaggcagctttcaatctgacacagccaccagtgtgttaagtcagtttactgttgccatggcaacacccagggttaccaccccttttcaaagcaatgacctcaaagttaccaccctttccttagaaatttctgcataaactgcccctttatctgcatgcaattaaaactatgtgtaaatacgattgcaaaagtgccctgagcagctactctctgccaatggggtagccctgctgtgcaggaacagtcacagagctataacaccgtcttttcaataaagctgttttcttttacctctggcccttgaattctttcctgggcaaagccaagaacccttgtggactgagctccactttggggcttgcctgccctgcatcataaggtctttggcagttccatcctgtcaggcatgggcagttctgggagcaagagcctcatttctagttgcagaggctggaagtggaagctggccagagcacactgaaaagtcacagggatacaggtggggtgcaggccacttgtgccatgggtccctccaacttagagattcatgtcttcttacttggtgacttacggggtagtcagtcccacaaatgcttaaacagccagcattttaaaaaaagcatccatttgtagcatctgccaatttccatgttgtcaatattcccaccatggccaatttcaagctaccagtggtttaacagcagtcaacaggcgaggaaaacagaacttgtctcaaaaaataaaaataaataaaaataaaaaagcagagattagagaaatctgcccagagaggtggtttatagaagcccacccacacaaagccatggtctaagcacagctggactgtacaggaacccaagcacacagcaaccaccattctcaagcacaacaggaggatcccctctgaaagaccagggcaggagaacacatcccagacagaggacaggaccccctgccagcccttgccagcccctcccggcccctctcccctggtgagggccacactgctgcagagggtaaggagaattggattcaaaacctaatagactggtggctttgaacaaaccagtgcccctccagtgcaggcttctcatctgtaaactgaagactgactagaagatcgtattaaacactgccgtgctcagggcaatcttttcctagactacgcatttagcaaaagtgaagctgattgaattgagaagtaaattctagccctattgtttcagctatcctggtctttcagccttgtggaaatgtgatttcattcatagaaatcgcaaaacaggcacaagtcatctgtgatattagaggtcaggatattggttatgggggtttgccatttttgttgtaaaatagaacagatagaaataatgcagcagggaggtgaattttgaaatattgtatatttcaaaatagccaaaagaggattttaagtgttcataccacaaagaaatggttaatatatgaggtgatggatatgccagtttaataccct

SEQ ID NO: 477579 - DNA, 675 bp, Homo sapiens
acagtggcgtttattcagataaatatgagagccgtgtgggactggctgtatgatgacggggatatcctcccactgaatatgcctattacccaggtcatgaaggcttctcaacttgtcatccgtcatgggtcttacagatgccactccctgctgggaaccagaaaaggatctcctgagggctgtgtcatgggccatggttactcatatttggctcagaataaatctcttcaaatatttacagagtttaactctttccatggacatgggggagcacctgttggagacacagcatctcatcccccagacctgctgaatcagaatctgcatttcaagaagatccccaggcagttcgcaggcatgtgcacatttatgttgacaaaaagagtccaactctgtcaaatatttgaagagatctattctgagtcaaatatgagtgaccaatggcctgtgacacggccccaagagaccctgagaacatgtgcccaaggtgatcaggctatagcttggctttatacagcttagggagacataagacatcaatcaatacaagtaagatgtacattggtttggtccaggaaaatgggacaactggaagcatggggtgggggcgcttccaggtcataggtggattcaaatattttctgattggtaattggttgggagtttatttaaaga

SEQ ID NO: 477580 - DNA, 737 bp, Homo sapiens
gacccggaatttcaacatgtggtctctgggcaagatggaagagcagaaaaatacagaaagaaaaatttacaaaatacagaaagagccccctctgctggagaagaaatctccacccactccacctccagccccgactcctcagcctctcccacccgctccgccgccacagccagccctgccctcaccacccccgctggtggcccccacgtccagctcaccaccgccaccaccgctgccacctccaccagctatgccttcgcctccactgccacccccgccagccgctgccccaccggctgcccctccaggggagcccgccccccatcccccgaggacgctgagctgccggacacctggcctctgcacctggccaagaagcaggagacggcggccgtgtgtggagagacggactagaaggctgacgagagacgagttcgtcatccgcgcagaggacatcctttccctcaaggtttgcattctgaaagagtggcccaggcagggtgatgtctaacccagggatggcaaaggtgtccacatgccatcatttcttccaccagcacccatatcacatgattgctgctcctttccattagcccatgtgtggccacagagccctcagcacagggctccaggcagctgctacagctgcccattgattggggttgatagatagatttgctacccctgatttaactcaagaaataaaatgctaatggtgaaaagtcagacctggcagt

SEQ ID NO: 477581 - DNA, 486 bp, Homo sapiens
ggctgcctctactctattattgtacaccttgaagggtctaggctgtaaagcatctcagggttgctgccaaatgagccatgaactgggctggatttttatatttgatgaaaaagagcctaaacgctatctgatgtgggataaagaaaaaggagcattaaccttgactatggctttagctccagccacctttttaagagtaaattgctgggcaggagatcatgtatggttcttccaagattgccaagtttatgagctaggaaccctccatgcaggctctgaacctggtggagctcttccttgcagtcaggctcctcttctgcagggctgctgcagtttgcttgtggtccactccagttcctatttgcctgggtccctcccatccctggagttatcaccagtggaggctgcagaccagcaaagatgccaagctgctccttcctctgagagctctgtcttagaggggcactggcctgacgccagctgaaa

SEQ ID NO: 477582 - DNA, 3045 bp, Homo sapiens
tatctggagaaaagtcgacctcatggaagtaaaaagtagaacagcagttactacagacactcaatgcagacaccttcagagtattgggaaaagacttgccttctgccagaacttaacccaaatacacacagagagcaccatgaagccctggattcttctactcgtcatgttcatctctggagttgtgatgcttctgcctgtgctgggaagcttctggaacaaagatccctttctagatatgataagagaaactgagcagtgctgggtacagcctccatataagtactgtgagaaaaggtgtactaaaataatgacttgtgtacgtccaaatcatacatgctgctggacctactgtggaaacatctgcttagacaacgaagagccccttaaatcaatgctaaacccctagattctattggccgatcactactgtgggctgaaggatgaccatctggtctaagaagagtgctgcctacttccttcttgggacacccactggctctagctggtaacctttctgctatttccttgacctctttaccctgaagcttttgtcaaataaactgctacatcaacctgagggctctgcatatttttttttaacttcctccctatgacttaatttctctcattgcaatcctcagcagtcccaacagttgtttccactcaatcatgggcagaggtgcccagttctgccttcccagttagacccatgtatgaaccagtttggttaattgctggagcaaatattcaagcagatttttacaaacctcatggggtaatacagttaacccatgaaaggttattctcattcacaatgcatttcactgagggtggtcagtgggcagtcatccctgccatgattcaaggaatgtagctccttaaatctgtagctctgtcatctcgcaggggcttctctactggttcctctacattcaaccagcaatagggaaagaaaggtatcatgggggctcacacagaagcttttaaagggctaggcctagaagcaaagtttattattttaatccacattccattgaccataatacagtcatatggtcccacatatttgcaaaggagattgggaaatgtaatctagctgttttctcaagaagaacagaaaatgggatttggcaagtacttggcaatctgtgacctgtctactcatgcaaagccagactcctcaacacagacccaagaccctggcctccatatcaccctgtccaatgaaatacatttaatcaaattgttaaaagcctaggttaaggaaggaattctgaaagcagcaagagaaaagcaactcatcacatataagggaacccccatacaattatcagtggatttctcagcagataacttgcaggccaggagggagtaagacaacataatcaaagtagtgtgagaaaaaacttgccaactaagattactatacctagcaaaattatcctttaaaaataaagtactgataaaacatttcctagacaaaaactgggggagtttgtcaccactagcctgccttataagaaatctttagagggttcttgaaattgaaatgaaaggttgggcacagtggctcacacctacagtcccagcactttgggaggctgaggtgggaggattacttgaggttaggagtttgagaccagcctggccaacatggtgaaacctcatctctactaaaaaaaacacaaaagttagctgggtatgatggtgggtgcctgtaatctcagctactctggaggctgaggcaaaagaatcacttgaacccaggaaacagagtttgcagtgagctgagatcgcaccactgcagtccagcctgggcgacagagcaagactttgtctcagaaaacaaacaaacaaacaaaaacaaattaaatgaaaaagcactgaatagcaatgcaaaagcataaggaagcataaaccttattgagaaaggtaaatatataaatacagaataatgtaaaactgtgaaggtgatgcatgaattactttgaaccttaatatgaaagtaaaagataaaaatttgttaataaacacacaatataaaaagaagcaaaccctgactacaggtactcaaagtgggtggttatgggagaagtcaaagtaaagttttcgtttgcagttgaagttaccaacttaaaataggtggttataactacaagatattttacacaagctgggagctaaccacaaaggaaatatcctacaatagatataaaagataaagagaaatgagtcaaagcaaatcactacaggaaatcatcaaataacaatggaagacagaaagagagggaaaagaataaaacaaccacaacacaggcagaataagttctcacctttcagtaattaacttgaatgtaaatgcattaaattctccaaccaaaaacagagtggctgaacaattatctaaaaaagatccatcaatatgctgtctaaaatagactcacttcaaattggctagaagtaaagggacggaaaaatatatttcatgtaaatgataatcaaatgaaagtaagggtggatatacttatatcagacaaaatagactttaataaaaaactatccctagagacaaaggaagtcattatataatgataaaagggtcaattcaacaggaataaacaattgttaagacatgtgcactcaacatcagcttaaatataaatatataaatatataaagcagatattgacagatttcaaaggagaaattgatagcaatcctgtaataggccacttcaatgctcactttcaatgatgaataggatttccagacaggtaatcaataaagaaagagctaactggagcaacactgtttaccagatggacctaacagacatatacagaacattctacccaacaacagcagaatacatattcttctcaagagcaaacagatctttctccaagattgattacgtgttagattagaaaacaaattttgacaaatttaagaagatttaaattatgtcaagtgtcttttcagaccacagtagaatgaaactagaaaccaacagcagaaacaaaactagaaaacttttaaaga

SEQ ID NO: 477583 - DNA, 909 bp, Homo sapiens
ataaggagtggatgcctgtcaccaagttgggccgcttggtcaaggacatgaagatcaagtccctggaggagatatatctcttctccctgcccattaaggaatcagagatcattgactttttcctggggacgtctctcaaggatgaggttttgaagattatgccagtgcagaagcagacccgtgccggccagcgcaccaggttcaaggtgtttgttgctatcggggactacaatggccacgtcggtctgggtgttaagtgctccaaggaggtggccaccgccatccgtggggccatcatcctggccaagctctccattgtccccgtgtgcagaggctactggggcaacaagatcggcaagccccacaccgtcccttgcaaggtgacaggccgctgcagctctgtgctggtgcgcctcatccctgcacccaggggcactggcattgtctccgcacctgtgcctaagaagctgctcatgatggctggtatcgatgactgctacacctcagcccggggctgcactgccaccctgggcaacttcgccaaggccacctttgatgccatttctaagacctacagctacctgccccccgacctctggaaggagactgtatttaccaagtctctctatgaggaattcactgaccacctcatcaagacccacaccagagtctccgcgcagcggactcaggctccagctgatccaacgatgatgcaacatatacaaatccataaatgtgataacaccacattaatataacaaaggacaaaaaccatatgatcatctcctcagatgcagaaaaaacatttgacaaaattcaacacgctgtcatgataagaactttcaacaaattaggaataaggcaaggatgcccactctttcttgtcacttctattcaacatagtactga

SEQ ID NO: 477584 - DNA, 1267 bp, Homo sapiens
tgctgtggtcctggagttggggaaatggaggaagctcctgagggggctcctcctgggatgagcagtatggttaccgtgggtgctccaggagaagcccagcaaggtcggtgagcagcttgggcccagccagctacagccagtgggcagggggtgagggcgcctctctcttcctatgctcgccctcccttcctgtccctggggctccctgctgactggcacatccctctgggccttggtgcccagctagttctctgcctcccgctcactccagtgctccttcccatcctctgcagcatctgcccgcaccctccttcctgctttctccaatgctttctaactacctcctttcccatctccagctattccgactcaccttgttctcttttgaacaagtgttattattctgcctaattataaaagtcatgctcatgcaccacacccctcatccaagcaataaacaggaccagggaaaacctagggacattctggaaaattgtgttcggattgaagtgggatgcgagtggggagagcaggtccaggaggtagctgcagaaggagcagccaggatacccgggtctttggcaggaaaaagtttgaagtcaaatgggtcccgaggtggaatattttccaaatgtgaggaccatgggcctctgtggggacacggagtgggctttgaggggtcctgtgcgtgtgatgtgtgcatgcatgtgtgcacatgtggcaatgtctctgtgcctgtacacttcctcttcggtgtgcacaaaggctcagacaccctgggagggagttcactaagcacagctggagatctgtgtgtggctgttgtatgtgtgttcttcatctccatctccatcatgttctccacctgcagggatatgctctgtgtgtatcgctgtgaacatgtctgcattgtgcccacaggtgcgaacatgtctgtgggtacaacctgtgcatgcatcatgtgctggcatgctcatgcacacgctggaacgtgagccgtctcgcctcagagtgagggctgacagggttgcattttccaaaagctcagcgaccagtgacagagctggcctgggagtgcttgctggcaggaggtgagtggagctgctgatttgtgacctgggggtgggctgtgatgacggctggctgatggatgcaggcgcttagacaccctgtatgacagcagccagctctctgagctgcctgaatcaggaggtgggagtttagttcttgacctgtgctgctcaatgctggcttcccacctccctgg

SEQ ID NO: 477585 - DNA, 2152 bp, Homo sapiens
gaagtggggaagcaggggtgaattccagcgagccttctgcttgcccagccacgtgtcctagaccaggaagtatcaaaggggggcctgtttcttatttatacaaaggggaagggaggggctggaatctaaatggaggcagctgttcctaaggccatagggcgggggcagcggggacccgccattaactagctaaagacctggggctgggggtcagtttggctggctgagcccaggtgtttttattccagctcagggagccagagagggccttttggggcaaacctctgtcactccccttcctggtgcataaactactcacccctccctggagctcctcaagcccctgcctcagcccaagcccacttggacctggacctgtcactggattcgttcacacgggccaagctttcccactggcccatgtctgaggccatcatctctgtggccagtgcacaggggaggacgctgcaccagtttaggaactgcactaaccacaaggagagtaagaagcaggagtgaaatggccaaaggctggattcaggaagtgtgcagataaaagcaggagggaagggagccaaagcggggaggaggaagaggactgagagggggtgtggagagtggaattggagaggaggggagctggcagatgggaggactgacctggggccaaggactcgcctcccgctccgtgttcttacctccctgggagagcctgcagaatcctcctcccctccctgggcctcaactcccagacaaacagagatggagataacggcaggcaaactggtgggttttttttttcttttgatggagagaccaggaacccagttctgaacttaagtttgaggtgtctagcggaacaccaagggagatgatgagagggaagggggtgcagggagaagactgggggagtcctgggcacagggatggcccagtcgagagatcagggagccagtgtggctgcagccagcagcgcggagaccccgccagtgcagtgcccgcctctgtgtctgtccctcctggttctctcccttattggcctggctcgcctgcctgtctcattgactgttctcacatctgcttccttggctctttggctccgtgcctgtttctctccacccgtgcgcctctctccgcgcctccctcccccacgcagccccttccttcggccctgcccgccccagccctcctcccctctgcccgcagtctgtccgcgggggtgatggcgggatagcaggcagcaggcgtcggccccgggcgggggtctcaccggacgggccggttggcggcgtcggggtcccgcgccgtcaccacgccgaccagggagcccacctgcgcgtcctcctgcacctccaggaggccggagggcggccggaactcggggggctcgtccacgtcggtcacggccacgcgcacgatcgcctggtcgcggaacgtgcccaggtcggcgaagcgggggtccacgaacttgttgagggcctccaggatcacggtgtgcacgggctgggattcgaagtccaggcgctgcgggagggagcagagggccgcatctattttctcagttataaaaatgaggatagtaacctcagcttcagagggaaatatgaggattaaaggcaatgaggagtgtgaagaggctggcaaggatgtgaagcacacgcagctgcaccttctgcactacgatgatggcctcctgagtgtcgctgtctgtggtgaccttgaacacatcgccgccgctgctgctctcgtccttaaggtgtcctcagccttcacacgtcccacagccgttccaatgggggctgactcctggatgctgaactggtacatctctgtgggggacacggccatgagcagggatgaaggcagccccttccccagcctctgccagcagtgggggaggggacaagggggcccagtctcactgaatgttacctcctccagggaaccttcccagacctccaggctctgctcctgtgctcccttggcccccaagcttatcccattgttagaattactgcgtttttactctcattttctgtttattctctctcttgggtatgagctgctggaagaaagggaccacatctcttattcatcaggcattcccagtgcctggcagaatgccaggctgtcgcataaatgaaatgtgtga

SEQ ID NO: 477586 - DNA, 575 bp, Homo sapiens
acagctgggaaccaccccaaggggacttgaatccagatctgactccatggtcacacttgcgccaccagaaaggcctcaaaacaggaagagggttggggctcagagtggggatggggaccgtgaggggctgtattcgatggcctcccgcaggtctcccgagggtctcctctcccagcttccctggggcacgtcggtgatgcaggtgatggcctcggatgcggatgaccccacgtacggcagcagcgctcggctggtgtacagcgtgctggacggcgagcaccacttcaccgtggaccccaagaccggtgaggggcagggcggggccagaggcggagccgtggggcggggccaggggcggggcgggacgaggaccaccccagacgtctgctctgagccttctgtcccagaagctctgaggacagcacagggggcaccttgtgcacagcaggagagtccagggtcgcggagagggaggggcagccaggcaggaagatggacggactgaggaacagaaaaggaatggggtggggggttcttccaaaactggaagagaaaccgaaaggcaggaagcagcc

SEQ ID NO: 477587 - DNA, 931 bp, Homo sapiens
ggaagcttagagaggagcagggacctgcccaaagcctcatcggaatggattttcctctgcttgaagctgcctgggagatttgggcattggaagataaggacttaggtgtttctgattgcaagaaaacagacgtcttgctgccccctgggcctctctgtgatccagcaactgaagggttcctgcctggcccagcagggatcctgctgcagtaccactgcctgggcagtgcccccaccatccactccgactcagacgagggtgacggggccatcaagtacaccatctcaggcgagggtgctgggaccatcttcctgatcgacgagctgacaggcgacattcatgccatggagcgcctggaccgcgagcagaaaaccttctacacgctgcgggcccaggctcgggatcgcgccaccaaccgcctactggagcccgagtcggagttcatcatcaaggtgcaggacatcaatgacagtgagccccgcttcctgcacggcccctatattggcagcgtggccgagctctcacctacaggtgggctgtgggccctgggggtgggggatgggatcaaggtgatccccaagtggagcctgctgggaaggggagtagctgatcctctggggagggacagaaaagacagagcctgctgacctagggtacagggtacagatgtgagctcaggtgccccctggggtcaagcatagtcctggacaaaaccacacacatgacttcagccacatccatggacacagccccccatgaacgtggacccgcatgtggacacagtgatgccctcggacatgctcatacagccacacccagtcacgtatggagacacagctgcagatctggacatgccacatgcacaagcccagccccgcatacaactcaccactacactggtacacaacctcattcatagatccagtcccct

SEQ ID NO: 477588 - DNA, 785 bp, Homo sapiens
ttgtgaagatgcgaaatgaagaggagaagggctttcaagaagaggttctcagcttggcaaaatccatccagcctcagggcctctacccaggctgttccctccacctggctgccctcgccctcgccacccccacactccagtctgagaacaaatcactttctcagggaccccttcccaagagccccagactagtccgagctccctgtcagatgctctccttgtacctttcttttatagtcatcatcgcatgttttaatgaagtcaggtctggattccctgccgctgactcactgaatgactatggggaagtctctgtgactgcaggcctcagttttctcatctgtaaaatgagggtcatttcttgtaactacggtaatgacagcaatatccagcttccatggagggcaggcatcgcatagtgattccaccccctcttcatcctcaccatagccccgggggcagttcctatcattactgcagtgtacggatgggaaagtggaagaccagagatgttagggaacgtgtcccaggtcacgcagctggaatcggaatctgagtctgtgtaattctggagctcatgtcctgtccactctactcagactccagacctccccctgctcccagaatgcattcccagtgcacttggaggctgaagacataggttccaaccccaactcgagcttgcaccacttgtgtgaccagaggtacatccaggcatctcctctgtaaaatggagacagttatgcttcttgccataactggatgtggggggcaccccatgccgt

SEQ ID NO: 477589 - DNA, 1359 bp, Homo sapiens
tttggaaaatttagcaagaaatcaaactttacccaacatcaaagaatgtacacaggagaaaaacctgatgagtgtaaagaaaatgagaaagccttgaagaagttataccatactcaaaatgagagaactcatgcaggagagaaagtctatgattgtaagaaatgtgggaaattctttcatgaaaaagcatgccttactcaacatcagagaacccacacaacaggaaaacccagcaagtgtaatgatagtgaaagagtcttgaaggaatcttgcctcactcccaatcagagaattaaaacaagattaaaacaagagagaaaaactgtaaaggaagtcacaacttacacaaagccagagagctcacaaaaaaagagaaaacctatgactgcaataaatgtggagaaagcttctgtaagaaaacagatctcagatagcatcagagcacacacacacggaagaaaaccctatgaatgtaatgaatgtgaaaaatccttctttgtgaagtccaactacgctgaacatcagagaactcacacaggagaaaaaccatatgaatgtaatgaacgtggaaagtccttctgccagaaatcagccctcacagtacatcggagaactcacatgggagagaaactatataaatgcaatgaatgtgagaaaaccttctgtaactcaggagaaaaatcctacagatgtcctgagtgtgggaaaaccttctatgaaaagtcagccctcacaaaacatgagcgaattcacacaggggaaaaaccctatgaatgtaatgaatgtagaaaaaccttcagccagaggtcagccctcaccaaacatcaaaggaaaacacacaagaagaaaactattatcaacaccctccatgtgcagaaacctgcatcttcaaggcaaatttgtcaaacatcagcaaaatcatagggcagaaacactaaggtattaatacatgtaggaaagtatttgtttgtaggttataacgaataggaattagaaaattaacataggagtgaaaccacatgaatgctttgaacatgtgaaagctttcagcaagtattcagagctgtggaggaaaaattaattttaaggtatatgaatgcaaaatgttcttgtgcataaaatgtttaggtagaagtcatctttcagatgtaatagcagagtaattaaagaaaagattagaaaatgacttgttcttaatagaatgtgaaacatgatccttttgtaaaactatgaattatttaagtcattgacacgatagcgttgaatatgtgtgaagatttcctgaagtatattgggctatatatagttacataggatacgagtgtgctgtataacataaattatgtgtatgttggattt

SEQ ID NO: 477590 - DNA, 976 bp, Homo sapiens
ctgcaggtcctacctccaatggatgctgcccagagaccacagcatataaaaatcttgtcctgaggcccatgagaaggaaacggagctctcatttgctgtgcagtgcagcaaggatacgatgtgtgggatctgcatggaggtggtctgtgagaaagccagccccagtgagcgtggctttgggatcctctccagctgcagccacgcctactgtctcaagtatattcacaagtggaagggcactaagctatttgagagcaagatcatagtgtcctacccagaatgccggatcacatctaactttgtcattcccagtgagtaccaggcgggagaaagaagagaagcagaaactcatccagaaagtcaaggaggcaatgagcagccaggcctcattgaggaaagagagaacaatgacccctttgacaacaatgaagaagaggttgtcacctttgagctgggtgagatgttgcttatgcttttggcagatggggacgatgaactgacagactttgaaaatgagtgggacttgttccatgatgatctggaagatttttatgacttggctcagtagccaccttgcgtggcatgtgaactggcctgctgacctcagacagcagcagtcccctgtggtggtgtgacagtgcccatgtttctctcctaggcaggcctatcaactccaggtgctgtcttaataatttttacctagggcctgtcttctcaatctgtgacctttccccaaggagtgtgttattttctctgtggaaaaaagtttcaaaaataaatcctgaagttagtgttttgtaacatgaatttaacagtcagacagttcgtgtagtatgtgttaattttagtgtaaaagtcatcatccaacttgagtcaatacaaagtctgtggtactttatatcttttggctacctgtgctagatttgtgatcaaggaattgttaccaaaagggtagattaataaaggagacttgtgc

SEQ ID NO: 477591 - DNA, 913 bp, Homo sapiens
gggggtggggcagcagatcaccttttccaaggatgctccaaagatgcacctcacatgctcttttgcaatgtgatcttgaccttgccactgctagtcaagaggctcatcccaagacagttgctgcagctccaaaggcaagtccctgtgctcaaccatgctcaagacaggatgaaggggcaagaggtcgatgctagaaagagcaccttccacgtctacctcattgtcagtgccataggctcagaggagcctgccggagctggggacaaacaggagccctgccccctccaagttggggcaggagctccccaggcacagctgcagccacccaacttgccgctgcagacccaggccttctgctccatgggcagggatatccatgccgtcctgggggtagctgcagccatccaaactatgactgaagactcaggcatccatgcattcttgggggcctgccacttagatctcagagcaaagtctgcctggtaccatgaagacagcaggaagcagatggattcctgggaggaggaggacaggtccctggtaatgcttcaccttcaggccaggcagggcctggagtctgggggccaggctgccagtcctgtggaccagagtggggacttgtggtgccttttctggccctggcatggacactaatggaccaatgcacaggcacttccatccttctgaggtttataaaagccctgggctcagccagagcagggagaggactgagaggaagggatgaccactgcagagaggagctacccactccagagcctcttctctgctgagagctgcagacgtgggaacaaactgcctacagagagtagctatacactgtaggtctcctctgagctgttctaacactcaataaagctcctcttcatcttgctcaccctccacttgtctgcat

SEQ ID NO: 477592 - DNA, 1687 bp, Homo sapiens
tagcaagtccaaaatctgatggggagaccaggaggctggagagccaagaaagtgctgcagttggaacctgaaggctatctgctgcagagcgtcctcttgctcaggaaggccagctgtggccagctgctgacccagctcctcctgtgtgcctccctggctgctgctgctgcaggtctggtttatcactggctggcatccttgctgctttatcctcctggaccttcagccatggttgccactgtctgtggcctcctggtcttcctgagcctgggcctggtacccccagtccgctgcctgtttgcactcagcgtgcccaccctgggtatggagcagggccgccggctgctcctgtcctacagcactgccaccctggccattgctgtggtgcccaacgtcctggccaacgtgggtgcggccgggcaggtgctgaggtgtgtcaccgagggctccctggagagtctcctcaataccactcaccagctgcatgcagcatccagggctctgggccccacaggccaggcaggcagccggggcctgacatttgaggcccaggacaatggctctgccttctaccttcacatgctcagggtcactcagcaggtcctggaggatttctctggcctggagtccctggcccgggcagcagcgctagggacccagcgagtggtcacagggctgtttatgttgggcctcctggtggagtcggcatggtacctccattgctacctgacagacctgcggtttgacaatatctacgccactcaacagctgacccagcggttggcacaggcccaggctacacacctcctggcccctccacccacctggctgctccaggcggctcagctgaggctgtcacaggaggagctgttgagttgtcttctaaggctggggctgcttgccctgctcctcgtggccacggctgtggcggtggccacagaccatgtagccttcctcctggcacaggctactgtggactgggctcagaagttgccaactgtgcccatcacgctcacggtcaagtatgatgtggcatacactgtcctgggcttcatccctttcctcttcaaccagctggctccggagagccccttcctctccgtccacagctcctaccaatgggagctccgcctcacctccgcccgctgcccactgctacccgcccggcgtccccgcgcagctgccccgctggccgcgggggccctgcagctcctggcgggctccacggtgctcctggaggcctacgcccgccgcctgcggcatgccatcgccgcttccttcttcacagcccaggaggcgaggagggtccgccacctgcacgcccggctccagcgaagacacgacaggcaccaaggccagcagctgcccctaggggatccttcttgcgtccccacacccagacctgcctgcaagcctccggcatggatagactacaggctggatgccttaagaaccgagagcagtgagggagaagggaaagagctttggagttgcagagacctgagttgtaaccttggtcctgtgccgcctccctgtgtgaccttggaagaaacggcaggccccagaaatgtattctgccaacagccttctaagtgagtttggaagtggatccttccccagttgggtcttcacttaggactcgagacctacctggctgacgccttgattgtaaccagccagagaccct

SEQ ID NO: 477593 - DNA, 1253 bp, Homo sapiens
gctgtgcatacaattgaaggtagaacccacaggtttttcagaccaattgaagttcttcactctagaaagtagttcgggcttcttttgatctctgagagaccctgcttaatctcacgatagccctgcaggtgggtttgattgtttctgctgcacagatgagaacacaggtccgggtgcagcaggggctccccgggccagtcctccggctcagccagctctctcctctaaggacttgcaaagaggcacttggtttcaaggttctctttgctggtagcatgaaggcagacatgagttcagaccttacatcccattctctcagcaatccagagatgggtggggtccctgaggagcagatccgtaagagctatcagcttagaggcgaatggaagtggatggcgtccaagcaacagatgcccgcttctgtgactccaccccttacggaaagtctatgggactctctgaaatgtatgagtgatactgttagaaagcggcaagaaaatgaaaagaaaacgtggatgttttccatatttgagttgatgcaggctggagacaacagctgccagagctgcaaggcagaacaccctgagaagtggaaccggaggatccaggcgcctgttgaagggataaatgagagccgtggcgtgtggatgggactctttctgtcttccgtttggctgaagctccaaacgccaggagtaacccagtggcacctccaacgttatgctggagaaaaagccgttccaactcttcaccgaacgccgagtcagagagatgtggggaaaccaccgaaagagcttgccctgtgtcttctggacagactagtgccaaacccatgcctggaaatggagcccaagggggctggggaggagaagaaatgagagtggaggaggaaagaggtttaatatgaatgaagtttggagttttgacatgactcgacattctaatgacttcatttagactgttgctacactcagaagtgacttggagacattttatttttataatcatcaccatattgttattggtcatgatctaaggtgggtatacgaatctgttggtcctataacaatagtatccagacaataatcactgtttggcattaggtctagctttggcttttgaaaagtcaaaaagagaaatactcactttatagttacttctggcgcgcctaacactatgtgacatcagagattctatagtcatgtgggcttctatcaatctaatcaaaaaacaaacaaagcatgttattcacc

SEQ ID NO: 477594 - DNA, 1581 bp, Homo sapiens
gactcctcttcctcattgacgttacctgcccagccctggtaaacatggagtttatgacagcctctcaagccttccagatgtggcctcaccagcctttatggggctgcttgtgagagaaaccagaactaggagtgggttctcgggcgggggcacagctcagagggcagtcagtaccgaggaaatggagatgcggagatggccatgagcttggcggctgcactgagctggggcagcaaggttctaacaggattctctagctgctgtacagagaagaggctccccaggcaaggacagaaccaggagaccaatgagaaggtgaccgcagtagttcagcttggttttgaagattgtggtcctccccggcactttctggagtttagatatgggacgctgtcagcagccatccctgctggcacaatagcccacgcgctcacctcctcccccatttatgagcgaaaactcgctttccaccagacacgacgttcagctctctcatgccttagccagtcttgccggtgtaagcagcaagaggctgaaggtcaggaaacccgcatcctggatctgtccccacctcacattgtggcccagggaaagtcacagttcctcatggggcctgggtgttctgacctgccaaatgagtgtgatggcactgggacctggaacctggcttggctaaagaagtttggccaagtcagcatcccatctgcaatcagcatcaatggcttcccatctccaatcagcatcaatcctaaggtctttgccatgacttctagggctccaaataaaccaaagcgcttttgtccattgaccctactgagccatcctcgttccatccaccccaccccagttaccagtcagacaacatttcctaacacaagaactgtggaaggagctgcggtggggatcgggtattaggagggagggggcttggagagatgcgtcagaggccagaaaggaagacacaagttgggggttcgaaagacaagctcagaaatgtctctactgataactttcttgaagattactcttcaaaattacggccttacgatttaacacctgagctgaccccagctctctctgagacctcatttcctaccacacctcccagcaccctctttgctgcaaccccactggcctgctcgctcttcctccaaccaggcaagaacagtcctgcccccgggtctctgcagttgctggttccatcacctggagagccctttccttaaatatctccgcggctggctcactctgttcagatgtccctcctcagagatgctctccctgatggccaggtctagaatatctgctgcctcccctctgcctcgcgcttctgtgtcttttctcttgtctcgttttccttcacggcacttctcactacctgctactagacgacgtatttcatcgtctgttgatttgcttttcctgtctccctcgctaggctccaggagccaccgggggcttgttcacgcttgctgctgtggctccagcagtaagaacggggcctggcacctagtaggtgctcagtcaatagttactaagtgatgctatagtgatacattctcagcgtaaaaatatttaaac

SEQ ID NO: 477595 - DNA, 1552 bp, Homo sapiens
atctgacagggactgcctacattgaaagtgtgtgcacgtaggtagacacatgtgtgtgaacatgtgagtgaaaaaatgagcacgtgcgaatgtgcacgtgtgtgtttgcgactgtgcgtgtgtgtgtgcatgtgtgcgtgagtacatgtcagagagaactccataagctgaccaggcaatcagtgtccctggccctagtgactggttcaggggagtcctatggcttcagccaagccaatcaagccaattcaggggaaaccatggcttttgctttccacacgagcaaagagcttcccatggctacctgcttctcgtccttcagctctgggtcagacgtcaccacctcagagaaggccttgttgaccaccttgtctaagatgcactttgcccctcagacatctaaattttcactctactcatttcctccatggcatcagcattatctgatcattttcttgtcagttgcatctggcgtgcttgttgatgatctgtccaccccaaccggaggaaaaagactctacatcagacaggccacggctgcatctgaactctaccactcgggcactgcacagcctttagccctgcgtggacaggtggttaaggcggcttctcttggtgctcatggcccttgccatccctttttctgcagcgtgggtgcaacctgcaacctgcttctaggcgtgggcactgaccagagatggtcaatgtcctgcaatgcatggactgtcagcacactgacaaattgtttcatccaaacggccaatgacagccccattgagaaacctattggtggttatagttagatgatgtaagctgtaaatcctcgtaattgggcacatagaaaaatatggcgagtgacacatgctgggtcacatattcacccctagtctaatcactgtccaagaaagactgagtggctcagattggctgggattgactgactcacctcaagggtctagattcagtacctgggaacaaaaatcaggattatatgagcaaagaagagggaatggctgttgggtagtcaacttgaccaacagtgtctgacattgagaattatttcctttttctcttcttatggtttctaccaacaaaacaaatcagatgaataaaaaaattccttgctcttccaattacttcccaccccaaaatccacctttgctgatctgactccacttcttcagcttgctggagaaaagaggaaaagtctttccactgtcccccatcagattgcattgggtgcttggtgtgctttggaacccaggtcaataggattccccttccagtgtccctttaaaaaacccaggccccctctccttcccaccagaagtctcttgctggtcctgcagacctaagctgcttatagcagcagcgaacatccaagttcactaaagaggcctgaccccagcaaggcaggtgggagttaagcaacctgagctggtccacaaatgccagacagctgtgcacatctttggggcggagacgaaaaacagatacttaacgtatctggttagaaatgaggattttctggtttggttatgcctgtcatttc

SEQ ID NO: 477596 - DNA, 670 bp, Homo sapiens
ctccccaaacttcagacagaagcaaatgtattcagtaaacatgtatttgtcctcatttgataacaaccagcaaaatgatcccaaacaaaatttgaaagtgctaagccatacagcagattctttgtggtgtagtccacagtcatgcctaccttggagtaaaacacatttcccccactccagtcttccaagtaaatgccctctaaagccagaaaaacacattaattttgaaaactatgaacctcacaatatatccaatgtatgtatattcattgtaggatatgtatatacatatcctacaaacacacatgtgaattctacaaatcatgccttttttctaaacatattcctttcccacctgcaaaggtcacctctacagaaaaagcattcaattttttaaaatacattcacttaaaccttggctctttccaaaaaggatttgaggcaacatataaaaccatatatatggcagcagaataaagaaaacaagaaaagcagacaacagggaaacaggaaagaaaacaaaagaaagtcaaggagagaaattttctcatgagtctttacaaaaaaggcagtttatgatacagtgtgtatgtggggatgggcaggggctttttgcaaacattaaaaaaaaaaaaagagagagagagagacagagagagagaaatctcac

SEQ ID NO: 477597 - DNA, 584 bp, Homo sapiens
caccctcatcacctgctgggagtgctcgtcccatcattcaaaccccgtgagcgtgaagtgaggggacatatgcaggatcgagtgtactggcaggtaacctctgtgaatggcagaaatcgtgacgatgatgattttggacatcccgtgcgctcaggatttaaacactggggttacaataagattctatggtcctttcaagccggaattgctggtcacatgaacaaatttacggggaaaataacagccacgggtaactcaggcaagtggttccactctatactctacagaacatgtgcttcccattccatcttccagcatctgctgaccctgaatggctccccagccttgccctggcctcccgtcctggtcatgagcagccccttccccacacagcagttagaaggatccttctcatgctgaatcagccctgggcagctctctgaccacaaccttccagtgtccccatcacgggactgatgggccaggccctgccccctctcagctcctgtctctgcccaagctcccctcacacctgccctcagtccctccagcctccctgctgtgtccaaccaccaccccctctt

SEQ ID NO: 477598 - DNA, 1798 bp, Homo sapiens
gacccagaggccatttatcctgcagcgagtgggggtgggacaggaaaacctcatgaaaaagaagaactggggagagttaaggaagagactgttcagcgaccatgagcagtggagctgggttgcagggaccaaggtgggggtgctgcccctgggacaagccccagcctcccaaggcctgaaggggcaagaggaggaggaagcctgccccagaagtccctttgtggcagctttgaaatgcacctttctggcccaggccaagggctgtgctattgtgatgatgcgtgaaccagaaaacacccattggtgtgcctgtaacacagctcacagacccgagaccgtcctctcctcccagaacctcactgccatccccgaagtctcgttccaccagacgtgtagcctgtggtccgggcaggccttgtctctgctccacgaccagcactcgcactaccagaacatccttgtcttctgcagtaaaacctacagcaatatgctggtgttggatggcatcgtcctgggcatagggagggatgagttctcctgccaggagatggtagccatcctgcctctctgcagccaccccaagccacgaaaggtgctgatcatcgtgggcagagatgggtgtcttgcacaagaccacatgggcccggctgaaagcctcttcaaggaagcctattgtcagcagatgaaggtgaaggtggccctcgcggaggacagcattctctgctgccagggagagcaccagtggctgcaccttcacctcataaggagatgtggcagttctgccagtagccgtggtgggctacacctactgcatggtccccatctacccctgcagccagactggcttcatgctgtgcggcagaacatgatcacccgtgaccgggagctggtgcagcacctgacacagcagcagctatgggttacatctggagagccccctattgcccccaatagatgaccacagctgtatagattgtgactatgaagatatttgtatgcattgtagaatcagcttaatatgtgaaatggtagatgttattcaagggtgctagtctaaacccacaactggagaagagattgtatattccatgtttctactagactgtaggaaagtatatcttccccacagcccagctgcaataggatttatggcacttttaaatttttgccagtacgctaggcataaagccataactcagggttgaatatgaaatttcttgaatactgaggaattcaaacatcttttattttcctttactttctttcttttttctttttttttttcctttttcttccttcctctctccttccctcccatctttccttaattttcttttttaaatattgagatttgctcttctgggaatggtctctttataacctttgcctctttctggttagtttgtaagagctctctgtatataatagaaattaaccctttatcatttgccttacaataattttgcagatttatagtgtatatgtatattttatttacataatcttgcaatgtacaaaattttaatattcaaatatgcttttttttcttttattgcttcaggatttccattcttggtttgtaagatatccctaacctttagattatatctgtagtatcttagattttcttgcaaaattttaatttaacttcgtacaatgaagtcttcgtcttgttagaatttaactttgtagaagacatgagacagggatgcattttagttttagccttaattttctggcaaataggaaaccagttgttctggcatcatttgctaaacaagtcatccttttcctgttc

SEQ ID NO: 477599 - DNA, 1602 bp, Homo sapiens
aagctatatttctgcatcaatattacattattggagaagaggtggtgagtgtgtggctgacagcaggggctctggtgcagggtgacctgatccagtcctgatgatgccaatttctacacaagcaaccacctttctgtgcctctgtgttttcatctgcaaaatggggacggaggaggggccagcacgtgccaagaccttgaggttccgggaagcctggtctgtccaagaccagcggagaggccagtgtggccatgaccgagtggacacagggttcagtcccaagaacaagatggtgtcactgaccttgctctcagacacccgcttcccacagcagagttcccggcctgcctgcaaagtgctaaccacactgttggaattcctcaggggtgagcacgagcctctccgtttcatctgtgcctatcgtggacacattaactatttcatgaagtgcacaccctgtggctctgcagggcgcgtgttatcctcccctgcgggctgtatttgtggccgacccactgcccgtctcatgtgtgcagcgctgggtgttgtgtgctcggccatctcatactatttagggcgaggatgcatccctcaccgatggggtgaacgggagctcatggggcacagcctgcgctacctcctctgtcctggaggacccagtgcccatcctccatggctccaggatggagctggccctcccacagccctcaccatgggctgtggaggacaggtgcctgctgaatgcacctgccatgatgctgagtgtgagtgcctgctgaatgtgacctgccatgatgctgagtgtgagtgcctgctgaatgcacctgccatgatgctatctgagtgtgagtgcctgctgaatgtgacctgccatgatgctatctgagtgtgagtgcctgctgaatgtgacctgccatgatgctatctgagtcaggcaggcagtcttgctaatgtcagaagttagggtttggggtgatgtgaaagttaaggttaatgtttagcagatagtcaatcccctcgctctctgactgtggttaaagaactcatccctgccccactgactttgggcttggccatgtgacttgctttggccaacagaatatgagcgcacatactgtgagcagaggccgtgagtgcactgccacgagaagcgtgtgtcctggggagctgctgcctcttgtgcccgggtctagaagaagtcatgtgtcgtcaatccaagcccaacccgtagcctggagcagagctgcccttagaccgccccagatcatccaaaccttagtcaccctgcagactccaagtgtgaggacagaagctcgtgttataagccattgagtttgggcgatggtttgttatgcagcaccactgtgacaacagaagactgatatgggtggtgtctgctgggaggaactgggtggcaacggcaagtgaatcgaagaaggccgaagttattggcttttgcaaaatactgaaccagtgaagagatttgcccaagtgtccaggagggtgggagcctttggccagcagccaggtgggccgagccttctgcagagctgcgcaggcttgctgacgcctgtgtttggacagtggtggagacctggctga

SEQ ID NO: 477600 - DNA, 665 bp, Homo sapiens
cagacgtgctgtggcctctcagtgctgggtgtgtgagtggccggagagggcgtctagatgccccaggtgtcttcacacccagaactgggtctgccagaccctgatggccccgagagtcctgaccagacccccgaaggccaacccaacatgctgggaatgaccattggtgccaagcgggccctgggcagctggggaagggctgtcacctcaaatgtcccactacctggctcctcctctttcctcagggacccgaatctgcccgctgggcacaggtcctcacacaaagcctgtgcccggtgtcaacgggagaagcagcactggcctgagcctctaagccaaagcgtccgggcacagctggggacaggcaacatggacccggtcactgtggtcctaatggtagattgtggtcctggttggcataggcagctcatcacggtctcacctgtagctgctttatggaaggtctgaattggataggagcagaaaacagcttcattgttctctagccgctgcattccagcagcttctgtgaggcaggggccagattagggaacagcattggcctaaacctgcaggcaccattgcaaaggggagtcagctcaggtaaacctgctggtgaagcatgattccagcgtggggacacagaggctgatgtatcttgctgt

SEQ ID NO: 477601 - DNA, 675 bp, Homo sapiens
gaatgttctgctgccaacctggcttgtcttttaatcataccctttgcttgtcagtttagacacccggactcaaatgcagcattgcagaggatgtttgctgagcacctgctatctgccaggcactgtgttagatgtaggggatcttgcaacaaacagaattcctgcttttatggagcacacattcaatcgtgtgaaagtttttcgtcatgtccaggcaccacctcttcctggtcaggcccacgttacatatgagaacaatggaacaagtcaaaggaagttccagtctatgaggatggacagcatgcagtgtggcgagcagaaggacctagaccaaacccctggtgttttggtaacagtcaggttgctgaaaggtccaaaactaagtcagaaggaattgccaaggaacaatggggctgaaagtgtcaggaaggattgtctgatggcaagcaacagaactcaacttgggctgtactcacagaggagaattgatcggtaggctatttggcagctcagagaatcaaaagaaaggcaagaaaccaggtttagaaaaagaataagaaccgaaaccatgtcagggcatggagagtaggaagttatgggcaggcccggaagggcatcactggtcatatgaatagttcttggttgtttctgtagcccgtgctgcttctgttaaga

SEQ ID NO: 477602 - DNA, 580 bp, Homo sapiens
ccaccaaccctgaggcacacccacacagctttcctgctgcctgtgctgagccaggcactgtgcttgagatgtgcacggtatttgacatagagtcggggacaggcactgatcagctgagggcacaggccctgtgccgccacggctcctccaagccagcactgctcactccgtccgtgaaatcccagccaggaaggccaatgtatctgtgccagtgcctgaaatgtcaatatcacaaagccagcaggaggggtgacccggtggagctcagcaaagatgacataaaacaggccacaaagctggtttgccagggtgcaggaggatttgtctgttttctcctgagaatggctgctcagctcactccacacagcatttccatgcttcatctgttagccctggaacgggtgccctgggagccacggaccttggcaagctccactgtaggggaacctcatgctgacagctcactcttgtggattaatcctgactgtttgctgtatctggagccacccccaagaacctgatcatacagcacacaggaggggctgtgagcggagatgaaatctgggcattgtcttggttg

SEQ ID NO: 477603 - DNA, 838 bp, Homo sapiens
ctatgagacgaatgaggagcatgaacgtaactcaaacagaaggaaaatcaccactttataaagaaatagataataatgatgctgctgatggcagaggtggtgatggtgatgatgaagttgatgctgctgctgatggtggaggtgataataaagttgagggtgatattgatgatggtggctgtgttggtagtgatggtgaaggggatggtgatattgatggtgattgtggtaatgatgaaagtgagggtgatatgatggtgatttgtggtggtggtgatgatgaaggtggtattgatggtggttgtggtggtggtgatgatgaaagtgatggtgatatggttgatggtggttgtggtgatgatgaaggtgatggtgatattgacgatggttatggtggtggtgatgatgaaagtgattgtgagatggtggttgtggtgatgaaggtgatggtgatgatgaaggtaatggtgatattgatggtggttgtggtgctggtggtgatgatgaaagtgatagtgatattgatgatgatggtggtggtgatgaaggtgatggtgatattgatggtggttgtggtggtggtgatgatgaaggtgatggtgatattgatggtggttgtagtggtggtaatgaaggtgatggtgatattgagaatggtggttgtggaggaggtgattggaacctgggggcagacttccccttttggtgtttttgtgatagagctcttgtgagatctgattgtttaaaagtgtgtagcacctcctccccaccttcctccttctctggacatgtaagacgtgcctgcttcccctttgccttccaccatgattgaaagttt

SEQ ID NO: 477604 - DNA, 795 bp, Homo sapiens
aggttcctggatggaacgccgtggatgttcctaatgttccttcctgatgttcacctgccatcttgctatttaatgcaatgtcttctaaatattgaatagaaaaaagtatttgtccaatatgggcaagatgacaggaatgtctttgaacctggacaactcacaggatagtggggtctgcatggaaataggaaagtctggggagacgctgtatcggggatgggaaagaaaaggtggactggatgtggcatataagagaaaggaagaagagaaagatggtgcccagggtttggtcctgagcacctggaagaatggacttgcttgggccgagatgggaaaggctgcagaagaagctgggaagcttgtcaacaacagaaatttcttcctcacaatcctggaggctgggaagtccaagatcaaagtgtcatcagattcagtggatgacgggggcctgcttcctggttcagttagcaccttatccctgtatcctcgcctggtagaagggggtgaatgaactcccttgaggtttcttttataagggcattagtcctattcacgaggctctacccctaagtcctattcacctcccaaaggcccaccttctataccgtcaccttgggagttcaaattgcaacatataaatttgggggaggggagtgcataatcattcagattgtagcacaggaataaagagtttcattttgaacagattaagtcttgatatgtctggacagctgagtgcatgagttctgaatccaggggaatttcaggccagagatacaaatgtgggagctgtgc

SEQ ID NO: 477605 - DNA, 579 bp, Homo sapiens
aacgaacatgcaaggcaacgggaacctctcccggcacgcagaagagctgtgctcggataagctgctactgtcctacaaccatgacaagtgcttttatgagacagaagagggagacacagacacagaggggaagacctgtgaaaatgaaggatgggactcaactgaggccaccacaagccgagaacacctggggctgcccaaagctgagagaggctggccctgtgatttcttgaggattgttccaggaaacacacttaagacacctgggctcagggacactgacctgtccagacgcaaacatgatccaggtggggccaatgactcagtgcccccatcccagccccatcaccccaggaagacgagacagatggactgctgggtccagcgtaatcagggcttggaatgggggcctgattacctgtccatggaacattgatttatagatgtccttgacccagccttcctccaatcccacccctgaatcttttttgagatcagctgagaacttcctcctccaggaagtcctcttggattgatctctccctacagtgatgccatctttctataacagagttactt

SEQ ID NO: 477606 - DNA, 1282 bp, Homo sapiens
gcactgctgatgttttgctttggggtgagtccaccatgaggtgcttatccattctgctgctgatggctgccggagtcatcagcagggcacagggactgttccccatgccgcttcggtggacgacttggacattagacaatgccaaactttccaaagggttggcgtcagtgtctatggcccccagcatcatgcgtggtagctccgtgttcttgctggcacttggtactgtgggaacgtcacactcctgcttggttgcctgcccctggccagaggctggccctttatcggaggaggccagtgcacagcaagagcctccaaagcagagtggggaccattcacacctggacatgactcctatctgtcctgcaggcaatgactccagatggcaaagggaaacagaccctggagctcatgtcccagctgcccctcttggcagctctgttatttcaggtgatgtcagtagcctcctgagcctcatattattggatattgaatgtgggtaataacgtggatctcactgggctgtcgtgagcattaatgagttaatgcctgcaaaggatttagatgtggcaggcccacaagatccagaagaaggtttggtccgtgtctgggtgccagcagagccggcattcacattttcagttatgatttcctttttctctgtacatcgttctttctttgtgtcttcagttttgctgggcacaggcagatggggtcttggaggttaaccttgcctgttgtataagtccgcagagtgggccccaaagcccccctgctggtcccagtcctaactgcggctcaacaaatgcatagccttgaaccatccagccaccagctgtttcttcatctgtgcaaggctgaagtggagctggctcctccacttttcagagtctgagaattgcaggatgccctctgattcattccccccacctcctaccccacccctgcccagtcctgacccccacacccatcccattctcctctccttctccctctacctcctgctgcccagaatcttctctcttgtgctagccctgagttccaacagaaccctgtggccaggtctctggggagggccacccaaaggccccattccaaaccctgcagatcctctggacagggagtggggagcaggcactgaccaccccagagacagcagagagggatacatgctgagagacacatgctccatccgtgtgacttttgcttctcggaccacgtgatgctgaaatgtgattcatcaatattttgtgcccagaagccatctgcagaatctaacagc

SEQ ID NO: 477607 - DNA, 981 bp, Homo sapiens
agatcctgcagaaccttgtagaccaggaattaaacctccaactgggaagatttatgggcacagcaaacagcatgtccccaactgagctccgatattccccactctgaacctgctcccctgcaagcatccccatctgagttgacggcaagtgtccaagatgttggacaaaaagggtcttaaccaagactgtaaggataagttgagagctaagatggtgataagtggaaaacattatctgcaagatctgattaaaacaatctggcaaagcagggactcagagaaccagaacaaggcaggccttggtgaatatctagttggtggcatttcaccagccttggagattgtgcaggtctggaaaagtaaatgccgcagggaatgggagaccatacagaacgctccatcctactggactctgattggaagtgggagggacattgtttcctgtggccactatgacaaattaccacaaacggtgcagcccacaacaaagaaattcacatctcacagccctaagaacccccaggggcttttcatggcagataaagcagaagtcaaattccttctaatggcccacaagggcctgcaggatctgccccgtcacactggcttgggccaactcatcttcggccccaggacctttgcacctgcttttcttctgggatttctattttctgaaacatccacaggacttatctccttcaaggacaagatccaggtctgtgaactggcatattcagaatcaccagagaaggagaagggagaccccacgggaaggcccaggggcaaataccccattggatgcatctgggaagtctggagtttaggggccattaggactgtgtcgtggtggcattttggagagggcacaggtccaaccacctctccttcctgtgagcgcacataacggcacttgcactgacggtagggttgctgtgaggtctaatgacagtgcatgagcaaaccggcaattcactggcattc

SEQ ID NO: 477608 - DNA, 430 bp, Homo sapiens
gcagtgaaaacgggaccttgtctgaacggtgtcctttggctagaaagtctatggcaggaatggattttttagaaatacactgtgaacaggtggtgtttgcagtgggccaggtgggagaggctgatggcgcggagcagacggggcgctgcagagggagagaggtgagtggattgcggtgctgcttggaagatcggcagggcttgctgatggatctcaggtgggcagtgacaatgaccatatcagaattttctcccagaagcttctacaactacagccagcagaaggtggaggagaaaaaattcacattgttctttaaagatttaaataacacaaagcgcttcattccccacccaccgctaacacaggccagtatcatgctcaggttcttctgcatcctctgagaacattttcccctcatttactcaatgac

SEQ ID NO: 477609 - DNA, 883 bp, Homo sapiens
tccgtgggggtggagccctagccagggtgctcagagactcgttgggacactgagtcctcacccccacccagcagtaatgcgatgtgcctcccaccccagggtataagtggaggccaagtggggaactggggctccacccaacctggcaataacgaggcgctgttgctgaacccccacccccagtgtgctgtgcagcccaaatcctgggagtcctccctcatctatgcatgctgtcctcttactactgctgttcaatccatccacaagtgcagtcagcctgacctctgtgaagacctgcttagaggctctggtcatgacagtgacagccagcgccctttcagcggcatgcaagtgacgcacaaccgccgccacgtctcagctcctggggctgcaggtcgtcggggctcagctgatctgagctggggtcccttgggcttgttgggctccatcgggggactctgcttcctgctgagaggcacgggggctgggccccgggatcaggttcccgtccaccctgcggagctctcctcagcctcagggcggcggctcctcagggtccttttgtagtgaatgacagaagcccagaaccaaaccagagccccaggcgcatccccagtccccgcctgcatcagaaccacaggggctgcatgtccaaagcaggtcactttcactgcacagggcaaggagggggccctgggacagcacagggcaagagaagggggtgtgccaacctatagcagggagtggacagctgggaccctgacctgctgagcacaggcagatggggtggtgaccagctgggccctcacctgggcatcgggctctgcaccttcacccacatccgccctgtagcctcagtcatgggaggggtttggatgctaat

SEQ ID NO: 477610 - DNA, 707 bp, Homo sapiens
taatgctgttgggagcatgtctcctccttcccccacttagttttaaaggcattttttaagtgtcagatttgcatgcaaacccatgaagaaggtgccatctatgaatcagaaagcaggccctcaccagacaccaaatctgatactgccttgatcttggccttctcagcctccagaactgtgggaaatgaattcctgttgtgtataagaagagaagagtatttctcaggccttcagaaaccaagagaagaaaactcattttatgatctgaaaggagatgaaaagcatattttagcagggcattgcaaatgcgttccgtgctcatcacagaagcatctacaatacctacattatttagaacgctgcaggagacagaataatgaatgtagaatatgtgaacgattcattttgatttttaaaaatgcaaccaagctagagaaagtgttgcaaggtatctgaagacaaaataaaatctctgctatttgtgaagtcacaaaattaaagggatgattaaacgaaagcaaacctgagatttaacctgaaaggaatcgaggattttaatttttgaaaaggtgtcaaaaagtgctgtaaagagtgtctgaaggttaaggaaactgttattaaaatgagaattatgagctcggagctgttctcagctctgtccctggagtgtgaaattagtgactgaaggcagatttcacaggcacttc

SEQ ID NO: 477611 - DNA, 880 bp, Homo sapiens
gcgagcagtgacgctagagcaggttggtgcaaaagtaattatggtttttgccactgaaggcagaatctgcagacccagagaagacaagttctcatcaccaactgcctcatcctggtttgaagacaggttctcatcaccaactgcctcatcctggtttgagaagagcgggcaaaggattgattctgcttggactggtctggattcacgcattcaacaaatatttgcaccttctacgtgccaggcactgtacttcatcaagacaccaaagggcttttggcgtagaaataacatgaactacaataccccgtggctgcaggctgctccctgggagatggaggggcctgaagccgccaaggaagaagatgatgcggaagccagcaagcgctgcatggtgttacaggtggaagattggagacaccctgccctggagctgggcgcgaagccctgggctgaaagttttcctggccagtttgagctccgtgaccctggagaggtgcctcccacctctcagactcggtttcctgctctgggagaagaagccacagcggcatccgacccgtgacagtatttagggtccactcaaaataatccagaatcatttcctcatcccaggatccttaccttagtcacatctgcaaagacctcttttccaaatacgtgggcaccgcaggttccagggctgctccccacaggagtctgttcccctccccagtgcagcctctgccccctcctcaaagaaagtttcagcactcacagctcctctctctcagctgagtgattttctcccttcctattttgtcatcttgaaagatggcaaattggagcacttaattttccccctccaacccaattaatatgaaagtgcacagcgctgatgtgc

SEQ ID NO: 477612 - DNA, 482 bp, Homo sapiens
cagtgtattaaaagtgaaggaatgccaagaaagggctatagaaaccacgggctggctgaaatgttgaaggaacaaacgaactctttatcgtggtgctgttcaggaaataagaactacattgactttgtaaaagcaaagcctttgatcagcgccaggctgtgggtgactgccccaagggggctactgggtcctcacagtcctcgtttctctgagactctagacgcagcctcatttgaagtcctgttgcttttgagtgaactcttgagtgtctatcctgcacatccaggaagtggcatcggggcacagaacattccagggcacacagtccggtctggccctgggtcaccgggtcctctgcctgatctgacagtgccctcctgagtttccagtcctccatagagtaaggattcagggtttctctctggcctctttcgatcctgctgcccgctctgcatgctgtcactcttccctcatgccaggct

SEQ ID NO: 477613 - DNA, 823 bp, Homo sapiens
cagaaaagaaagaaaaagatgagagtaacaacccccgtgcaggtttcctggaactgctcgcaaatgaaggcccatccacttggcctcacaggagaaagtgtggtgcagtggtggagtgcagactccaggcataaatgtccaggtttgaattctggctttgcctccttgctggctatgtcactctggcaagtcaaagggccagtgtattacttgatcagcagatgcccattaggtgaatcactcactgaagtccaggaagggacacaaaagagaggacagagtgtccagggtcttatggtttattattattgggaggcagaaaacaagacaaagatgaaaggatgcaagaaacaaaataccatggatataggcaaatccacagacactgagagtagattcgtggttgtcaggcattaggaggagggggaaatgaggagtaaatgctcatgggtactggctttcattttcaggatgatgaaaatgttcccaaattagatggtggtgatggttgcacgactctgaatatactgaaggccactgaattgtacactttaaatgggtgaattctatggaattagttgttgtggctgttttgaaataaagtccacaaattcgttgacactcttctcattgaaagatggtgaggaggtcgtttgcttctttgtttatcagttcctggtactatgggggaacacacaggcatgtagtgaaattttcatgaaagtaaacttaaacaactaccatttatgttaatatattaatctcctttcctttttgggggtagtgatgttggtggttaaaatgttcttttactgtgaagtaa

SEQ ID NO: 477614 - DNA, 836 bp, Homo sapiens
attattgccccaagcaagggcacagtggggagggctggcctctggagagatcaccatggccctctggggatggcgtcctgtctttccctggactcagaaccatgccagagacggagaagatgaacagggattttataccaggcgtcagaagggaaccagtgctaaagaaaatgaaaacaccaggccgggagaggcagctggcatgcgggccgtggtggttttacgtggccgatttgagagagtgagacccctggggtcttggagccaggcctgggaaaagctacttcacgtcaggccaggggctgtagccctggcaacctccactccgcctggaaatcctccacctcggggcctctctttgcccagacctggcccaggaggagcacatgggagccgggaccttcccaacaatccttgccgttggctccacaaacctcagccagtcctgcaacctgggatgccttttccaccaggatgcctgctactgtcactgttgtcattagataattaatgaactataattagaaatcatatcaataaaatttcacagtctaaggctgttgaaataggtaccatcattatcctcattttagagctaaggacagttttgggcggtaggggaggtgcgggtgtcactgcctgaggtcacaccgtagcaggactgggattcaaacccccagacctccggttccagaggccaagcttttgtcaaagacatgcagtgaaacaggcttctcagaggttccagccagtcttcattgcaaaacaagagggaaaaccgaagccaggacaggctcggggacctggccctgcccctgcccctgcccccagtgcct

SEQ ID NO: 477615 - DNA, 757 bp, Homo sapiens
tctgcgtcccttgagactctgagcttcacgaggggcacaggctttgccatcttcctggcacctctcacctgcccaagcaagatgggaacgaggcgctgctgggtccctttctcaggaagacgcccctacctccgctccaggcttctggggagagaatggtgccagacacagacacgatcctgccggcaaggcactgactttctggttagtgagaaccagtcaggttcagtggcggaaagtgtggggaggcaaggtaaggtgggcgaggggctgcagacagcatgtcgggggcacctgggccaggctgctggcaggagggctcagctggcagggacaggccccggctccccctacccccagctggcagatgcacagggctgtggctctggggacatggacgtgaataacacaggccaaaatctctgtcatggtggggctgacacctgtctggggagacaaccatcagacaatggttgtggcactgggtgacccaagtcagagggaagggaggggagggagagggggctgggccttatcctgagggtgatgggggcacatgagttggcagaggccagacttgatatacgttcttcatgcttcactctggccccagcagaagcgtgtgctggagtgaggcttagcacagatagagcaccagggaccggtttcgtggaagacaatctgaaaggggctgggggttgtgtggggggttgtgtgttgtgcatatctctcgtatatgcaatctgcaatagggttc

SEQ ID NO: 477616 - DNA, 795 bp, Homo sapiens
gttgctacgaggctcgcggttgcttcccttctgatggggcttccgacagctgctgctctcctcgattttcttctctgagggcccagtgtcctttgaggtgggggcctcaggaaaagcctaacaaaagtctctggttccatccgagcagctgcagaaaagtcttcaagaatctgagtcttctaaaagctgcctccataatgaactagtcttagtgaagagagaaaacatagacagtgtcaatcatggccagtgacagggtgcaattaacccaggatcaaattgcagcaagatggatggggccagatggtcctgttattctaacaaagggattttataaaacctcagtggctccttactggctgaagagcagacctttcacgctggggagagctagaggaggcctcgacttcagcccaacgagggactgggcattgcattttgttccgctgtggaatgctggctgctgtcggggcccacctctcatggcactctgtgttttcccatctctcagcatccacattagaatttctgttcctggaaggcagggactgtcccaggcatctgagtgtaaacagcatgggaattccaagtcagtgactctatgtctgggagtgctagaagtgatagacatccggtctatcaccagcttctcagataggcaagtcattcttcttgcatagagaaacctggaggcatcagaggtcgggtggtgctcaggttacagtactttggcgcaggtacgggagaggtggtccctcttctgtttggaaatgtgaagcgcgtgtgtgtgtgcac

SEQ ID NO: 477617 - DNA, 760 bp, Homo sapiens
tatgatggatttcagagtgcagcctttggatagagaggaggacttgtggtgttgtgtgtaagggtatcacctgaatcctaaaaagtgtgatggagccaggtctacctggaagaagaggaaactttccagggacatcctctcctcagttccagctgactgttgccttgctggaccctggaccccgtattgctagatctgatctggggacacaatgtccaagactgacaagacgccgtgaaactggcagtttagtgggagttgccaggagaagaagctctccaaagcccatgcaagtgaaagtcagtggaccccgccctcctgtgctagctgtttgttattggtgccacgtgctgccatctgtgaagtcgagtcacacaccacagacatggctgccagagaccaaggcgggaggatgtttgcagggaaggcggcctgagaaacactcccaagtgcacctgcaaccggaggactgttcatctgcagctccaaatgcattgtacaggcacaggctcactcttcccctttttctcacagttgtttagattgtggtttcctctgtcacatccgtatgaagtgtaaattatagtttccaatataaatggccattttcagcaaattttagcaaggaacaaaatttcatttgagactgaaatttggcatccctttgcctcttcatgctgggaactattttttgtctttacaaaatgcaatgagacataaatctttttgcttttatttctaaatgatactacaccaagcc

SEQ ID NO: 477618 - DNA, 606 bp, Homo sapiens
tggttcataggaaaaggtttgcctctgtgtcaacaggcagatgattcgtaattcatcaagatttagccaagacaataagagaaatatatgagcattgcaaaggactcatctcaggcatcaccttctcaggggaagactcttctaacacccttcttccctgcgcaagacctagtgtcatcccattcctccagggcccatccccttctggacaaaggacttgctgagagtgatgcaggcagatgttcctccgtggtcatcccactttcaggggtcctgcagctgaagagagacactccacctatttcctgggacgacaagcatcttttgcttaacgtgcttgtcttctctctggacattgcatctctgctaacactgcctggcccctgtgcctctcaaggcaggtgtccagatgctggctctcttggagtatctgacccagcaacagtgggtgacatgaagtactggctctggttcaacccatttagcttctaccctggaggaaaatgaggccaaaggaagttaaagacccagcgaatcagggtcaacttattgacttggtgtcaggtcttctgtcctcaatccagcattatttcttaacctgatatg

SEQ ID NO: 477619 - DNA, 511 bp, Homo sapiens
ctctcgaagcgcaagggaactgcccagcagggtgccacttgggcgccatgggtgtgacaagggaatatgtgcggggagctgactgtcctctggagtcctccattgatctctgttccttcatcccgtccatggccttgaaagcacttactacaattgtgaatcatacccttcttgtgatcagcaaaaaggtgataatcaaagtatttaagcacctgaagggcagggttgtcgatcatccaaaagttcacccatcctgctttgtgaatccaagctctgagtcagcgattttgccagctgctgtggctcatcgtgttgtcattaaattcgatgagtctaccattggcttggatgttgctaaacatcctacagtacacaagacagtccttcatgcaaagaattatcccaccccaaatccaaatgtcaatagcgccgaaagagaaagcctgctttagaggtatctaatacacacccaaaatgggagatgaatttcctgtgacactcataaaacatt

SEQ ID NO: 477620 - DNA, 1431 bp, Homo sapiens
gcgtctgggggcagatttccctgagcttcttctcagtatggagcctggtcctggcagggggctttggctgttgtcactgagggctcctgtggcctggacagctcctgcccctttcaggactcacactggcctcttacactcaccagcttttagagtggtcatggcagccccatctttgcctgccacctcagctggtccactgtttcccaggatctattggctactcaaggatgctagtaaacatcctatgatgtataggacagtgccccacaaccaagaatcacctggccccaaaatgtcaatggttccaaggttgaaggatcctgttctagaacttgcacaagtaatagagacttctaaatatttagatttagaagatgttacaggggcctctagcttctttctaaatcccagggaagcaatttgggttttacattgtggttgggaaaatgggacatatgtatacacatggaaaatgaaataactaaacaaaaggcccgcaatgtattggacgatgccggcccacactggggaggttgatttttgtttactaagtctacagattcaaatgttaatctcttctgggaacaccttcatagccattctcagaaatgttttaccagctatatgggtatcccttagcccagtcaagttgacacataaattaacctttgcaatccagtctcagcctcattttaggcatctttgcacccaaatcacaatgtcccagctccactgtcttctttcttgattacgggattcctgtttctatcaaaggagccctctacttgcttggcctctgacttggatcactcttcctctgcatttttcaatgatccattgatgtctgcattcatgtctaagctcattccacctccttggattgctgtcatatgattctggtatattttcttcatagctcttatcactgttaaaactattttatttatatagtttttcattttttgcttccacactaacatatatatgatatatagagagaaattatttacatatcacttctccttatatatcatatatagatatatatcttataaatatctatgtattgatatattatatatagaaattatgtatgtattatttatctttatatggaaataacatataacataattatatataattatatatttttatatataatattatatataattttatattatatatgttataatttatatatgttatgttatatataatttttatatataattatatataatatataatttttgtatataattatatataatatataatttttatatataattatatataatatataatttttatatataattatatataatcatattatatataattatatatttatataaatatattttatataaaaatatgaaattatatagattaaaataaaacaggacagaactgcta

SEQ ID NO: 477621 - DNA, 1487 bp, Homo sapiens
agcgagggctgctagcacttcccccatacctctctggagcccctgatcgcttcctcgggccatgtacatttccaaccatcaccagctctagataaacaaacagacagaggattcgtatgtggccttcgttaaggtgggtgccaattgtcaaattagtttctgcccaacctgccgagtgcaaatgcaaatccaccacccccggcgctgcctcatttgcagttattgattcatgtttgactgtgagttcaaaaaatgttgtctttgaagcttccccatctatgcttggcttcctgggtccaggtggctcggggatccctggcagtcattttgatctctgtattccaaacaccaacgcaggtcatttcagccttggggatactctgattaagagaggaagtcctggtgctcatggagcttgcattctactgggggagacaggtgagaatcaggcaagagatacgctggtacccggggtggaaacaccgaagacactgtttctgctctggaaagacaccaattaaagtggcagacagagattcgtgtgggagacagatgtattaaagttatctgtgcacttaaaaaaatcagagttagaagtcttaaaggcaaaaggagctattttttccttagatagttggacctgttaaggatttctgcaaaatgtaaaaagacctacattgaaattatccaaagcacccatctatcttattataagctttgatcatataaagttgcgctgatgttaagaaaaaaagtatcattccattgttcagatttttttcttgagttttgttcgttgattataattatgatgtgtgaagtaatgagcccatacatgatcggtaagacagaaagatgatttattgtttggggaagatttatgcaggaaaaatatgcagacaacagagaactaagtctcaggatgtaattgattaaacaagacagggatctaggtcttttgccttgacacggtgtagttgcctcctgaatcacacgggttgatttaggtattttgaagctaacaggtagatgtaaaagttggatgtttgctccacttatgtatgtgccaaggacaattttagattttgtgaattagaaaagggctgagtagaggttggaggagccaaggggattgggaagtatatcagggagaggctaatgtgcttcagttttattgataaatattacttttgccatgattattgcactgtattgggatgtatcattgactaaatgtctgtatggacaatgggatgcaacccaggtgatgtttatctcttcttttcccatgattagatttgactgccttttagtttacaggtgaatgctcacattctaatcagagaagatgattgggatataaagcattctcagaaaccaggaagtatgcatttctgaattcctgtttctccctttgcacatcactaaagtattttttcctttccatctattgcacctgtatgaatttgaaaagaatctaaaaagac

SEQ ID NO: 477622 - DNA, 1307 bp, Homo sapiens
cgggaagcatagtgacttctgctcagcttccggggaggcctcaggaaacttacaatgatggcagaaggtgaaggggaagcaggcacatcttacatggctggagcaggaggaagagagaatggagggaggtgctacacacttttaaaacaagcaggtctcagtcatttactgaggacccaatggcttgtgtcctgtgacggatggaagctggaggcttgcaaataccaaccaggattctctgacgaatcaccaccagcagctttctccaggacgtccgctcctcctccggtgcctctctctccccatcgcagagagtttccaggaaacttgcttttgggggctgtcctagggaacgatggcaaaattcccctgaaaggacacattctgaaggtctggttggttgaccttccagagctttacagatgccagaagtcaattccctgctataacgaggtgaccagttgtcccactttgcctgggactgcagatccccagagcatgaaacttaccattttgaaatcaggaaagttccaggcagttgaagatgggttggtcaccttcgcttttcaaaaagctggatggtctctcagccttggacctggcactcatacagcccctgtggtggaagggcctagctctgagctcttgaaagaggatgatggctctcagagacacctcatccttacccatgtcttctctgctttttggaatttgaggaacctcatctaccagcctccaacttgggctctggacctgtaagaagcccttataggaaggaatagagatgcatgggctgattttaacattacagtccactaatgggcgttttacccagggtaaatcaacaaatcaagtgttggttcgcttgagtgtaataatagtggttctctcctaatcagaaagttctgattagcagttgatgagcaaatagaaatagcaataaaataagaggtgacctactatgtgaaggttgacagtatcttattcatacttgtattctcaccaccagctccatttcataacatattgcctggtttatataggagcttaataaatatttgctgaaggaagggaagaaagatgaaacaaagagggaagaaagaaaggaaaagataaagagagggaggaaagaagagaaaaaatgaaagaccaaaagaagaaaagacaaaaggaaggaagaaaaaaaataatgaaacagatgcatgaataaataagttaggttccaggtgaggacatcctgaggaaatacctttggattggtcttgtgaaacttagaatacttcactcatttattttaaaaagtattt

SEQ ID NO: 477623 - DNA, 674 bp, Homo sapiens
ctctagaggagttcctgcttcatgtctttcctttagcttctagttacccccaccccactctctctggtcatgatcatttcaccttatccgaagcaatcttgcttatttatgagtttagttgtgtattggctgtcttcctcactgaagataatttgtggctttcaaggaattcgtccactcactctaaattgtcaaattgattgtcacaatggatattttatgaaatacctgaccattaccgctgacaactctcaaggcaaccaaaaacaagaaaaatctgagaaacagtcacagccaggaggagcctatggagacatgatgactcagtgtaatgtgggaaccaggatgggagcctggaacagaaaaaaaatcagcccaggtctccaaggacaaatgggccctcaagttcatcaagaaaagggtgaggatgcacatctccacaaagaggaagtgggaggagctgagcatgactgccaggaggaaagcagctgccaaggaggactgagccccctgccctgccgtctgcccaaaataaaagcttcacagaaaaagaaaaatgcatttctgatcccttctgaggtttgattacacatgtcatgtataggttccaagaaattcccctatatctttataataaattgtccacattggtgaactaacttaaaggagttctt

SEQ ID NO: 477624 - DNA, 846 bp, Homo sapiens
ctacgtaaagggaggtgagaaaatggaggtgaagtggacctccggctatcgctggggtgcaggagacagcttcagaaagtcccgctgcaggagtgggaccagctcctcacatttcaaaaatattatccaccaacaatgtttagaacattacccagaaagccctcctgggcagtgcagccaagtcctcatcagtgccaaaaatatacatttagcaaatgtccatgccagcgcctcactcccagaatgcacagttctcccaagctgcttccagagccttctaaagtactttcccactccatctctgaccctctctaacttggtggtgttcattctgcagacaaatagatcttttgaaaatgtaaacgtgatagatacggtcactttcttgcctttaaaactcctgccttccctggcagttctgctgtggttctctgggtgtgttagtggctgctgggacaaagtgccacaaactgggtggcttaaaatcacagaaatgtactgtctcagagcttcagaggctagaagtgcaaaaacaaaggtgttggcatggcattgctcccactgaaggctctggggaggacccttccttgcctcttccagtttctggttgtggccagcaatccttggcttgtagacacatcactctaatctctgtgtctgttgttacatggctcccttcccctgtgcgtccgtgttgtcaggtggcatcccctcttttggtgtctgtgtccaaatttcctttgatttttaagaacaccagtcactggacaaggaccaatcctaaagacgtcatcttaagctgattacacctgcaaagacccttcttctgaataacgtcatattcac

SEQ ID NO: 477625 - DNA, 1026 bp, Homo sapiens
tcagtgagaggacctgggctgctccattgtgtacgtgtgtgcatgtgtgaatgcatgctgtctgccatccctgcctttgtctccttctcatcctcttcttccacctgccttcacatcttggggccccggtgcatgtcctgagctccaccctcctcctctgcaccaccttgccctgcccttgccaggagccccaagtcatctatgagtcctcactctcctgccgcccacagcccatctgttcttcctgtataatctttccccaaaagctgctcagcaccccccaacccccaccatcttatcagcccctgccacagccctggcctagaaaattgaagcctggaccactgtacccatccatccatccatctgtccatccactcatcacccacccatccattaatagacttgcactgagtacacactgggtccctgctgagcacacaggccccaaaggcaggagctcagagtccagaggggtgacagaatagttgtcactgcccttcaagatgggtgatggagacttcccaaggctttatgtcccttttgtcatcacacacccaaaacaaagccaatgatgatactgctttcccttaagatcaggaacaaggcaagggcacctgcttttagtctttctatttaacatgatattggcagtcctagccagtgcaataagacaataaaaagaaataaaagaagatatagcctggaaaggaagaactaaaactgtctccattagcagatgacattactatctatatagaaacttccaaagaatctacaaccccccacccagaactagaaagtgagtttagcaaggttgcacaataaaaggccaatgtaaaaatggccaatataaaaaaaagtcaatgaacagttggaaatggaagcatatatattcctctagaaaatgcagaatactgtttggtgttttttaaagaaatggcctcatactgtatacattattctccaggggcttttacctccagcagcccccatagggccctcttccccctttagaacagagag

SEQ ID NO: 477626 - DNA, 713 bp, Homo sapiens
ccaggcttccccttctccccacctccttcctttaaacttgtgctgactctttctcccaaatctcccatctcctcctttgctcctttcatcccatggccagcatggttgccctggtgacagccatcctcttccctccttctgagtctgctttccagcatgagagatgtgttctggtgacctgttcctcccatgctctgtcttctctctctgtccatctgcagaaaatctgggaaagggacccttggctttacttgcttccattcccagcccacgcataccccatccttggcaagggacctcagccacattgagcccaccatggttctcaagagagctctccatagacctccttcttgccaaagcccatggtccctttttcctcctcatttctcctggcccattggggtcctgattggggtgcccatccttgcttgggaggccactgtctcctccttcaggacactgggtgctcctggcttttctcccacccattgggcagtttctctcttccatccacctctcaatactgatgcttcccagagctcagtcctccaccgcttcctgccctgcccgttccccaagggcagcttcctccacccccaggacatctgtggccacccattgtccttcttggacatagagctctctcctgaactgggacttgcacatccatgtacctgaacacaggactagacacttccctgcccttccca

SEQ ID NO: 477627 - DNA, 664 bp, Homo sapiens
ctggcagtttgaaggggtgggaatgggccctggggtctgcctgagccttcagaggtacatcctcggggagccagacacgggagacacagcagaagatgccagaagccctggaccacacaaagctcttaaactagcagaggagacagacaaaaaaaaccaggtggtcatgcgtgtgagggcgaacatgcaggatgagggcgacaggctggaggatgacctgagcctgcgcttgcaatgggtgagggaaggggccaagccatttagacgggatattcagggaaggcctcttggaaaaggtagctttctgtccgagatctcaatgacacgaggaccagatctcatgagaacttatgagaacagcaccgagggggatggcgctaaaccgttcatgaggaaccgccccatgtcccccatgccccgtgcccagtaaatacttgctgaaatcactgaataaataaagcactgaaggcatggcagatgggacactcaggaaggagggctggttctgaggaaagatagagtttgaatctttgaatctttgctcaaaaagcacctcttaattttagcaaagaggctaagacttttcaaaaccatcaggttccggcttcttcatgtttttaacagttattcacttagttcacctatttcatcttgcatttaccat

SEQ ID NO: 477628 - DNA, 1959 bp, Homo sapiens
agccttctaggaacacttgaatgcggcctccaggacgcactcgcgtgaggaaacccggcccgcgtgtccgagttctgtccacgccttctgccaacagctgtcctttgctcttcggggctcctgggaccgcgggaaggggccggggttgcctggggaaggggcctggtggcgctgcagaccccaagaggccgccctccgccttcagacagctcccgccgcctcccggcgcctgggaggagacggtgggaaaatcgcggcggcgacgagagcccggcctgctctttccgttccgctcccgcagggggcgccagcgctccgtggagagcggctgcggccccagagaccacgctcgggccgcctgacgcccagagcccccaggaaggggaaactgagacccagggaggagaagggaggctactcagacctcctaaattctagtcccaaattccacagcaccaagcttgtccctagacttaggaaatgcagtgggagcgctgttctctacctgggctgcacaggctggctcagaggtgggggattggactcaatgacctctcagtcccctcagagaccctcgccagctgtggggaggtggggacaggtgtgtgaaacgcgggatgggctgtaagggatcccaggacggaatccagccctccctacgtattccctgtctttgcaggactgtggtgactcccgtcttcctcttctaggtggccagacccaggagctgactcccagaccgaggaggcctgctggcactgagtccgtcctgtatctagaaggactgccatggccctggcagtgggggagggctcttaggacctggggcaggctggggagtcaggactgagaagggagtgggatctctgcccaagcaccaccttttccaagaagccctccctgaccctccaggcctaacttatgtccccgtgtcctcctggaaaccatgctccttgccttcagagcccccacttctacttgcactcttggtggcccagggtgggccttggccttcagcctgctgacccaggaccctcactccttccatagtggggaccagtgcctgtctgagccccatcatgatcccactgggagcagccggcgcagtgattgacgcggtaattggcgcgcttaggcaccgggctaattgaggtcaggctgcagattgcagtggctgcttcgcagaggcggtgggcgtgggggctgcgcgcgctccctccccctgcagggcctggtgtgaggacgtcgtggagcggggaggtccccccaccccgccccccgtcctttttcccttgggagaacgctctccagcggcaggactaaacacacagcaggtgctaatccacctttgaatccactgtggccccaaccacagatctctcctcctctttctgccccctcacctcttcccaccccgccgcccacgcattttacatcatttctgagagatggcaaaaccaaggcccagagagggaagccccttgcccaaagtttcatggtagactgtctccagcatggctgaccttgcagatatgctcctggatgctttcagtgaaaattcagtttacacccatgctgggagtaggggttgggggagacaaaattaccagggactgaggaggcagcaggaccaagaaggcagcagcctggctggagaccatggatgtaggggagccatggtcatggtcatcatggttggggctggcattcaaggctctgcatggctttcctcctgtccacacttgcagtacagctcctaccactcactctttgcttcagccatgccttattggctccagtcttatcatgttgtgcctgttcatgcctccgagtctttgcacctgctattccctctgtttgcaaagcctgccactgcatttctctgctttgtgaattcctatgcatgggctgtggcttgtttttaactaactttcatttcctaacattcactgagctctt

SEQ ID NO: 477629 - DNA, 638 bp, Homo sapiens
aacaaatagaatagagcaaaggggatgggatgtcatttccacgattgggttgcaaaagattgtgactttcgtcttgctagcagactctctctgtggccttctcagcttgcacacttcgatgaaaggctgcctcttttgagaagagggagaaaagaagaagaagagggagataaaaagaaaatgtttgtgaagcagccaccaaaagttaaaagaaaaaactttatgtctaaaggtcaagtagttggtggccacacctgggtgaaaggcagggccaatcctagcatccggaaagatgcggtctgtgggtacaacacacactatttgcatgatagttgtactaaaagcccagactcaaccataacactatataatcaagtactgcacttggactgcctaaatgtataaaaattaaaaattaaagaagagaaagaaaaccaaaaaagacggagaaagaaggaaaaccaagaaagaagaaagaaaggaaaaagaaaggaaggagggagggagggaaggaaggaaggagggagggaaggaaggaaggagggagggagggaaggaaggaaggagggagggaaggaaggaaggagggagggagggaaggaagggaaagcaagcaagcagggagggagggagggaga

SEQ ID NO: 477630 - DNA, 507 bp, Homo sapiens
gcttctcgccgcctggatccagcatgcctgaagtcagcagtaaacttggatgcttcagttacaagagaggcaacggcaggtgcacaagccccgaggtaagaaagggaaatgtcaagaccagaaggcaggctgatacggaggaatcttccagaagaagtccaaaggatgaactgagactggacttgaggcaggaccttgtgagcccagaactgaacgtgggccacagatgggagagtttagaagctctgcaagaacttctgatgtcctgccgaggtacagaaccatcagctgaaaagtgtgattctgaagcttcagtgatccccaaatattccttgccctctgcacactgtgaagaccctctgccacagggcttccaggagcaccgcctgcagcgggcttcccacaccttcactgagatgaaccatcgaaagccctgccttggcactcaaacctccaatttcaagattgggaaagacaagtgtatttctgcatgttgaattttctttc

SEQ ID NO: 477631 - DNA, 543 bp, Homo sapiens
caggtaacctgagggtggtttattgctctggagacataccatgatgttggaaagggcattctttttctttgcaggccagaaattcgacaggctatgcaatttatttaattcaagcaaggatgaaatccacaggaaggtgcttccggggctggtgcagccgctcaacagtgtctttgaaactcaggttctttctgattttctcctctgccagactcagagtaatcgacttctcttcatgcctcacttgtcagaactggatctcaccactcccattcgcaaaccagtccctgcaaagggtagtaggattgctgtaattggcttaggtcaggagtcaacaaactttttctggaaagatccagatagcaaatattttaggctttgtgggccaaatggtctctgtttcacactacaattctgccattgtagtgtgaaagcagtcaaaggcaaagtttaaatggatgtggctgtgtttcaataaaactttatttaaaaaaatacaggtggtgacataacaactaaactctaagagtctggacagaagcc

SEQ ID NO: 477632 - DNA, 584 bp, Homo sapiens
tcctgaccattggaacagggcggggaggcccctgggttttaatgcacgtttaccaccaggatgtgggtactgaatgcgaattagatttgcatctcattgttaaagtgcggtggcatttcaaacccaaacgggaacttgcagatcagattccagtgctttctggagctagaaaaatggtatatatgggcaaacgagccagttgggtcctggacatcgtgactggcaatgtcagtctggaaaccgaagatgtcaccaggaagaaaggacaaagatgtaccagggaggtccaaggtatttggaaagaggagaggttatgccaagtaaaaacaagcccacaaacctccctaggagagacacacgcataccttccacatccggatcagggtgctgatgatgatggtgatggtgagtggaaaatctcaagttccccacatctgccaaagttggagcagctgctactaggagggcaccagatggtaggtccttgcttcctgtactgctcagagtcccagcagaaaacagaattccattcagatgtttgaccagagacttttttctttccttttgaaattatactttcagtt

SEQ ID NO: 477633 - DNA, 614 bp, Homo sapiens
ttctgtaggatgaaaagggttctcaaatatacctccctagtcccgcatatcctaaacttcaacacacttttccggttgccaattacatgtctccacgtggctgatgccctgggaagtccaagtgctgatgccaagctcgtgcccttctctcaccctccccctcctctgccctgcttcctgcaaaccagacacttctttctttcctgcctctgcttacactaccagcaggcatccagagattacaaagcaaatacagacaggcaccacgcagaagccaaagaaaacctgttgcaagctgtactggcctgtgctcaaaaccaacttctctttgggtttctccttctagcttcaccttcgtttctccaatcattgacaaaatttgttcatttcaccccttctctaagtcctggtgtatcttttcttcagccaactgattcggctcaccagaaaagatgcaccgcgtgctgttccccagtcttcagctagcccagggaagttactattcacaaaaataagcaaaggctttagaaatgaacttaaaatgggaatcaaatatttgtaatgttctaaaatgtcacaggtaagttaagaaaatgaagttagcaacatcacac

SEQ ID NO: 477634 - DNA, 2532 bp, Homo sapiens
taacgtaagcccaggcacacagcaaaccagcaccagcacagtgcagctcctagtcctactgtcaactattcctcacccatgtttcaaggttaaaagaaatcgggcagaacattcggcctgaaattcagatttgggggcatgtggggaagcttagaatgtccatgcaagtctctcagtagtaccaacagtgccctaaccatgagcacatctgaagatttttcaccaatgttgaagtcagctcaaggatgttcatacccagcccatgcagtgaaagcaggactatctgttaagaaatgcacggagctgccaaaacccgctgagcagcgcccaacatctggaattcaaactgctggaaatgtagggagtaagaaagctattcgcctgctgttcactgcagataaaggtgatttaaggagagtctggcttctggatgcattttcaccctcacagaccttgtccaaaaactgggatctagaagactttgtgcaaagcaatcagatttcatttgctacagatggtattttggccatcctggcaaaaggctggctttcctatctgagtgctaaatcgatattccaatctggtcttttgggaaaattggcttgaacctgcagaagaaattcaaccaaaaaaaaaaaaaaaaaggaaaaggaaaagaaaagaaaatagatttgaatgtgagctgattccattgaaacttactgcttctagacttacatttttcttttgaatgtccacgaagtaggtcaaacacaaggaaaatagacaatgtctagttagacgtctcttaagaactagatctttctaaaaagactaagtctcaatggattttcctgaaaaatgctgttgctgttggatgaacaccatgagaatcctttcttcaagcagtaaatgtgagaattgctggcctcttcccgaattccaaaagttgggccagtgatactgacacaaccgtgttatacatgtgtcagtatgctggcagtttcaaaagacaaaaacccaacttaaactgtcttctgtcagaaataatttattggctaatgtaacagaaaagttcaggataatcttcaggtatggctaaatccaggtgcttagactctgtaattagagagccacctgtatctcttgtccttgctttcttctattttggctttagtcagcctttttattcattgcagcaaaatgtcctccagcacttctagacatccatcctgttagaaatagtaacacactataaagtgaatttcttttttgtaatgatttcagccaaatctttatgttgtgacttattggttatgcttatgtacattcctgaaccaaaagtggtatccaggtggaaaaaaatgctctgatcattcatgccttagtcagatgactacccttggagctaccctaaaataaattgattcaatctcacataaaccaaatggactagattacggagcatttctttccaaaggacaaaacatggactttactataaacagagaacaggtgatatgcagcaaaaatcaaccaaccaaccaacaaaatacatttgtccattggggatggagatgggaaggctactggcatcaaaatttattcacatccatcaacgttttctttggcgaggtctctaggggaataatcaaactgtgaccattgtatcaagccttaggaaaaaatattttaagccactttaacttcccttaccctctcccattcaaagccttactttagaagatgttcacaaaagtcaacttaatataacttacattgaaaattgttaccagttccttgcattttattcttgatgaaaaaattgaaaggtaccagtgatcccgacattctaaaagaaaaaaagaacttccaggattcatatacagcatatgaaactggaaaggattgtttaatgagagcttgagtataagagtgcttacatttttaaacaccaaattgagaagaggagtaatggttatattaaattttaatgttagggaaatgggctctgtcaggaggtatatggctggataggttataaagtaatgtgagtgcattcagactttgaatttttcctaaatgccatagaaaccattttacattagtcacgtctaacttaagagagagagagcttcagttcctggaggaaaactgcagctagaagtcttgcctttttatcccctatatggactcttcattattcagtgaacctcagaaacaaaagggcttattttaaagccaaaagatttgtgtccatgtcacagtgctggaattttaattctttctcttggaagatgaatacaaagtaggagaggttcaagaaggatgaaaagaccaaatgagtatcaaagaagaagttgaccctaaaatgtaataccatggctcatcgtctaattaaataaggatccaaatataggcttattaacaatgaggacctttctgtatgaggcattttgctttgaaacacgaagtatatagtctattttgcaagacaagaaaatgaaggtaattatagcatagagagggagagagtgtcaaaatgtaaaataa

SEQ ID NO: 477635 - DNA, 1007 bp, Homo sapiens
cgttagagcaacagcaaagaatccagtgcagctgtgatgaagccgctgtttgtcagctgtcaccggatgcaagggtaccgcagctggagctgagcttgtcacttcaacttctgctagaaaggaccggagggcccaggaagatgtttcagcaggctgcaacaggaatgctgctggcaaggtggtttctttctctagcttcaccttccatgcttgtctgttttcacactgctgttaaagacatacctgagactgggcaatttacaaaagaaaaaggtttaattggactcacagttccacatggctggggaggcctcacaatcatggcggaaggcaaggaggagcaagtcacatcttatatggatggcagcaggcaaagagaggcttgtgccgagaaattcccatttttaaaaccatcagaacttcatgctgaaaagcttggagatatgactaaggaaccaacaaaccataacagatggtattggctgagtgaaggatcaaatttggagacaaacttgtgtactaatgttgtaaaaggtggtaaattgtcacttctgggaaccatagaccagaatgtgaggtgcccagatcaaacattacctctgcgtatgtctgtgagagagtttctgcatgagattagcctttgaattgatggacttacatttaaagcaactgttattttgagtgttcttttaagaactcaaatgatatcctaaacagttcaataatagtctctcctttcagcattctgactttcataataagattttgtcattcttttaaattttccactgaaggatattcttagcttgaatttttcaagacctaaacaattaacacagaaaagggctgaatgtcagagccacaaaacaatggttgaaagttagcttttcaaatttattgtatttaatttctgttcatttgaatttagatagtgtaaatgtactgcagagtgcaatctttggatacaaatttgagagctagacacggtaatcagactttcttatgcc

SEQ ID NO: 477636 - DNA, 1438 bp, Homo sapiens
gtgcctctccccacgggactaagactatgcattcttatacaagtcaacttaacatcgatgaagaaggtgcttggttccccttcactttccgccatggttgctgtctgcaagctgaggagcaagggagccagtccaagtcccaaaaccttgtaagtagggaagccgacagtgtagccttcagtctgtggccaaaaatccgagagcccctggcaaaccgctggtatagtaaaagcttcctaaggcctcaccagaagccgagcgatgctgttgccatgcttgtagtctgcagaaccataacccaaataaacccagtttttataaattacccagcttcagggaagaaacacatgacccaaagctggacaatccactctatggtcaatgaccaaccaggtacccctgttaaagaatctgagctaaaagatattgcattagtatttaagaaagcgatgttagacaatgaggagagatactcttggccttgatctcttggagaacttaaagtctaaagaggaagataaacagaaaaaagccagcaaaaaccgtgatttgtactataaagaaaacaaggaggaaacagagggagaataacccctggttggagaaggtgggcattttgataaggaattttgggaattttctctgaggagacttctcagggaaaatacagtggcccacatgtcctatgaattgacaatacttacgttttcaatttcttgatagatcattttgtttatttgcatattccacaaatgtttattgagccttttctgtgttgtgtcgggctgtactggcactgggacacagccatgagcttgcttgatctatcatgaagcttccttctaggactcagtttccaataaaggagtgatgcaagcaaagtgaaatgaagatttgaagactacatatggaaaatggaaatataccacttttcacatgaaaacgcccatctgaaacctacagacatcttagtcccctcttgaattatctggacaaaatgcctatgtatttgtggatagaatgtgtaaagataaaatgacagctgacatttcatgagggctcattgtatgctaggcattttatgaactttatttcttgcaatattattcccatttccaggcgagcaagttaccaaggacacgtagctaatggcggactgagtctggttttaagccaaagtcttactccagagatctaacacttcttgctaccttcaactgcttctcactgcttaggtgacaagtacaccaaaatctcagaaatcacccctaaagagcttatccatgtaacctgaaacagctgtgcccccaaaactgttgaaataccataaaaatttgaaacaataaaaatgacagaaaatgacagaatatatatgtttgtagaagcacaattcacaattgcaaaattgtggaaccaacgcaaatgtccatcaatcaac

SEQ ID NO: 477637 - DNA, 1069 bp, Homo sapiens
tctggtcagctgcctcactggggtctggggtagtagaataaatttctatgacttctccctgttggctccatggacagctttcagattttcaatgacgtctgtttccttgccagccagcaagcacgtatagggtataccctcatccaatatgactggtgtccttatgaaaagaggaaatttggatgcagagacagatatgcacagagaaaagaccatgtgaagccacaaggagagctccatgtgaagatgaaagcacagattggagcaatgtatctacaagccatggacaccaagattgctgatgaatctccagctggcgaatcatcttctaaaaatgggctaataaaattggcaagcgagattggcaaatgggttttggctaaagattattggtttgctgctgttgatatcacgatcaaaagcttcaggctatttgtccttggctgcccctgtactgaagtaggcaccctgctgttcaccttctgccttgttcacttacaaatttaggcactcagagtcatctggttgcgttactactgtgtatgctgtatgcttagccacaaactccaattgctgagtaataattgatgagtgcttacttcttaaatcaaatgacccctccagcctcttttccacctggcctggtggtgcaggtgcatctggtgctcacatgcccctgttgctgagtcaactacccagagcctctcgtcaacattgctgccacccttgggaaggtcagcaatgattggcaatgctcagagctaagtaataacaatttgttctctcactttgagtcttgaaattttctccctaaataatgtttttgatgaatagtcttttcctttataatcaatgtgtttcatgtctggttgaaaatatctttgcctaccttcagatcatgaagaaagtggaagggaatgatgtaattaatgggataattctcaccctggggacacttgggtttttcttcatgctattcacaaattatagaaagtcaaaaaggtccctgtaaatttgttgaccaagaatcgtattacgtccaaaatatctccctcaagtttaactttac

SEQ ID NO: 477638 - DNA, 580 bp, Homo sapiens
gctgcagggcatgtggttttgctgctctggttcctgcagtgtatgacatgaagcaaccagtagcatgtagcatctcctgtgaacagctttcctccggcaccccctcaggtggctttgcagagtttgccttgacaggaattgatgactgtaaatcgaggtggagacataaagaagttgtcaagaatgactcggtttctgactttagcaacccaacagatgaagaaattcacccaagactgaaaacatgttcacaaaaggacttgtacacgaatatttatagcagctttactcacaacagtccaaacctggagaaatcccacgtgaccatcaacaggagaaagaataaggcacagcctagtagagctatgaaaagagggccaccatcctccagacctcagaatggtaggtccactgacagcttgcactgtgtgcctggaaaagctgcaggcagtcaatgccagcccttgagagcaaccatgggatctgcgccctgcagaaactcactctttgcatcagtgtggcctgtatgtgagacatggagtcaaagattattttggagctttaagatgtaatgagtgcc

SEQ ID NO: 477639 - DNA, 709 bp, Homo sapiens
ccgatccttctttttggcattagtgctctgaaccctggcgtctcttttgaagagaaataaatccaaaatatagtcaacaccatcatgttgctgctgagtatttggatggcttttgtctgttcgtcaaccctctatgctagagagcaagccgactgcaattcgactagttctttgatgataattgactgttttgaaaatattgagcccctgtgtgtcagggactccacatgcaatatcatcatcattttcataatgaccccaaggcaagacctgggagatctggagcagccaaagacctgggcagcacagaaagctgggactgagggaagcattcgtgacagcagatgcaaagaacctgtggccaaagacatcatgtggctggctggcaagaggaagggccagcctggagaaagaagcttctggaagaagtatggaccaagaggtccggagcctacgtctcaagagggattgctttttggactgaagctcctattactgagatatcgggcaaatcaacatgatttgggtcattattcgaagttgtgactctcgttctgtgccttaatccaggctatatttcccccatgattgtatagaggtaaaatctaatttaaattagctaagacatgattgaagatagtaacgtgtataaataaggaatccaaaggattcatggaccacaatgaggtttaaaaataaagacatccac

SEQ ID NO: 477640 - DNA, 784 bp, Homo sapiens
cagctggccagtgttctcaagtttaggttggttcaattggagctaactttctaagtagaagacactagagctggtggcatttctgtaacacttgacagcagtccggaaatacgtggggatgtgaatgaagaacagggcagcacagcaagacagaaaggtcaatgacttgtgctgggttctcctgctgactagccacgtgaccttggaagtttccaaaattaagagaacaaatagtcgtggttccaaacttcacagaacttatagcctacaaggacttagtgatcatgcaattcaaggctctcacttagaagatgtgaagtccaagcatatagataatattcctttcaaagccctgggaaatagcaaatcttcaaatgttaaagaaacagaaagaaaaattgcgagtccaggatggattgaatgtgaggcagcagtaaaatgcaaagaagtagatggatacagactatattttggaagtagagatgatggcattagcagtttggggaagagagtagaggaacaaagaagaatcaaggacgattccaaagtttcttacttgaacaaccgagaaagtcaatattaactgagaagtattctttcttcctctacataaagattgacattcattttcatagagcacaattttgaggcttagattttaagctttctaattgcatttgcaaataaatgttatgcttcctgtaattgaataatggaaacaggaaatgctagtttatctcaataagataagcatcatcattgttttcctatttttctggaaccc

SEQ ID NO: 477641 - DNA, 506 bp, Homo sapiens
aaaactcctcaggaccccccgaatggtggggctaaaagagctggagcccagacttgagagctcccaaagccagggctgtgactccctctttggggccttgtggttcctggagtccccaagcttccaggtgctgccgcattccctggtgccagcaggggaagctgcagccttgcagacagctggtgcctgtgctggcacctggagctgcccacccctcagcaacagccagcatgtctggctgtgcacagtggctggaccctacacttgctcacacaccccttgccactccacacctgtctcgcccgtggcaggcatgggattgagaccggtagtgaaggctgaatactattctcttgtgtatctacaccacactttgcttacctggacatccgttgatggacacctggattgcttctaccatgtggatttgccattttaaaaatgccttttacttaccccaaagtaaactggatagctttttgaatgttttatagtgttatattttc

SEQ ID NO: 477642 - DNA, 560 bp, Homo sapiens
tcaaaaggttatgtggcagctcctctcccaaggatgtaaatgttctgtatttgtgccgtccggtatggtatctactagtcactatatgaaaagggtgcaatttcattcttttacttctggatattcagtatttctgacatcatttgttgatgagactatcctttccctgtgtattcttggcacctggtcaaagatcagtttctgttgcgccagtgacaatatgaagatcaagtgtgctggggacaagaatggaatcaccaagaccagtcaggaagctaaggcacacagatggagcctgtggcacgctgataaatggcccctcaaagatgtccaggttctaatttctggaacctgtgcatatgtggtggtgaaaaagcctttgcagatgaagttaaagagcacaagaaggattgatgatccttccatcatcaccagtaataaagagcctgcaaatttgtcagccaagtcctgacagtaaaatctttattgctggtgatgatgtaagaggctaaagggacacagcttgagttgtagatcccagaatatagaaagctgatgtc

SEQ ID NO: 477643 - DNA, 852 bp, Homo sapiens
gttggttggtcacgaaaatacttatataaaaacagctaacaggatgtcaccaaaaagtttactggggttgtcttggaatgttggcagagagagattatctggagaaaggagcatctgtgaatcattaacagcccctgaggcttggtgctcaggcccggtgaaggaccctagcagcaccagcagcagccacttctgggactgccttagcttcttagggctgctgcagcacattgtcacaaacttggcaccaacttattctgaacttggcaaggctgcacttgctatcttgggagctgtgcccattcacaccgtgtcagcaaactccactcaaagaacacaatacttcaaaaaaccccacaatgccagtgcctcactaaacaccttccctatggagtacagaaacaactcatgcttgtctggatgggcaggcagcagagaaagtcaaacgggcttagaaatattagcgactgtaccccatggaatcctgggcgctggcaagggagaaaattcacctggacttgtggacctgcagcctgaaagctgggcagacgtggattcccaaggaatgttaggaagctgtcatcaaaagacgggagggtgagtgctggtcaggcagatcacaaccgtccactctactaggagtgccagtaatttgtaggtttgatcactttacataatcccatatttcttgaatactttgttcatttttcttaattcttttttctttatcttgtctaagttagttcaaaagaccagtcttcaaggtctaaaattctttcttctatttgatctagtcaaatagaagatataagcaaatataagctttcaattatattttgaaatttaaatgag

SEQ ID NO: 477644 - DNA, 646 bp, Homo sapiens
cgtgggcagaggtccctgcggctttccgcagtgcattgtgcccccgccgcctccttcctcaaggtgacttctatattctggaggcttctgtgacatcaaacatccaggcagggaatgcctggacctagtgtcacggtccaacttcaccacgtgcggcagtccaccatgctgcctcctccccaactcctaacactagcttgggctcctgggaaatactcctgctccctgtcctctccaggctgtggaagatctgctgctgaacccctctggtcccacaaaatcatcctgatgcctcttaaccctgcggaggcctcaggaaacactgtgagggttctccctaaagccgccaagttggctagaaaacatcttaagctggaaaaccgtgggtccaactacaaagtgcactgttccatgacagggcagtctggatattgggactacctgcggcagtcacatcacctcagctcaagtattgagagaggtagaaaacaggaactggttaagatttcaaaacatcctgccatgctcatcatcccaagttgtgattctttgcttacaagctcttctctcccatttatctcagtgttcttaaggccactgacccagaatttacttttctgttcgtgacccctctggcctgagcctc

SEQ ID NO: 477645 - DNA, 678 bp, Homo sapiens
tcccaggagggcagggaccgtggccaggtgcaccccgtgttgtcataatctctccactggcctgaatgctccgaggagaccaggatgaatgtgaatcaaagtgtggagcctccactcccaagaggagaagagaatcgagaattaagcctgtgagatgtagctgtacacagagaagagatgagggcggcagggagccctctgaggagacgacattcttgattcttgagcatgagttggaagaaatggagtcagccaggtggatatttggaggagcagaatcccgggtgaaaggaatgactgtgccaaggttggcagagagacagtgctaccatgatcactcagagacccagacagatagagcagccatcatcttaaatgtggccagtaggcaggccagtgggaaaagagaatgtggcctcggcaaatctcatggtcacccctgacgctaagaaggccgggaggcgccctcaagcagagagagctggagtgtttttgaatcttccgtgaacactccgtgaagtagacttgtttttaaaaggattaaatccttacagaaacagctgaggcccccatactccctccctaatcccatgcccatggcccctttaggaattatcattatctaaagctgctttcctgaaggatttgaagcagcttataatagcaagcacaagactc

SEQ ID NO: 477646 - DNA, 914 bp, Homo sapiens
agcacacaccacgatggcagagaaaggaatgttatttcattgtttatgtgaaattcaaacttaactggcatcttgtattttatgtagctcctctccctctataccatgtcatcccctgacagacttgtcctagatgccaatgagaactttgcctcttcccaagtgtttgatcttgaggaagtgatttatccttctctgagcctccattttctcacctgtaaaatgggaataaagatgaaatgggattatttatgtaaagtgcttgctctagtgcctagtagtcagctggttgaagccgtattgttgctagtggcatctagagaacagcacgcacaaggcctgcatggtggcatgattggggcgtttgaggaataccaaggcagccatggtaggcaaaactctagagctggctccagattctcattctccgattattcaaccaaacaggaatccaggtgctgctgcgaagggtttgcagttgaaatgaaagtcccaagtcagttgatcttaggatatgaaaatgatcctcatggccctaatctaatcagaggggccctttaagagcagaggatcctctctggctggtgcaggagaggtcagagtgtttggaagcacgaaaaggattccaggggcccttgctggctgaagatagaggaagccatgagacaaggaatgcaggtggcctctccaggtgctgagagctgcccctggctgaaagccaccaaggaaatggggactatcgtcctgtaaccacaaggacctggatcctgcagttagagaaatgagcgcagaagagaactcaagctcctgggcctgcgcacctgctgttcccgcagcctgtgatgccctccccaccccagccctgtgacaccctccccaccccagccccgtgacaccttccccaccccagcccc

SEQ ID NO: 477647 - DNA, 861 bp, Homo sapiens
tccctgggtctcagtcctcccacagcacccccaggagggcatggtgggatgcagagacactggatctcaggccacactttcctgaatttttccccaaattcagtgacccagcaggacctgtgcctcctgacgtggtttcactgttatttctagagtctcccaagggggatcccctaggcctccaaaccagcctcagaagccactgtgggtcctcggaagtcaccgtgggtccttggaagccactgtgtgtcttccctgccctcttcccactatgctctcactcgcctgtgcctgctaccccaaggctctggagaaggctgcctggggcccccatcccaggacaccagtgtccacaccaaggtctctacctgcaggcagctgcagagctctggcccctgggaaggcagggggaacagccgcggaaaagcttcgaggtggcaaagagccgggagagttctgtgtgactgcagcttggcaggggatccaggagaggctggaggcccaacaggccggaccaggaagtgccagaataaaagctcccggggtcctggctgaggatgctgtgccctcgcccatccgtggccactgccagccatttgcatcacaaatgaggcacagtcgtgccgttgggcaccagcctggtgctaccctcggtgactcaaggacacaggccaggatccagctgctgaacgtgctgccttgccccacccccagccgcctaaactgtggaggaggggtataggtgaggcccattcttggaagagcagcccccacccaccccagggctcagccctgtcacacccgtcccccgaggactggcatttgggcatcatcacctttttactactttcatcaccttct

SEQ ID NO: 477648 - DNA, 987 bp, Homo sapiens
cccctccctcctcctcctcctcctcttcctcctcctcctcctcctccttctcctcctcctccttctttgagacagaggactcgggctcagctgagctcctgtggcaagtcctgtgggactggcatggaagactcctgggcatgtggtggctatgactcttccctgatgatggtggccgcaccttgggattggcttctcctctccgagtcagggacctggcatttttggcagcccttgggggctatttttaaacctcacagctggttttcatcatggctgctgataggaggtcagctgctctctggagaaatgctgtctaaaaaggcaatctgtagttgcaagaaacccaccaggactgggagccttttggtaaatatttctttcaccctctgcttcagtgatagaaacagtaagtcccagttaagcaggatcaaagtttatcaggcatcaggacacactgactgctgtctttctgtccttcaggccattcaggtgtcttcgctctttcattcaacaacatcaagcacctactgtgtgccaggtgccgtattaagtgtagaggacagagtggtactaaaagacaacacagtccttgctgccaaggagccaacagttataatgacagcaacacacaccagttcaggtctatgtccctgtaataagtatcacacgtgacccccagtgccatggcctgaagtacctcttgattagttcacctgctccttaagtcaggcgtctgggtgggctccactgaccctctgtccagggtctcagtgagcccaagtcaaggtgtcagcagactgtgcccctttctggaagctcaaaggagcacctgtttcccgctcattggggtggttggcaggattcaggtcctcggttcctccctttccaaggcagcagcctcggggtgagtcttccctctgccgcccctcttcccattccctcttgcactttgaagggttcctgtgaggacactgggccctctcc

SEQ ID NO: 477649 - DNA, 622 bp, Homo sapiens
aaatccaatgactggtatccttataggagaaagaagagactccgagacacaaggagaaggctgtgtgaagacggtggcagggattagagcgatgccaccgcaggccaaggagctccaaggatctctgtgcggcacaggcccatcccggcccgaccatccctccccacgacagcccctccaacctcatcccgccacactccttcttgttcactgccctgcagccacactggccaccctgctgccgcccctgcctcaaggcctttgcactgcagcggaagcgctcccctgtgacctctgcagtgggaacagcagcatcccctctcatagccccgcaaagacaaggctcctgggcctccttctaaggggcagcaggactcggggtgcctggggaggtcaggcctgcatcccaacaccagcactgtccccatgggctgtgcgggcccgggctggttacctgacctctctgtgccttggtgttcttatctacaagatgggtacaaagaggatttacgtggctgcagggctgttgtgagaactgaatacactcatacgcagccaggctgagaatggtcccccgccactctgggcaggcagtttgtcaccgggagagatgactgccccc

SEQ ID NO: 477650 - DNA, 636 bp, Homo sapiens
gcgaatggggaagatggcaatacagaacaattcagtgtctaccataactgtataagtatgtcggaatattgccaggctgccagtgtttctaggagccgctgccccgggaatgtgggccctatcccaggaatccggcttcctgaggtttacaaacagcactgtagataccctgtggagatgcacatccctggtgggacagcagatgggctgggctgggatacagcccgggaagtgaatccaagggctccagaagcatgctgggcagcctggctctgcacagagagctggaatgtggtgccaaagagcagggaagcaccagcgagctgcccacagggacatcctgtgtttgctggaagccaaatgggaacaccacacaacagagctggaacagtaaatgcagattctgacccagagggtcagggtggaccagaaatgccaccttggtacaaagtattcataccgctacactccaagcccctgcttggagcagtatgagtctaaggtactatgtcgtgccttcaggtgcttaggatccagggtgggggataaaaaggacagaggagacaggtgtttatccaactcttctctcctctttttttgcatgcttgaaagttttcataataaaaacgtggggtg

SEQ ID NO: 477651 - DNA, 1487 bp, Homo sapiens
gttctctgaaggcggctggggcagatccagggcagtcgagcagcccttctgagatgtctcttcttcggcgtttcattcactccccgcggcaccctggatgcctgttcacagctcggtccagatttctagagctgcttttaaagggcagctgccacccaccatgattgtgccgcacgcatggctggcagcatggatgtcagtgtggggaggcccaggcccttggaggaggctgaggcagccttgtctgggaccccagacccaggggaggggagtggtcagggccggccaagccaagcaccgtatggcccctggttcaggacatcgctgggacccagaggccagagaccttcagctgggatccccaaggatcccttgggacccctgggactgttgtccacctctgtgccaccaggagaggagagccccactaagactggagtgacaccggaaggtgcaaccaagagcaggcagggagaacacggagtgcaggcgctgcctgagcccctgccctgggctgtgtcgggggagctactgtggaactttctgtctatgcaggctcagcaggccacagtgtgcaccacccggctcctgccagtgaacctacaaacgctgatggctagattatttgcatatgtgttttagaaggaaacctttgagccatttataaagacaggctcgctgacttatgggaaagtgggcttctctactgtcatttactaactggtatgctttagctctgtgtccccacctgaatctcatcttgaattatactcccataattcccacgtgttgtgggagggacatggtgggagatcatttgaatcatgggggcagtttcccccatactgttctcatggtagcgaataagtctcatgagatctgacggtttgatcgggggtttccgcttttgcatcttccttatgttctcttgccgccgccaagtaagaagtgtctttcacctcgcgccatgattgtgaggcctccccagccatgtggaactgtaagtccaattaaaccacttttactttccagtctcgggtatgtgtttatcagcagtgtgaaaaccgactaatacgctaactgtcatgtgtctggacgtgcgaaaaatccctaaatggtgtcgattcattctcacttaattaaacttcaagttttaaaaatgagaactgtccaacccaagtgtcatcaatagataaacagataaacaaaatgtgatccccctcatgcaaaggaaaattattcacccttaaaaagaaatgataacattacatgtaagtggtccaaatataccaattgaaacacaaagatggttggactggatgaaaaagaaactgtataaataataaacacctattttaaatatgaagatatgtcatttaaataaaatagaaataagtaaatataagtatgtagagagtaaagagaaaataactagagtaaagaaatagaaattttaaaacatgtccttaatctgataaagagtacct

SEQ ID NO: 477652 - DNA, 732 bp, Homo sapiens
gagggcaattccacacacctcgctagccctaagaagtaaataagcaacttgataagcaagaagtgtgggtacgaatgtgagcggtcatatgacgttcctaagagggaaggggaagaaagcagcttgtctagttcaaagggttttctcgatattagacactgtttatcatacaataccttttatttccctccccaaagatgagtccactattaagcagaattactgcaaacacattctgaacaaggcagcattcactctcactttcacctcatcaccctcctttgggacagcatctctggcgctccctgctgggagcctgactctccaggaccgcggcagccaggagcacccagcagtgctccaagcctctgcccacggccatgacctgcctggctgctctctactcccacatacctgctgtatgcctgctccagggcccctcatcctttccaagtcctatccatctttcaggaagccctcctatgaaaatgacattcactgagaaagtggctacttgagctggaaattcaaacaaacccccaggtgcttttcctccaagctttggaagacagtggaggtgcgtatgccggcttctcatctcatcacaaagattattaaaaagaaagtattccaggtaaagactgaataaagttaacaactttaactgcctcttcaagcacactgtcatgtaaaactgccctttatttttgctgccagtgtgtgaaggtgaag

SEQ ID NO: 477653 - DNA, 1180 bp, Homo sapiens
gacagctgcagggtgttttgtggggggccaatgatcctcctaaaactaccacaagtaccataaaattatgtcatgtcaccagcaactggatgtgaaactgaggccacagggggcaaagacctgcaaaagttacttggctagcagcagcagaaatctctggaatggaagtattcactacaacgctaagcttctggtgtggcctgaagacagtcccttcatctctgagcctgtttccccagctggacgggtgaagatagctccttgcacccagtggaagctggaagagctcgtgaaattctctgccaaggccaaggctctcaaatctagtgctgttcttctcaacttggggatatgggggccagagacgccatggagtacaggccctaaccctctagctattctgcagtctgccatcaatcaagtgctcatggctaaaactccagccaacaaggaacttgaacaacacaagtctagaaaacaggctgttgtcaagagtttgactgattgatggtttggagctcagaaaaagtttccccatggtcatttcttaatggccatttcagaacaaaggggcagaggaaaccaaacaccttcccagggtcttgcctctggcaggggagaaattgaggtctttgatggtttcagatgtaagtgctaccctgccgttaggctaaaatttccagtatttgaaaagtcccaagctaattttcagggaggaaattagatgagaagtggcttttaaaacatggagaatcttatgtttaaaaacttgggttgccaaggaaactctctcttcaatacttccttgccaccatgttgtaaattaagcccctaactgaaaggtaattaaggtaattggtggcactgctgcagagagaatgtggcaaggcagccggagggaaggagcccccaaccttttagggcacacaacccccttagctctgggggaagctgcatccattactgcatgtgagggccttgaaggcacctttggagaaggcagaccagcaaacagctgtgagccatgctcagtgaaaggccaaggaaaggaaatctgaaatgtcacgctgctaccctgttggttttgaataggtgaaagctccatgagtcagttaatgagcagattgggaagggctgcagtgttctggccccctgcagccaggttaatgtatgtggtatc

SEQ ID NO: 477654 - DNA, 647 bp, Homo sapiens
gtgatattaacagcagcagcagcgcctgtaacggaccttctcagtctgggccttgctggcactctgggctagatgtctgtgttaggggcatggggtgcgctgagcgttgaagggcatggggtagcctgcacattgaagcatgctcagcagtgcgggctgtgtgaggctccccaggacgatgcccgtgttctaatcccagaacctggaacatggtggcctcgatgtcatcacaggggtccatctaagaggaaggaggaggtgagagggaaagacagaggttcagagccgctgacactcccgccttcagggctttgccggcactggccctgctggattgcttctccagcagctgggggcattcagctgattgtggcaaaggccactgtgccccggggtgggcgtggggggcagtttcacctccctgaatgggctgccttggaatcatgcagcgggggctgcatcatgctgcgtatccacaactgtccaaggaacccttgtttcacaggagctcttgcagaagagggttttcatggaatgcaaaatcctggtcctgctggcccctccccatctgaggtgatgtggctgcccgtgggtgggtgccagtctgctgtcatccgtgggagctagcagcctggcagatgggagtg

SEQ ID NO: 477655 - DNA, 1220 bp, Homo sapiens
cctcacaatcatggcagaagctgaaaggcacatctcacatggcagcagacaagagaagagagcttgtgcagcaaaacttccatttttaaaaccatcagatcttgtaagacttattcactatcacaagaacagcatgggaaagacgcatccccgtgattcaatttcctcccaccagattcctcccatgacatgtagtaattgtgggagatacaattcaagaggagatttggcctctgggcctataatgggaagggctgccatcaccattgccttggtgattaacattcagctcctcattacttatgccaattctgtggccagcttgaatttgtcctcagaaaatggggttttcctttatatcgcattgtcaggctgcaaattttccaaacttttatgctttgtttcccttttaaaactgaatgcctttaacagcacccaagtcacctcttgactgctttgctgcttagaaatttcttctgccagataccctaaatcatctctctcaagttcaaagttccacaaatctctagggcaggagcaaaatgctgctagtctctttgctaaaacataacaagagtcacctttgcttcacctcccagcaggttccttatctccatctgtgaccacctcagcctggactttattgtccatatcactatcagcattttggacaaagccattcaacaagtctctaggacattccaaactctaggtgttcatgctattatgggttccattgtttctagaccctttcagctgacttagcaaggaaatatatgtgtgtatagtagcccatatttatacatatatttatcaatattttatatttataaatatttatatttatatatacatatacatatatttataaatatttgtatatgtaaccatctgtatttaaattaaactaaacatgaattcatactgctatctccaatcctaatctgtcaccgcatgaattattctagccttctccccttacttatctgcaatctctcaccccagcagtgagaaacatgggtcccatcactcatcatccatttatttaattatccagttcctgtgtacttaggtagcagtatcagaattgttaactggtatcctcataggaaataattttatcaactagcatccagtttttatgtacagtttcttttgtctttagtcttacagactccactcatttccaaagttacttgggttagcaccctttccctttc

SEQ ID NO: 477656 - DNA, 4936 bp, Homo sapiens
ccgctgctgaccttcacgagctcggtgctgcagctctgctgccatgggtccagcctgcaagtctccagcaactctagcagcttctggcctggaagcagctgcccaccccagtgtgcctgtgcccccacgctcctgccctctgaggctgctcaggaagccagaggccatgccgtgctctggtagctccacttgtgaaggtgaggacttgggtggcgcagcaggtgctgtccaagaaagggaaggaaggaacacctggggagcctgtgaaggtgaagaagtttgtgccttgatacgagcagacacgccagtgaagaggcaggggcacaagtcaagagggaccacaagcattgctaagagagcatggaggcatctcacgtggtttgtggggcacggacggaccatcttccaggatgaaggagcgtgcatctcacacccagcagatgaaccaaatttggccagaggaggaaagggatggggagagtgctccaggctgcagccacagctaggccaagactgggaggcagaagagagccagggagtgtgggaaggctgagctcagcatggctggagagaacaggaggggtctggggttggtgtcagttaagcacagctccacttgacagtgactggttcaagctggccatgtgaattgtcccctggggccatggcctggttgaccataggctggacccatgactctgatctagccagtcagagtggcccactcctcaggccccagtgattggctcaggcatgagcatgtgacccaaactggaccaatcagaagtcaaagataaggctctaagatgttgtgtaagtgaatgaatcaataaggaggccctcgctggtccaaactagctcagtctccaggctccccctccaaaatcatacgttgaagtgctaaccctcagtacttcagaatgtgacagtatttggaggcatagccttaaagagatcagcaacggcattagattttcataggagcacaaacccgattgtgaattgcgcgtgagagggtctaggttgcacgctccttatgggaatctaatgcctgatgatctgaggtggatcagcttcatccccaaaccttccctcacccccgcccagtcccgtggaaaaattgtcttccataaaaccagtccctggtgccaaaaaggttgaggaccaatgagttagaggatcagccctcctgtttgcccagccctggttcctcccaggccttggtcagaaaaggaaggcattcccctgtagactgaataatacctgacctaaaatgacccaggcaatgaggagttatttttcccacatggagagaagttcaaaagtaagcagctgagttgattcagcaattcaacagagtcaaggatgatttctctgcttctcttgctctttacaatacggacacaagatagccactatagctcatccatcacatctgcattgaagactggaagaagaaaggagggtagaattctgagtcagccacatctgtcctacaagcccaagccaacaaactgggttacatggctgactctagctgcaaggaaggcgggagatggcaaaaaagaaaagagatggaaatgaacttggggtagccttcaaataaagaacccatagcttaaccttattgatacagacctatgcccttgtgtagcttacagtcttatggggaagagagatgttaatcaatgcagcacactaatgggtgtataatgacaaactgaggtcgaggttctgcagcaaactttacattctacatccttagaatctttactttaatgccaccattcttggtgctcctacaccccagggcctgtgccagcccttcccatacatgatcttcctaaatctgcagagtctctgtaaacagatataagtatccccactcttcaggttgggaaattgtggactaagtcacattccattggtccccagttgggaagtatcccaggtgggattcacacccaggtctggttggcaccaagattgtagttttgttgacaggtcttcctaggagtcagctgacttgattaatgttttcaaagaatcaagttttcactttgttgctttctttattgtgtatctattttctattttgttttctccccttatctttattagttccattcttctacttgcattgagtttaatttgctctcttttcatagcttcttaagacagaagtttagagtattgattttatacctttgctctttctgaatgtatgaatttaaatctctaagtctccctctaagttttttgctttagcttgtcccacagattttgatgtgttttattttcattacatttatttcaaaacatttaaaaatattctttgtgatttcttccatgatccagttatttagaaatgtatggcttaatattcaaaatatttgggaatagttatatttttgtaattaatttctagttaaattccactgtagtcagagaacgttgtctgtacgattccagtcctttgaaatatattgagactcactctatggttcagcatatgatatattgtagtggatgtttcatgtcacttgaaaagaatatattctgtggttatggggtgggatgttccaaaaacgtcaattggccaagtcgattaataatgttgttcaaatcttctatagccgtactaatttttctatccatcactgctttctaaaaatcaattattcacagggctgtgttttaagtgctcagctgtgattgtggattggtctatttctcattttaattctgtcagattttgcttcaatatcttgaacctctgttattagatgtattcacctttagcattgttatatcttctcgatgcattcacctttttgtcactatgaggagtctctctttatttcaggtaatactctagtttcttttatgattggtgtttgcatcatgtatctttccccatcatctttcattcagttcatctgtgtccttaaagagtgactatcaaagtgacgcttgtaaacagcaagtagtcaggtactgtttatttttatctagtctgataattggtgccttttatatgaagtgtttggctcatttacatttaatatcattattgatatgggtgggttttagtgtagcatgttgtgatttgttttgtatttgtctctaatatttttgttcctttgctcctctttccctgcctttttttggattgagtatttcttagtatttttttaatctcctctattgtaacacttttctgtggttctctaaatttcagtgtgcattcatagcttgtcccagtccacattaaataaatattatgcaatttcatctacaaaattggaacctaaaaacaacacatactagttttctattgttacataacaaatgaccacaaatgtaatggctttaaacaacaactatttattacccaccattttgtttctatgggtcagaagtcccagcagggcctcactgggtcctgtgtcaaggtcctcagggtctcacaagactgcaagtgaggagtcagctggtggtgtcgttttatccaagtcttagggtcttctttccaagctcgcatgattgttgacagaattcatttcttcgggactagataactaagactctccccatccccacctcccaggccactcctttgcataggcagtcaaaaacatcactgttcacttgttcaaagatagcaagaatgtctctcttaaaaacttgcccgatgaggttgagctcacccaggaatatttctcttttgattaaactcaaagtcaaagtgattagaaacttcaatcacatctataaaaatctctttctggttgacgtatagtgtgatctaatcctgggagtaacatcccatcctattcccaggtctcacccacactcagggggaggggattgcaccggacgtggataatttcagtataatttcattaaccacttagttttttgtgctatttttatcatacattttccttgtacatatgttataaatgtagcaataccttgttatcttatttgttttcaatagtcaatagttttttagagaaaatttaaaaagacagtcccatatttatctatatattttatcctttctgatttttaatttgatttttttctgccagatccaggattccatcttgcatcacttctattaatcctgaagaacttccttagtatttttcatagcccacgtgtgctgctgattaattctcttagcttttatttatcagaaaatgtcattatttcaccttcagttttgaagggtattttcacggggcaaagcactttaagttggcaatttctcttttcttcaactttctataaatattttattcccttaaatatcttggcttccatcattcctgatgagtagccagccattatacttacttcattctcccgaaagcaatgtatatatttttttgttctggctgcctttaagattttgtatttttgcttttaaaaattttgatcatcatacaactagttttgcttttactcacacttattctgctgggggtttgcccagcttcttgacctgtctgtcctgctgttgcagctagaagaattccttgtttgtggtagagactcaataaatgttttttgaataaaataaacagatactgtgagaagcaacttatagtcataattaacagtgtgaactctggaatcagagagacctggatttgaattctgtttctagcagtgttatttgggacaagttgcttagcctctgtgagccttgatttcctcatctgtgaaatggggatataatagcaacacccacctaatgcggttgctaaggacattcactgtgtactgaggacagggccttttcactcgggggcatcccaagccttccttctcacccactggagaggattttccctttgctcctcagggttggcatccctccacaccttctgaggaaatgtcctttatattcacatttgtaactttt

SEQ ID NO: 477657 - DNA, 747 bp, Homo sapiens
ttattttctcacccaaagttgcacagcgagcaggtagcagatggagatgagctcaggcagaccggattctgagcctgtgcttataaccagggctggaaccagggcgaggtgctgcttgagatggccgcgcattacctgccaatccgagctgagaggatgcgctgtcccggctctaacgctgacagagggccacatgcctccacatgcagaaggctcttggagtaatggaggcaattacagcctgcaagtaactgccaataaaatacattacaacttgacttacaaatgtattcagggaggcttccagttactgctccaaaatataaagaccttagaagtggtcgttctcatcctcacaacaagaaaaaagccgaacaaactgaaaatcaacaattcttagatccattagagaattgtgatcatggtgtagaccattactccaaaatctgggagacagacaggtggctaaaatcacagcacacagggatcagaagctgctggggcccatggcaggagccccaccaagttctcagaaaaatcccctcatgctttcagcaggggggaaggaaaagcgagcattttgaaatatatccagaacattctgttttcctcaacaaagatttgtactcaagggaaaatcttttactgcagccttatctgccctagaagatgggcaattagacagctggatccccctctagccttcttgtctcacttaaggggagagggaaaaaaaaggctaagaaa

SEQ ID NO: 477658 - DNA, 3666 bp, Homo sapiens
gggctccccaaaggccaggaacgagtctggtttctggaacagcactgtctcctcagcacctagacctgggcacatagcagacaaccaaggaatgcccatcaacgagaggaggcctcacctcatggcggccatgcttatagttccacggctgtacaagaagcatggcaccagcatccgcttctggggaggccacaagctgcttctactcatggcagaaagggaaggagagctgatgtcagattggtttgaacgtgactgtgtctcttcttcaaagcgttggttcctggagcgctgggccttttcccgaggctctcagaacaacgagggcgattcaggggatacctggacagagcagcaggggccagggagtctgtgggagtgggcacagcatgatcagacgcgccttgtgccaggatctttctggctgctgtgggagcacaggttgtacggtgcaggaccagagctgggagaccggggaggccatggagcaatgggtcagggatgggtgctccccacgacccagcagctcccacctggcagatgaaccagaccctgtgattgcccctttcgacattgcttacaaagtcaggttgcttttcatctcctctcatctttaaaagagcacttccaggttaaaacaccggcatccacacccctgcccttcctctgcccctctagactctctgagggaggactacatctcagcctctccctcatggccctccagatgtccaccttcctctcagttgactgtgagctttagtggaggccaacaccatcccaggtggggtctcagaaccactgccagcggttggtttaaggctttgaaatttgatattcagaaaccaacgggtcctgttgttttattttatatttttaattacagtgtgaacagcagtgccccttatcttccaccacaggcgactgccccaaattctgctgtcctcatacgcttcatgctctctggtatgagctgggctccatggggctccttgcccaagtgtggataagcacatggcccagctgttaatttgtatagatgggcaccaaaggcaaaatcaagtagggtaactatgacccttgaaaatcactgaacctgcctactacctacagtgtcttctgctgagcatcaaatgcagcatgggcttgtttttagagacccagtggttggaaagtatatgtctttagactctagactccttttccagctgggaagctcacattcgtgtccccaggagccaagctgggctgatggctgattgatatctttgctatattgctatattgttacattactggggataggaaggtgggggtctaaatgcatgtgttcgggtcactaccttgagctgaaaagaggcatcaaaggatttcggaactggaattcccaattttacctacaatgaaacagaattagagagcttgccctggctctgtaattagagggtggcctggctaatgaggactattaaggtttcctaagttgtatgatgacaggagaggagtgagatttaagaaaatgccaaataaaattggacccaacactgatcctacttcagccagataagcccctgtcactggtcgccttcatttctttttgctaaactggttttatatccttgatacacaatgttcttcctcattgccattttgattctttctttaccaaatgtcttagtcagttcagctgctataacaaacataccctagactgggtggcttaagtgacaaattttaattactcacaggtctgggggctgagaagtccacaatgaagacatcagcagatccagtgtctgggctcagcaacatacagaggcccagagaggtcaaatgatctccttatatgtccctatccacccagcctctgccccacgagctcaggcctatggaggtggcatgcttcctactctaattcccatatgacttctgtctttcctccaaaaccgtgggctccgaattggcagaattgtctcttttgctgctcaatcccagtgctgagcattggcctgcacctagtaggtcctcagccaatgtttttcaatgaatgcagcaatgatgacatgaaaacagctgtttaaatccctgtgcctctgattcaagtatctttcctcttccagtgtaacaaaagtgtgggggaaaggatgcctctttattgtgattcgacttggattttacaatgtaaatattcagtagccaaagccaacaaacacatcatagcaatagatgtccagaacaggagacctcagctttggcagaggaggtaaataacagacattcgaataattccactcccaccccaactgatctgcgctccaccatactcccatggaaaaggaggctgagaggacttaggagtcagcactcaggctgcaggtgagatccaggctgggaccatgtagtaagaagacatgaggagttttttggtctcagacccctccccacccccaccctcaaagcattctgggatgctccgttccttctggacatagttttcttcccaattttcttgattcttaaaatgttcttaaaatataggtcttgcattaaggattagaattttccagtggtcacagagtaatgaaaaccaactgagagtctgttttggaaaaataaaagaccacaaggaaagactctgaaacacaaaaccaaaggaatctttctgccccataagtcagaaacccatggatatgctgtttatctgtttatttttattagagaagcattctaggagagcaagctctctcgtgggaggatttgcaagtgtgatgggtgggggcagatatggcattacttaattggcttaaaattttgtcttctctgccaaagctaaggagtccctgctctggttatctactattacctaaaaaccaccccaaaaatcagaacttcatgcagctgtttatcactatgctgcatcacaactctgcatgccaggcggatgacacacagcagggacagcacaagtctgggacctcagctcagaagacttgaacaactgggggatgactgggcatctttcctcctcctcctccttcccccttcctcctcccttttctcctcctcctccccctcttcctcctcccttttctcctcatcccccttcttctcctcccccccccacccttctcctcctccttctcctcctcctccttctcctcctcctcctccttttcctcctcctcttcttcaccctcctcttcctcaccctcctcttcttcaccctcctcttcttcctcctcctccttttcttcctcccccttctcctccttctccctgtccacctcctccccatcttcctcctcctttctctttctctcccttttccccatccttcttctcctcctcttattcttcctgccccttctcctcatcctcctcctccttcttgtctccctcctcctccttcttgtctccctcctcctccttcttcttctcctcctccttcctctcctcctcctcctcctctttgtctctctctcctcctccttatcctctatctacatggcccaatgtggctagtttgggcttcctcacagcatggcagcctcagagcagtcagaatccatccatgagtgctcagggtatcaagaggaaaaaagtggaaggtagcagtccccttaaagacaaagcctggaatggacagagcatcccttccaccatacc

SEQ ID NO: 477659 - DNA, 1048 bp, Homo sapiens
cattgtgccattgatgggattcacagagaatggagatgtaaaggatggctccattcagaggctggctcttcccctctggggggttgagatgttggcagaagctccccatccttacagctccaaagccaagtgtacagagagagcctcctctccagggtccaggcatgtctgaagttcgctctgactgccccagcctaaggtggccacacacccaccccgtgcccaggaagatgaagactgacagatgtgtgctggccagcaatggagccccatccagatctcatcgtctgagaaaagggcagggggaggtccccaaacaaagcctgaagactgtcattcaaagaagtggggagggatgccgggcagggtggcatcagctcttgttcaagcgaggctggagcagggatggtgcttccccgggagcatccacactggccacaagctggggctgtggtgccctcaggctgcaccggcctggcttggccccctgggatggtctacagtgccccagctttcccccaggggtctgctgagtcacatctaggggctgggatatcctcacttctgaagacgctgatgcacaaaagatgccaagaaaaaaataatccccattgaaacaaatgaatagctactgtgccccctcctaacaatgccctgtgtgactgccgagtttcctcctgcagtgtggagggctggtagacgctgtttcatttcctcattgctctgggtgagggcaaatccctccacctctcccacttccaagaaggacaggaaaagccagcaccattcctggacaccttcctggtaaacttcagggagttactttacctccctgagccttagtttccttatctatgaaatggaggtgttaatcatagcatgtagagtacaatttcaaaaatgtcagttagtacaattactacgattagtctaattacactactagaaacagggcatttatcctgacgtgccccaggcttgcttctgttgactccacacccctgttcccactaaccagagctgaactggaaagctgttttcccgggag

SEQ ID NO: 477660 - DNA, 1501 bp, Homo sapiens
gttcactgtggttctctgtaacagcagccctaggatagtaatgcagaagctaatttactgagcatgaagtaggcaccaagcattttgttaaacacattacagacgttatctccaatccacccacctgaggaagttgatgctatcatcacttctgttttacaaatggagaaaccgaggccctggtgctcagctgcccaagtgcacccagcagtgggacattgacactgaggaggtgaaccctgagagaaagcaggtggttcctgtgccggtcgttgtgctgagtgctgggaaggacctcacagggaaaagcagcacagaggagctgaggacgccgtgtgacagaaacggtgtcattgtgatgcctgggattctctccaagggcccgtgctgcatccaggactgtgagggcctggagagcagactggacttccaggttgggctcttggcaacaaaagcgggggccccacagcgacggctcctccagggaagaggttgtgctgctcagcctgggcctcccacactcccctgggaacaggtagcaggtgcagacagccagcccggagcctgggaatcttgtccaggaccacagccaggagcctggtttccagagcgtccccgcttcctggggcccacagccacagcggcccggcgccgtccccactgccgctctcgagaaccagccatcaacagctccacacaagctctcttttctgttttaccaacagaactgggactggacgggtttaaccccagggctctggcagtttccatttctctgtgttaaaaaagcttttagcctaaacttaagccaagtatgcctccaggaaatacttgcttcttccctgtcccccagggaaccaggcctggggccagacgaaagaagcaaagaaaagggaatttatgcactgaaaaaactggggcaagaaggactgccagctgttccggccacagcctgtcccatctttggggatggtgctggtccggtcactgtgtaggagtgctagactgtcttgtgcatggagaattgggaagaacgtggacctggagtcagaggcctgggtgctggctctgtctgaactggactgagaaggataaagggacactcgctggaaggatttgctgatacagtccacacagaggctctgcctgtgtgcacacagatcagaatacgcacttaatgagtggttatgcccacgaagaagaaaggggagaaggaggagacagaggaggaggtggggatggaaatggtaacaactctctcagccaaccctcagatgagtcaagctggctactgaggtcacaggagcccaacccaaagtagctgagaagcaaaagggagtttactggttcattttaaggcatttttcagaagtaggtctggctgcaggcacagctggatccaggaactcaggctctgtcttctggggtctttctccttctcgcctctacctacttgtactcagcttctggctctcctccatcaaaaaggctcctgtccttc

SEQ ID NO: 477661 - DNA, 1628 bp, Homo sapiens
aaggttctggcacaggcaccagcttattgtgaggctgcggctagaccaggcatattgcaagcagctgccacgctggctctggggaacatggtggcacccagaagcttggaggtgccaggaaccacacagccccaaagagggtgtcacagccctggcccggggagctcctaggactgggctccccaaagggctgcagctctcctctccttgtctcttctctccttctcatcacccacaacatggtgagcaaagggcatgtctcagcgccaccattcaccaggtcccaagtccttgtcctgtatccaggaagaatgagtccacagaactggcagcccagccccaagtcttcaccggggacccacccctttccacccagaagactgtctgcctccaccaccatcaacctgccatccacagtgcccatggtgcccaagctgctcatgcagaggggtgcccgcaggctggcattgagctgccctaagctcccccttggcctccccttggcacccaacgtccagagggggctgagggcagcagggggctgggagcagggagaggccaggcaatgggagcagctcccactgaccccttggaatgtgcagccctggctgcgcctcccctactgcagcctgcgtcatggcagcagctgctccagacgggccacctctgccatcaccaccatgtacggactttttctataacaccaatggtatttgggggctatttgtttttacttcccttcaaacccatccacgtgaggactgcagttgaggtgcactgcactttctgcactgcgttctgctcagagatgatcttcttggtcttcgtgaactttgcctcaagccacagatgctttttttaaagtgacttacctttgcttcaccaacagagagccccattaagagaggctctgtgtcctctttctcttgttactgtggccctgacagtcacattaggtggctggattctggcttttgtgcccagaagagagcttaccagttcagtaattttgcagtctgtagggcatggtaaccaaacatttgaggaggctctgtgaatttaggggcctttcctggaggagaggcagtttcggggtggcgtggtggacaggcttgttgaatgcaccctagttgataccccttgagggacattatcaaacacccaacttacagatggagaagatgaagttcagaccagtggagaagcatttgcctaaagtccaaagaggagtaggtcacaaatcagaggactgtggtgagggaagggggcgttggaggggggctggtggccaaggctgctcctggaccctgtatggtcgtgggaaagacactccaccctgggaatatggtcagctggacacgtttggctgggaagcactttgaagctgggcagcatccaacatgctggccagtccctggggctcccaaggctggggacacaggcctccactctgacaagctgttcagagcactccccaagcctttgtgtgggaagggacagcccagcagcagagcaactggagtgtagatgagagaggaagaaccacattccagagattttatattttatattggggtgttccacaaagaaagggccctggggtcaaagcaacctgtcccaaggttttt

SEQ ID NO: 477662 - DNA, 674 bp, Homo sapiens
aggaaacagccttcgtccccctcaactcctcttgcccctcctcttatatttctccctttaagtccacaaaaccgcaagccggatcagcctttcctgtttaggcagcttcgtaggcatctctcagtaggtcccaggaacacatcgggcctgctcagagcactcacccatgccatccctctgcttggtgtgtctttccctgctagacactagatgcgttttattatgaaaattttcaaaaatacagaagcattgaaggaatcggcgagcacccagacactccctgccgaggccgccctgacagtcggctgtgcacgttgtcactcctccatccgcctgttctctgtgccagctgcatctgaaacgacactcgctgtcggaggtggctttccctccacagggagggcattcccaccgccgctcagcggcactttctgcctttgcataaaagccagcacaatcctgcccgaggtggtccacgccctggtggctgcgctaagtgctccccacacaccgtgttcagtccttacagctgacctgagccccaggtattattattattctccccatattccatgggcagaaattgaacctcaatgaggtaaatggacatttccggggccccctggcttggaagtggcaggaggagggcgtagacccccagtcccagccacgtg

SEQ ID NO: 477663 - DNA, 1372 bp, Homo sapiens
aaggttctggcacaggcaccagcttattgtgaggctgcggctagaccaggcatattgcaagcagctgccacgctggctctggggaacatggtggcacccagaagcttggaggtgccaggaaccacacagccccaaagagggtgtcacagccctggcccggggagctcctaggactgggctccccaaagggctgcagctctcctctccttgtctcttctctccttctcatcacccacaacatggtgagcaaagggcatgtctcagcgccaccattcaccaggtcccaagtccttgtcctgtatccaggaagaatgaggtatgacgacaagtagaggtccacagaactggcagcccagccccaagtcttcaccggggacccacccctttccacccagaagactgtctgcctccaccaccatcaacctgccatccacagtgcccatggtgcccaagctgctcatgcagaggggtgcccgcaggctggcattgagctgccctaagctcccccttggcctccccttggcacccaacgtccagagggggctgagggcagcagggggctgggagcagggagaggccaggcaatgggagcagctcccactgaccccttggaatgtgcagccctggctgcgcctcccctactgcagcctgcgtcatggcagcagctgctccagacgggccacctctgccatcaccaccattgctccttcccctgacattgcaaatccatctctctacctccaaaacccaccctgggtccttcacttcccactggctcctggacaaggccagtgtcccctcttctgagcaatggcgccccctgcctagctggccttactgttttccacactcgcccttccaacccatcatctgtgccacaactgatcttttcagaaactaatagattgctttactctcctgattacagtctttcaatgatctcctctcattcttaggatgaagacaaaatcctccaagctcatcttttgccattatcctctctccatgtcgttccccacatgctggcttcagttcagtccccttttgtgcctcaaggtctttgattgaaccatcctccctgcctgaaatccctttcagcccccattgctgacatatttggctcctcctgctttcccaaggtcagcttaagtgtctcctcccctgagagccttcctgcattctccctaaatttacttccttcatcgcattgtcaatatttctggttatgcatttgcttcccttttaaatgttctgttttcttgtagcagaatgtaagccccatgagagcagggctgcacctcatcttccctgttccttctgtattccagtaccagcccaatggccagcatgcagcaggtgctcaataaataaa

SEQ ID NO: 477664 - DNA, 946 bp, Homo sapiens
ggcatctgccccacaccccagggcagaaataggggcacccagctggactgacgtccccttgtgagctatggatgcagacctggatccaccatgcgtgccatgcagggccatgtgccccaggcccccttcaaggaaggactgcccaactgtgggagtgtccttcaaaaggccccaaattccacttcagcagctgcttttgaagagcccgatgacgactccacgttctccctctcagtccagctgagagggacagacatcaatgcagggatcaaagaagggcaaagcagtgtgctgtcattgatttttccaaacctgggggccttccgaggcccagaggcaccagcagagtacagacgagtggaggcaaatgcagatgcagtcaccatagccccaggtgccggtgttccccagtggcttattagaaggattcatcaggcagatggaaactgggggagcagagaaggggaaggacggagggcagttgcatttggagctctgggttccagagtctgagggtcaaagcagactaggctctttctggaaaaatacagaaataatgcagagtccagtgccattatttttcatactttgtgcttatttttccggccagaccaggaaagctgtttgacacctacacaatgaggagcaagaaattcagaccttcctcctcctgaggccccatttccttccctctggggttgttgtgaagatgggattcgatcatgaatataacattcactgccctgagaaagttagcttcttccctcaccaaggctaaaagggcaagagatgacacacccagcaagaaaaccgaaaataacaaaatcagtcaatgtggaacaaacattactccccggcaactggggccaggaagcaaaatacagcaccaaacaagataagcatggtcactgccctgctcccaaggaaggatgctttggaaggcctt

SEQ ID NO: 477665 - DNA, 647 bp, Homo sapiens
ctgtaaatgaagtcaggatcagcctccccaccaggcaaggttcaccacccctccttccagcagcctctagaaggtggaacgggcaaggaaacggattctacgctagagcctcccgaggagaacacagctggccggcacctggattttagcccaggagactgtgacggatgctgacctccagagctgtggggagtcgtgggacccctggagatgacacaggagagagagagcgggtcaggggagaaggttggcctcactcacacaccactgaccctggatcagtctccttgggctgccataacaaacgatcagagactagggggcttaaaacagcacagattgactctcatagtctggaggcagaagtcaaaagtcaaggtgtcagccgggccacgctccttccaaagcctccaagtggggagctggtcatgtcttatgaacagtctttggcaccagagagacactgtgtcaatgctagtgctgatgacatgatctctagctggggaatcctgactggtgttggtcagactgccctgaccactctttgtgctgcccatagtgagctctgtggccttgaacaaatggccttacatctctgagcctcagttgcctggtctgtgaaatgggggaatggccgtgcccatctg

SEQ ID NO: 477666 - DNA, 579 bp, Homo sapiens
aggccagtcagggctaatgctgctgtccaggtgagagcggctggcagccaggccagaaggactgtcaggggagatggagccgagggggcacaccccagaaaaatgggagcaaagtcacattttacatggtggcaggcaagggaagcatgtacgtgggaactcccctttataaaaccatcagatcttgtgagacttattcactaccacgagagcagcatgggaaagatccacccccatgattcaattacctcccaccgggtccctcccacaacacgtgggaattatgggagctacaattcaagtgcacgaggttcggattccttcacatgctcatcagtccgtgtcattgtctgtcttcggttagagcaccccagtgagcaccccaacgggaaaaagaagatggggaagtatgactttgatgcaaatgcaaatattgactcagagcctcgtgcctctgggctggcggtaaactgagctttgggttcttaagcacatctgtgaagtccgttttgctacataaggtgacatattcacagggaacagggatttggacctagacattttggggggcattatgta

SEQ ID NO: 477667 - DNA, 1527 bp, Homo sapiens
gccgctcagaacagtcacattcagcttcatcccgacaggcactcgaaactatggcagaggggcaggcatcctcactctgccacctaggtgctgtgggcattaaccttggctctgagcctcctggcagccaaggcaagtggaaacatgatggctcactcagctgccatcatcatctgctcatgacaagtatgtgcatctctccagtgggctccggcctgacaggctggcgtaaggctcatggaggactcttggctcagagcagtggggaattcacccaaggccacatggcagagccagtaagatgcaagccaagatctgtgctgaccccaaagcctgtatccccacctccgcacaggcagctcttcccctctggtgactgcaagcccagccctacctggggatgccagacgaggcaaaggaactggatgtcagggcctggaagaccagaggaagctcgtgtctgccctacacagagcagagatgtgcctgaccaccatgccggcccacctccagggtccaacaaaaatgcttgagattgaccccccaacacacactcaaaaaaaactttgttggctcccaaaatgtggggaaaaaaaccttcaaaataacgtttaatgaaatatctacaaaatgtaacatatcacccaatggcaactcaatccttctatggctctggatatattttatttcatccatcactgccatcccaccggctgtggggtgatgttctaggtctttcccgctcactctcaccctaccttcccattactcttccagcattccctcctgccatactctcctcccccaccccaccaccaaggcaccaattatacctaccttccaccttcatccctaaaacacaccctgctctgcatcctgccccaggcccattcacaacattctcacccattttattctgggctaaatctgacctttctttaggtttcatttctttccttgggaaaatcttccttagttctcccaccccatgaaacctcctgtgtaagctcaatagacactctacatcttcacaacactgtgtacatcattgactatggaattatttgtaataatctactgacttcccctcataaactccaggagggcagaaaatacacacatctggcttgttgctgttctcatcccgagcacatagctcagtgcctgcagaagacaggcactcaggaaatgacgcaatgggcagcctgactcatggacagatttcacttcgattaaattccccaccgcctcctgcagatggatgggctaatgacaggtgtccaatatggagttgttgaattgaatcaaattctggataacaaatatgacacagaaaacaaggcaattcaattaaattcagctgacatttcagtagccagtttttatgagctccggctggttggtgaggtaaagttttaaataggctcttagaacaccagtgtcgaccatgacacctccccccagcagctgtctgcagaggacagaaaactttgcaaagctggctgtaattttttaactggtgccttc

SEQ ID NO: 477668 - DNA, 1171 bp, Homo sapiens
gaatacaaatctcatttgatggtgtcgcgtgggtctgtctgttgttgaagtggacagggtgcccttgcatgtggccagggaaggagtcagggcaggagccaccttcgtcgaggtactggagccgctggaggttgaaggggatgccgaccatcaggtccagctcctctttgagctcccgcacggtcatgtcgccgcggcagtttgccactcggaacatctcccccgtctcctccagccgcacccgcaggacgaagacgtcaggggccaagtcgggcaaggcactcgcggccttcgggtcacagacgagccgctggctccggccgcgggcacaggccaggggctgcgcggggagggcccgcgagtccgccgagcccaccctgggcccgccgcacccctgagccccggcccgcgcaccgctcctgcgtcccgcattggggtgcaggcgagaggcgcccccagttggccccgccgcccgcgctccgcccgcccccgccgccgcccgccgcatcccccaggcgcggccgcgcgtcatccgcggctcgagtgcggtggccacgcgtcatcgccgcccccgccctgacgccccaaggcgggcccatgcgccccccgccccactgtgacgcccaggccccgccaggaccgccccctccagacgcaaggcgaggcccctccctgcctgccgcccgagcctccagggagaccgatgggcgggcggccccccaaggtcccgcagtcctttcccgctccgcgatgaacaaagccgcagtttcacgcggccgcgggagacggttcttaaataatggaacaggacataagtgcttcccagagcaaccgggagatttattgataaatacagagacatcgccgggcagccacgctccgacaacccgcactgggcccccgtcccgagctcaggccacgtccccacctcctcgaagcctccaagctgctgttaatgtcagttcttttcaccaggcaaacggaaggggcattcttgctgctgttaggaaacgccgatctggtcccgacatgggggtggatcccagaagcgggagacagccttccacggaaacttgcaaaactgcaccaaaatctatcaattttgaaaatgctcttgaattcttggcggaagaaagatgctgataaacacattaagtggggaaatgctccc

SEQ ID NO: 477669 - DNA, 515 bp, Homo sapiens
cagaagagaacggctggcttctagtgaattaatgctttgcttaagatgaagaggaagcaagccaccttcctcacagggcagcagaaggagaagtgccaagcgaagggggaaaagccccttataaaaccatcagatcacaggagaattcactcagtatcacaggaacagcatgggggaaccacccccatgattcaattacgtgcatggtgcaagctgtccatgcatctaccattctggggtctggagaacagtggccctcttctcacagctctactaggtagtgcaccagtggggactctatgtgggggttctgacttcacatttcccctccacactgccctagcagaggttctccatgagagctccatccctgcagcaaacctctgcctggatgcccagatggagaggctgagtggagagctagaggacgaaagcatcctttactactgaccatgtgcactgtgttagtgttttgggtcaccagatgctcttcactgcacctgtcagcctttatt

SEQ ID NO: 477670 - DNA, 614 bp, Homo sapiens
gttgtttttggagcagattccccatgctccctgccagcagccagcagtgggaggacgatggggtccctacaagagcacagtattgccagggaggcctctgggacgagttggagcttggaggattattccagtttcgtcattttctcaacctggagggcaagtctcaccccggcaggaagagcaccataggcatgcatgtagcacaaactcaagggcccagaatgtactcccgaatccctacgagctccctgctggggaaagaaaattccagaacaaaactcaggattcatttgtggccctctgctgagaagggggtcttccaactcaaatatgagaacggttttcagaaagtctttcaaaagcagaaccgtccccatttcaggtgtgggattgaaggccccagtaattacctgggaccctcaggccacgtgactctcatctgtctcacaaaggtgtcttggtccaccaaccggttcctaacctccttgagtggacataacatctggtcaagagaaacttacttctctgtgatttaaaaaaataaataaataaataaacgagtcttatcgtccctccatgttctttttttctactagagaatgccagccttccac

SEQ ID NO: 477671 - DNA, 829 bp, Homo sapiens
ggtttcattacctaggcctgattgattaaatcattggccattggtgactgaactcaagccagaggtcaggctgctcccccctctctctcgacacctctttaaccatgtcttgcagaatcctaccggagagcctcttgtcctcagctcttttccccagttctacctcccagagggtctggagagctggcccagtgtgtagagatcctctggggtggtggggaggcaatcgggtgcaatgagcctgcagaagaagcttttccagagctgttgtaagacttctgcaggccctgggcgcagtcattttcagaggtttcaggccacggcacggcgatgccatgaaaacgcggatgcatcccatgctagggtggcttggatttggaggaggtcactggacgtccgtgcggatggcccggggccctggcgtgtgtcctcctctcatctgcacctggtccttgccccagcagctgagtgtgttgttggggaaggaaatgagaacaaggagtgccctcctggggatgccgtgagggtggcgcagcatctgctttgcactgggcccatgtcgctcctttgccaggtatgtgagctggctcagccctgtggggagcagacacttgggcatgtgcttggagacatggcttttgacactcgccgtcctttactgagctctgcgcactggccctgggctgtgcactcagctcgccttgtcccactgaacctcaccacattcccctggggaagggacggtcgctgactcccttctgcagatgtgggaactggggaaagtagtaaaattcaggaggaagtgggcgaggctgacttggactttgga

SEQ ID NO: 477672 - DNA, 834 bp, Homo sapiens
tgctgttccacctctctgtttattttctgagcatctccaagagcctgggacaccaggacagggcatggcgggaggagatgtttgtgtttctccaaagagagcttaccgtcttgtgagggatgcccctacctgctcagagagctgctggctggcccagaatgggcgctggatgctgcagatgcagttgtcaacacagatgtccgtcatcaacgcctgcctgccctggaagcgaggtagtggtgtggcctcagccttccaaccccaaaccagatatgccttttcccctgagctgacagtgggaaagttggctcggacccagaggatggagtcccgtctgtgtgaacacagcaagcagagatacctgcggccctggaggcagcttggtccaggaagcagaagcctgggctacacatggctattggctgccaccaagtttgctgtcctggcgacacaagcctggagctcttgtggcccctgtggcctcctgagcagagctgggctgggaatgaggcctcagagagggcactggagccgggaggtggagagacaggggtctgatgatattcagcagccagatccagatgtgaagcccagcctctcctccgggactttccggttacatgagccaacagatttgcctgcttcgagttgagtttctgtcacttgcaacctaatgagtcctgactatggcagttacttaacctctctgagcctcagtttctgagtctataaaatgggaataaaagtggtactttatatggttgttcttacatacgatgctctgaggatgtagtttgtgagaaggcagtgggaatgcagtaagtttaatcaagg

SEQ ID NO: 477673 - DNA, 1896 bp, Homo sapiens
tgggcctattgaggaccccctgccctgcccccagaggagacgccagtgtttctgcagtgccatcaccaggcccagaacaagggcgtcctcagcttcccagaagaggccagtaagtgtcaggaaagaacgtccctccccctgaatgtgaactagccggagagagaacagggccggtggcgcacagcccctggcagatcatccgaaacctgacgtctgctgagggggaacaactttgccctgggcacctgggaaaaatgagagcatagcctgccacctggcactgtgaccgtcagacacggtggacaccgagcaaaaataagggtcccgggaacagctggggctgtgcaactccaccaccatctggaagtagcgagccatgggccctgcggagtgggaggagcagcagggagctttcgagtctcgtccatcttctgagcgaggcctcctttgcacttcaattctgagaacattttctaaaagcacctcccgtgcgaggtactgttgtgagggttttgcgtgtattcacctatggaatccccgtgaacacctttccagcccccacactcatctctccacctgggcagagaccatcctgttgaatgctcgagagatcccttgtaagaaggctgcatgcacagcacacggtgttgggacctcttggttccccgaattaaatgatttgggagaactttccaaagcagcagtcagagaaaaccccaccctaccgattcggtacaggactcggtcagaagcttccagatgctggagctctcatgaccgtgccagggacctctttcaagaaggaggaatggcaccgaggagcccagcagggcgtctagctgcttcgcagaatgagattgaatctcttcctgcaacgcagttcacctgcagcctgggaaagtgttctagtgccatcttgagctgctttgtggaagggacccgaatgatccagaaactgctggaccttgtttgcaaggctgtcacccaaggcatcaagctgctgtctgtctccaggtttccagacccttggcatctactcccctttgaattctcaggtgaccttattgaccccacatcaagtgggaatgcgctgagacctttggaggtggccgtttgagagaagccagccacgctcacctccctcctcccaccctccctgaggccctggaggcacgactcactctagcaaaggagcattaggttgtgattagccttgtggtgagtccacctgggtctttctggaaggttgctgtccttcctgcttgggctatgtatccaggatccttggaagaaactgttctggtcagctgtgaggaaagggacatatcctaggctttttctgctcgtggtcacccccagacagccccagcttcttcaagaagccttcagagcagcgagaaatcatgcaggaaaacacctcctcccagctgttgggaagcccggcattctatacgaggatttgtttcattttttggatgttggtagaaatacgtaaaacgatgctcgtaaaaggctgggaagacggctggactgcacagccggccgggaccgcaatgaaattaaaaataaacaaggacaaatggtgggaaattattgcaaaaatattttctccgaattgaggagggcagtagggagatgagaagaagtaacttattggaggttggggaaagggcaggacttgctttaataaacatcttacaagaaagccaaggagcgtctttcttggatccataacaagtcgtgcactcaacatgctccaggaatacggcctagtggaattaacgaaggaatctgcgtcctgtcaacatgtggtagcaggcactaacgagctcacaccctaaaacgaagcagatggggctttgttggaagaaaaagccttacattaggtttcagagg

SEQ ID NO: 477674 - DNA, 772 bp, Homo sapiens
ggggccaacacatgatgcggctgggcccaaatacagaatctggctgccatatctggtttcccaattttgttcaaaattggtttcactcaatccccatggcatccctcaaaatgcctgctgactatttgaccggactacctcttgcagggttggaaagtacttctgcctgcaattttccaagccttgagcatgttaatcagttgctccagatctgctggttgaattttaggccaccagcacagagcacaatggctggactcaggtgtcagatgcccaaagaggggcaggggctgcgagaacctggcgtggatatcaccttgatctgtcacgctgatgacatgatcttgatcaggccagaaaagcaaaaggtggtggctgacatgctgcggcccttggaaagccacacacgcacacgcttcagagggttggagataaaccttatgaacatacaggggcctgttacatccctaaaacttttacgggtccggaaaaatgcacacgtgcaagtggaaatgatctctgtgttcatgtgcgtctgtgaatacgtgcctgtgcctgtgtgtgcccgtgcatgtgtgtctgtggtgtggtgacactgtggtcctggggagccctgcacatcaaagggccactggaggagtggttcgctttgcctttgaagagactttctgcctcttgaatgcaaacacagcctatccacctttcctccaactttaataatagttttgtgaaagccccagggactctttgccttgcctaaccttcaaaccag

SEQ ID NO: 477675 - DNA, 1319 bp, Homo sapiens
tcttgaacccccaagaacccagtgctccccaattgctgtgtccctcgacacagagagggtgagggatcatgacctgggaggtgcttgtggtatggggggatcgttgtgcacccctgctcacccaccagcctgggcagctgcagggacaccaggcctttggaggggactgccgtctccgaattcagcacgcgggtcgtggaggcctgctgtggatgatgatggctgcctctggcgttggaggcctgctgagttcctgcactgatcctgacctcctgctccacccacacagcagccctgtgtcccgtggtgcccaagaggggaccgagctcccacaccaaggcgctgcgctgggtggcagtgtcacggagaggtctttgggggcgatgtgcgaaggaacagtgttcagctttgtctcagcactaagagaaagggagatgatgaaaactagcccctggttacactgcgtgctcgccaagccccagggctgtcctcacactcgcttctcaacttggggtgattctgcccccctaggggacaactggcagcgtctggagacatttttggttatcacacaaggtgggcgcgcccctggcatctatcgagtggagatggggtgctgtgagacaccctgcagtgcacgaggtgacccccaccacagagggtcaccagcccaccctggcaatattgtcgaggctgaggagctcttcctgtggctgctgaaacgaccacacattgggtgcttgaaagcagcagagaagtactctcccttctagaaatctgaaatcaaggtctgaaatcaagatcttaacttcatcccatctgcaaagttgctttttacctgtaagttcacatttacagtttccagagattagggcatgaatatcttttggtggggggtattgttattcagccaaccacacatatattgacaaaatccccacagcactctataaggatgactgtgcttttatatttgttaagataatgtaaaacttctcattgatatgaatttttaaaaatatgtgacttgttgggaattttcctccggagtgctgtgcacactgtcttggatctgaaggtgggttagtttgccggagctgctgtaacaaagcaccatgaatgaggtggcatagaacagtggaaatccatggtcccacagtgccagaagctggcagtgtagaatcaaggtgtcggcatagttggcaccttccgaagcctcgaggaaggatccgttccagcttctccagcatctggtgtccccaggtgtcccctggcttgtggcagccatccccatgttcccatggcattctctctggatc

SEQ ID NO: 477676 - DNA, 628 bp, Homo sapiens
cagacatgaaaccatagatccaagaagctcagagagcaccagagctctccaacattgagacacaatcccactgagaatgcgggaggctagtgaggatgctgcaaaggaagaggagggcagccccctgtatggtgcaatccaacatctatccacggtcctttacttcacccttagaaatggaagttttcttctcaactgtatggatgtggatttgggtattgggaagaacagtggtgttccaattattttcctactacaagtgaggagagcccaaggttcatccgtggcctcacaggtggccagcacccagccaagggccctggtggtgacagcccagtcagaggtactgggactcagggacccacaagagggcctgggactggagctggcaggccacgcagcagcctcacacctgggaccccttcctgcccagattcttgtttcaccctctgtgccttccctgtctcacccactgcaaatctctgttctgctgctgaaattcagggaccatggtgaggctctgaagccttttctgtgcaggaaggagtttgagtgagtgtgtaacgacggcaatttgattaatgtatgatcatctgtttgtagcagtctgttctctgccaggtgcttc

SEQ ID NO: 477677 - DNA, 814 bp, Homo sapiens
gaagcagtgggaaacaaagatggaatttcttaaagttcttgtttcatcttttaaggtcatgagagtgttgcgctcagccctctttgtattcatatttaaacaacccaggtatgtacccagaggcagaactgccggaggctatggtaattctatttctggttattttgaggatgcatcatttttcatagcgatggcaccattttacgttcccaccaacagtgcacaagggttccaatttctccatgtcctcatcagcacttattttgtcctgtcttgtttttatgatagccatcctaatggatgtgagctgctgctggagatgctggttcccccacagcatcctggggtctgtgatggacaagtgctgagtggcagctgtggtggttcctgtccctggactgcagcacaggtgctagagcccttccagtacttctgtgagcacctaagcccctgtagtaactcccattctgtgcagaactgggacatggtttctatttcttgcaagtgaatcttgcctgacactgtcgattctgtgtgggatgaacacttttggaagtggagaggacttgattgtgtagggtcaccagataaaacacagggcacccagtgaaatctgaactttaggtacctaataaataacttttcagtatatatcctatgcaaatatttggactgacttatactaaaaaatgttcattctttatctgaacttcaaatttaactgggcgccctatatttttatttgctacatctggaagcttcatcatgttatgagtcctggggggccaatgccacacccccgtcctctctttcc

SEQ ID NO: 477678 - DNA, 1479 bp, Homo sapiens
caccaacaccactatgatcatcatcaccatcatcaccactatcaccaccaccatcacaatcaccatcgtcatcatcaccatcactgccatgatcatcatcgtcatcaccactatcaccaccaccatcacaatcaccatcgtcatcatcactgtcaccaccatgatcattatcaccgtcaccaccactatcaccaccatcatcacaatcaccatgatcatcatcaccaccatcatcacaatcaccaccatcatcatcaccaccatcatcatcaccaccatcatcacaatcaccaccatcatcacaatcatcaccatcatcacaatcaccatcatcatcacaatcaccaccatcatcaccaccatcatcacaatcatcaccatcacaaccaccaccatcatcacaatcaccaccatcatcacaatcaccaccatcatcatcaccatcatcaccatcatcatcaccaccaccatcaccatcatcatcacaatcatcaccaccatcatcatcaccatcatcatcaccatcatcatcaccatcatcatcaccatcatcaccaccatcatcataaccaccaccatcaccaccatcatcacaatcatcatcatcaccatcatcatcaccatcatcatcaccaccatcatcatcaccaccatcatcacaatcatcacaaccatcatcatcaccaccatcatcatcaccatcatcatcacaatcatcacgaccatcatcatcaccatcatcatcacgaccatcatcatcaccatcaacatcacaatcatcaccaccatcatcacaaccatgatcatcaccatcatcatggcagctcacatttacatggaaattactatgtggtgggcattggcactgttccaggactttaaacataactgactcatttaatcctccctccaactctagaaaaggtattattattattcccattgtatagatgaggagactgaggttttgtggcataaaatgaagttggccaaggacacttggctaataaatactagggaccaagaccacacgtgggcagttaggccccagctccatgctattggccactcttctcatcccttcagtctcattcaataaccaacaaaatgctgtgtcctaggaactggataccttgcagggtctattaaaagatatgagctgaattcctgtctttaaggtgggcaccttataaattcagaaggaaaaccgtcacattggaaaagttaggtatggggggggtagcccacccccatgccacatgaatgaaacagtccctcatgtcatggttcagcatctttgcattgttcatgcctcattcctgcattcattcagccaactggcagttaccgagggcctctggtccaggcagtgttgatgcagtgcaggggacaacaggcaaggctgccccctcatgatgggcaagttgtggttgggggaagcagaacccactggcagatacaatcaggccagactgtaac

SEQ ID NO: 477679 - DNA, 1444 bp, Homo sapiens
gcattatttagctgcctacagatgctcccagagaggccatctctctggtagcatgtgtgttttgggatgtggggccacctgcagtttgctatggctgggacaaccccgaggcctcatccagccctgcaggcctgggatcctgcgccagggaccctgcgccagggacatcggtcacctccacaacaccagtctcagcaaaacccttggtcccagctcctgaagacctatgttcttgctgcttcctcccacaccccaggccaagccacactcttccaagcctccagcatgaagagtgccgacccttccctccggggccagctctccacacccacggggtctccgcatctcaccacggtccaccggcctcttcccccaagccgcgtcattgaggagctgcacagggcgctggccacgaagcaccgccaggacagttttcaaggaagagaaagtaaagggtctccaaagaagcggctggatgtccgtctgtcgagaacgtccagcgtggagcggggcaaggagagggaggaggcttggagctttgacggggcattggagaacaagcgaactgccgctaaggaatctgaggagaacaaggagaacctgatcataaattctgaactcaaagacgacttgcttttgtatcaggacgaggaggcgctgaacgactccattatttctgtgcctgtggccccaccccatgtggcctgcctccctctcccggctcgcctctcccttggacccagcccatgggcctctttgatggtcctcacaccccaaccacagcccctgagactcttgctgtccctggaggtgtgcaaggctccaccgcgtttaaaacatcgctcagtgcaggaagccacctggccgctgtgtggcaacacttggccccttcttctcacccaaccttatttcccctacggcagcgtccctgacgccaataccattggctttgcccatgcagcctctctaccagcacatgggctccgcgagaccaagtcttcgcctctgtagttcttactgtgcgcacagctcacgagtgctaagtgcaaaataaatatcagttacatgaatgagccagaatgggccaatgggggattagagaagccagtgcctgtaaagtactaacaggtgccaggtccagggagccctcatccctggactgtttctcccatggcgtggctcagacctgagcctcttgttatttgttctcgaaacccagtgtctgtaagtgaacacggattttgagctggggtctgagagtgggggaaggtagcactcattgtagaaactcattctggaaactgctgtcgtgaacgtggcccaggcccaccgctgtctgcaccgtgcaatgtgttacatggggtgtcatctgcaagccctgggtgaggccccctttcctccatgggccttttgtgggccaaggtcaggattcctgtctgaccct

SEQ ID NO: 477680 - DNA, 779 bp, Homo sapiens
ccaggttgctcagagattcagtcttgaatgaagagcttcagccactgttgggcctggacacttgtgttcagactacatccagtaaggaggcagaatgaggaccagcgccctctgggcgacctctacacagctgtcagtcttcatgctgttatctctgggtttgctactggatggatggtccacgacataaaagaactgaagcttttcacaaacctgctgtcacagaactgctcaaatgggtccaaagaaaactggaacctgcagaatgcctttccatcatgttcttggacaaaatataaagcacagagagctttgacagttgctctgaaattgctctcagagtgcttggagatggtagaagacacaagaaaatcagcagaaagctttccggattgagcctttgatctcagcagggctcagatcaaggtccaccacgcgtacaacgccttggtttaaccagcgcctgaaggattaacacagaacaaaagctcaaagcacactacctgcgtaatttctaaatgaacacatttgctgctgtctctgtatgttgcagggtttacactgaggttcattacttctctgccttactatagacggaatatttatgcatttttcagcacaggctacttctcctcttgcataataattcagtagaaaaacggggcagaggaaaaaaaacgagaaaaaaaatctggttagtttttatgttttgttttgaatagatttttaagaattagcaaatttagcagctggacctagaggagaaggtgggccctttc

SEQ ID NO: 477681 - DNA, 1496 bp, Homo sapiens
aaatgcttcactcaactgatttaaccctccaacagctgcataaggagttggtggtgttgactgggagtgaattgacggaagggaccatgggaatttatatatcattttgaaacttatgaaaccttttgtcaaagtttcactttctgactcaggctcagtccaggacattgttcaattcccctggtgcatcaatcagtgcatgtgggtgtgcatggcttctgtttggaaaggacatcgtcatggctccacaatccaagatcccccgaagcagatgatctttctcctgacttgtggtcaaaaggtcaatagcagcctaacagtgactcacaatgcctacaccactcacctcacctcatctcatcacctgggggcttcatcgtctcacatcagcacaagaagaaggcagcaatattgccccaggggcattcagcaaggtctggacaaattttgggttgttgcaactgaggggaggaaggtaggtgtttctggcatctaggaggtaggggccagaggtgctgccacacatcgcaccatgcccagggcagatcccatacaaagcattatccttcccaaagtgtcaactgttgggaaaccgtgatgtgaagggatgttcatcacagcaatgtgacagtagagtgaaaaactgaaaatggcctaaatgcccaaccgtagatggtgtgagtgttaatacagggtgtcaacttgagtggattgaaggatacaaagtattgatactgggtctgtgggggtgttgctgaaggagattaacatttgagtcattgggatgggaaaggcacacccacccttaatctgggtgggtacaatctaatcagctgccagcgtagctagaatataagcagcatagctagaatataagcagcatagctagaatataatcatctgagatggtatctcagactcctttttcacatttttctgcctgcttatattctagctatgctggcagctgattagattgtacccacccagatgtaaatgacgagttaatgggtgcagcacaccaacatggcacatatatacatgtgtaacaaacctgcacattgtgcacatgtaccctagaatttaaagtataataaaaaaaaaacaaaaaaaaaaacagaaaaaggagtctggcctaacctcccagcctacatctttctcctgtgctggatgcttcctgccctcgaacatcagactctaagttcttcagttttggaactcagactggctctccttgctccgcagcctgcagatggcctattgtgagaccttgtgatggtgtgagttaatacttaataaactcatatatatatatatatatatatatatatatatatatatatatatatatatatgtgagtgtatatatatgagtatatatatgagtgtatatatatgagtatacatatatatattccatcagttctgtccctctacagaactctaactaatacagatggtttaatgtgttttgtttttgttttttaaagacaaga

SEQ ID NO: 477682 - DNA, 1949 bp, Homo sapiens
aacgagttccccaacccaggtgatcgggttttgagactggtgctctcatgtcctggctgttcctgaagctcacccgcttgacacgactttttcacccctctgacagcagatgccatccaggggctgtggaaggaactggtcattctaagcaactggaagaaaaacatttctacaacaaagaagcatttgagcgtgaaaaaccttttgagtcccagtttccgctctgccttggaagcaccgtgatttggagggggcccaacagctattgtgatcatatgggagcctttggaaggcaaggtgcaggtaggggtgggtgtgcacaggcacacatgccacagccacagccactgtatccggcgctgcagcgtcagttacccaagccatctagccctttctggcttctgcctcacgtttactgtgtatatcaatgtggtcattttgagaatgttacagaaactgaatcatctactgttacactgagtcaggccctcgtggcctctccatgcagcactacagcagggtcctggctggtcagcaactagaggtcccagatgcatggattttaaatgaatattgcagcattttctaggatatctctgagacatgataccgatcgtgggaatcttctgttaaaggatgtctctgagacatgataccgatcgtgggaatctgctgttaaacgatgtctctgagacatgataccgatcgtgggactcttctgttaaacgatgtctctgagacatgataccgatcgtgggactcttctgttaaacgatgtctctgagacatgataccgatcgtgggactcttctgttaaacgatgtctctgagacatgataccgatcgtgggactcttctgttaaacgatgtctctgagacatgataccgatcgtgggactcttctgttaaacgatgtctctgagacatgataccgatcgtgggactcttctgttaaacgatgtctctgagacatgataccgatcgtgggactcttctgttaaacgatgtctctgagacatgataccgatcgtgggactcttctgttaaacgatgtctctgagacatgataccgatcgtgggaatcttctgttaaacgatgtctctgagacatgataccgatcgtgggactcttctgttaaacgatgtctctgagacatgataccgatcgtgggactcttctgttaaacgatgtctctgagacatgataccgatcgtgggaatcttctgttaaacgatgtctctgagacatgataccgatcgtgggactcttctgttaaacgatgtctctgagacatgataccgatcgtgggactcttctgttaaacgatgtctctgagacatgataccgatcgtgggactcttctgttaaacgatgtctctgagacatgataccgatcgtgggactcttctgttaaacgatgtctctgagacatgataccgatcgtgggaatcttctgttaaacgatgtctctgagacatgataccgatcgtgggaatcttctgttaaacgatgtctctgagacatgataccgatcgtgggactcttctgttaaacgatgtctctgagacatgatactgatcgtgggaatcttctgttaaacgatgtctctgagacatgataccgatcgtgggaatcttctgttaaacgatgtctctgagacatgataccgatcgtgggaatcttctgttaaacgatgtctctgagacatgataccgatcgtgggactcttctgttaaaggatgtctctgagacatgatactgatcatgggactcttctgttaaacgatgtctctgagacatgataccgatcgtgggaatcttctgttaaacgatgtctctgagacatgatactgatcgtgggaatcttctgttaaaggatgtctctgatacatgatactgatcgtgggaatcttctgttaaaggatgtctctgagacatgatactgatc

SEQ ID NO: 477683 - DNA, 550 bp, Homo sapiens
ggcggtgatggaagagatgccaggatgatgcagggagcatctttgcatagtcccttttgcacacaggtggaggtaattgaaacacggcggcagtttccccaatgctgttctcgtgacaaaattactcagtttggggcagttctttatagcagtgtgagaatagacttatatggtgaggtagccacagatgccaacaacaactggctgcagatgtcagcctggtcttgcctcgggctggatgtgaaaacaaagaagcccattgcatttacaaatattatgaccagtaagatggtgcaatgtgaagactcttccctgtccctactaagcaccaaagtattgataacacacatatctcagctcaacttgtcaaagttgctggttttcccacagcttctcatctcagtaattgtttgcaaagagttgtttagaagtataaagcaatgctgatattcataatatttctactttttagggctttatctagttaatttcttcttaaaaatagaatcaaccttgaaacgttgattaattttttttttcagaaaatgtt

SEQ ID NO: 477684 - DNA, 683 bp, Homo sapiens
aatttgcagggatgcccacctggtcctattgcaatcccacagcatggcatcacaggttagaacatggcctaggccttgccagtgcagaaagcagccgccctttcttccgactcaccagattatgaggaagaggcaatgtaccctcatgaaaataatactgacccaagaatctgtggaagtcttgccccccttgtgggaccccatgttccacgtcagacagaactgggttcagatatcagccaagccaacaaagacgtacattgaatatctgctcagtgcccagcactacagggtgaggttaaaggggaccagaagctgtggctgttgcctgcagaatttcactctctttggagaagcagaagtgacaaatagactacagatgacgccaagcctttcgaggagcccttgggttctgaaccacggacttctttgtatcttttctgtttccaacatccccactgggcacactgagcagtgggacttgaggctgttctggaagatcagtggcctgcctttcgctcaatcataatgcaacatttggtttggaattcacaccaacgacaacccacaaacatcgtaattcctgcaagaagtgaacaggctctcctataaagttcagaatataagtatacaaaatcttatataaatgaaaatataaataactaaaaaacaatggtgtgatt

SEQ ID NO: 477685 - DNA, 704 bp, Homo sapiens
tggagaaaggttgagtctgtctctggagcccccaaacactgcagaagaagcctcttctcacagcaaccatagcatgggaacgtgtggatcacatttaacccagcatgtctctgagtcttacccaaggctcacagagaaaacattaaggttagtgaacaatgctcggacttccataaaaggcagagacaaaggttctgagggtacctctgctcctgaatttatgtcagagacgcctgtgagaacactgagaacaatgaagggctcatggaggtcaaaggtacttggagtttgtgaggttcccatgatcctgtgtaaagcaggatgcgagttcattcccagtaaaccaagcctgaaggcattctgtgccctgtgtctccctgccaagacaagagagctgaagccacgtggtggtatgggtgggctgctggccatggctgaaccagttgtcatcagtgccatggtcttcatcattgtcttcgaagcagtcgttcatgtaaccaactctacatcagatactctagtgttttgcaaaatgcttgggctcgaaagcccaactcctggttagagtcctgcctttgtcacctgctgactatgtgacctcaggcaagctacttaccctctctgtgcagcaatgcactcatctgcaaaatgggcaaagtaatagtaagtacttaattgggctgctatgatggaataaatgatac

SEQ ID NO: 477686 - DNA, 624 bp, Homo sapiens
acctacacagcagctctccttctgcaatccttcaacacaccgctgttttatcatcagtaacaaaatggcccctatgtggcctctcaccacaaacaacctccctctgagtgtctttctcaaaggcaaaggttggaagggcaagaacccacgtacttactacatcccctttttgcctctaaacattcatgaggacttttatttaaaagaatttggaattgaaggcaggtattcaacccaaaatgtgtgcatgaatgctcataataacactattcacaagacccaaaaggaaatcacttctcacaaaattggagaccgtgatcacattcacatggaaggggccttttggatctgcatccatctaggtcgtgctactcacggcctgtgcgatacattttcatccatggtgaatatttcaaccagaaccacacttcaaacctggacacacaacggcaagctggcctacatgcagaattccaagacagaagagaatggatttaactgtggcagcatggtggaaatcatccataaagcagtgccagctcccaaactcctggagattctggttgcctggatgaccatccccaaggaaaatgggaaatgcatagcccatggatcagggtgata

SEQ ID NO: 477687 - DNA, 577 bp, Homo sapiens
gcagtaagcagttctaaaccgtccagtcaggatgcaaacacagcatgttatgaggatgggccttgagtccggccaaggaacaagggtagctgaaaccagatttgaatcagaactggcccaagaacagccctgctggaggagcagccacactaaccacatccggccctggaccagtggggcactagacaccactacccactcatctccagaattgcaacccaaagatgcagagacagcattacctggtgatactgactctggccaggggaaaagagtcctgcaattgctcgtgtctggtcagaagacccgcttctgtggccaagcaagaagcagcatcctggttgacaaagtccaccaggactatgtggagtgggcaggggtcatttccgcaaacacaaaacaaggtgcagttaccataaaaaacaaacaaacaaacaacaacaacaacaacaacaaaaacagacagcaaagcaaactgaatagataaaaagcagagctatcatgggttatctaaactaagcctccttgtccatattatctggtggaccccaaatcatgcatcagatgtgcatcagac

SEQ ID NO: 477688 - DNA, 534 bp, Homo sapiens
tgagaactaagaaccggctcaacagagagagagctatctttccatatgaaagctctccgcctgcagaggctgtggctatggctgtccattgttctcgctccttggcttcagttcagagccatcaaatccctgcagctcgcacactggaacattcatattttggataagaaaatggaaaacccagagtgtgatctaccaggagctcctggtttcaaccagttccttgctgtacctgctgggcctgtgatacgaagaaacatcatggcttcaatggcagccttggaaatgaacttcattgaaagggaatttacactgaggtttatgattgctgctatgaaaagagtgcacatcctttccttcgaaacacaagaggttttggggttttttggattaagttgtagcagttccttatacaatttggatagcaactcctcatcagatagatggctcacaaatattttctcacaatctgtaacctgcctttaattttgttgattgtttcctttgttgtgaagaagcttttaagtttgatat

SEQ ID NO: 477689 - DNA, 673 bp, Homo sapiens
actcttattccacaaacagctgtaggatctgggtcctccaggatctgggtcctccaccatcatgcccacgttaatgataatgatttgaaaattacctgggctggaaatggccactgaagttttaacaactgttcaaaaaaaaccagaagtgaagaatgtcttcacgctcttgatagttattctggtttgtgatggccacaaaaggagaggaaacaggggccgtttcccgttctcccccttatccagacaattagtatcattgatgtgcacccaaaataatccctcttttgttcatttgttcactcctccatctgtcagtcttttatggaagtactatggtacacaaggaagtattccagattttttcaggcatacaaaggtgactcaggattgcactgaaaccctgttctcaggaagatcacactccagtgaagaagaagagaacatctgtctaaacaaacaccgtgcaaggggtgtgcccctggaggtctgccctcccacctaacttttatgactgacatcaaaatgaatttggtggaagccagtgtcaggccagtagtgctcttgattaggagagctttctacaagaagggaagaaaccccaacaccaaaaggaacagtttgagtgtccctgctctgatagcagttggaagtctggctgtgcacagtgatc

SEQ ID NO: 477690 - DNA, 555 bp, Homo sapiens
gagggtttgcctgaaaactgcggttatggatttgggggcgggaaaagagcccgtgggtgaaacgctgttctcaccacctcacatcagagtacaagatgtccagatggcaccctggacacactgttagttactgggttggtggggtctgtccagttgcttctcttttagaaagtttctatttatttatctctgaactcactgatgcctgccctggccatgctcaggctactgatgagcccaccaagggcattctttctctctgttacagtggttttgattccttgcatttacgtttttatagtgtctttgagtttttcgtggtttttatatctgtgggtgccagaggtgtcaagtttctgaaatgtcctcagttttgtctctactggtggcttggtcttccctttggacttgtgcttagaaagaatctgcatcttgcagctctttcagctgtaattctcttatatcggatgcctggtacttgtaggaagttgagaagcattctaaaatcttatgattaagcttttatgctgaaactagcttctgaagtccattgac

SEQ ID NO: 477691 - DNA, 1018 bp, Homo sapiens
gtgatgtgcacgggaggtgggctcctcttacttagccatttatttaaaaaaaatcatttttccctgtaatttctctgcataaaaacatcaggcacttgtgggtaacctggagccctctctgccaatccttgctttatgggctgcagtcaggagctcatttgctccagagaggagctgtgcctaagatgctgcgctagcaacctctgtattgtgaaggaactgcgtttcctggattccaaaacacaggagttggattcctgtccttgtgaagccatctcagggaacaggggacaaaacgacaccttcatagaccagtgctttggatttgccggtcaaaaaatcaccctctcctgtcctgcatccgcactgattgtagactctccctccaggctcagctcacagcccacccatctccctttcagccagggccctgcagtcagctacacactccatccatgccaggatgccctcacggctctattctctcacagtagccacccatcctcaggcctagggagccccctccaccatcatcctccaatcctggtcccacgtggtctgacgttgctgaagatagtgatgtagcagagccagctgccttcatggcatgttcatgctgcctgacccgagttcagaggccttgtcactgtcgtccacagctcttgcaaatatctccatttccactctgcagaagccacctctagcccaggcattctctgggtaggcccatgctgtcacctgcaaaagaaccacctgaaaatctcattggaaaactggttcctgggcctcaagctaaaaacaactctgttttggcatatctgaagtggagcccgagaatgtttatttctaacaagctcccgggaggagggtggtactgctgctagcctagactttgttgagaatagtatggatgcagaagggtctcgtgcctcctggactctaaagaccataagagccacctgaggactctatgaacatgcagactctgcttctgtgagcctggggtgagcacaagcat

SEQ ID NO: 477692 - DNA, 642 bp, Homo sapiens
acagcaggggctttcagacaggactgctcattagtttctggtcttccttgcttgattcagccagaaccaggaccatgccatatgcctatttcgggtctatgtcagcaaaagaacaaagcgatgtgtgctggggcactgcttcctgcaccgctgtatgacatgataattgctgacaagagaaatgatgatgctgctggtagtggtgatgatgtcaattgtgatgatgataaaaatggtgatgatgatggggatgataataatggtaatgaggatgatggtgatgatgaagttaatggtgatgatgatgaggaggctaataatgatgaggatggtgatgttactggtggtggtggtgatgatgataatggtgatgatgattctgtgatgatgatcatgagggtgatcacagtgatggtgatagtggatacatgtgcagaatgtgcaggtttgttacataggtatacatgtgccatggtggtttgctgcacctatcaacccgtcatctaggttttaagccccgcgtgcattaggtatttgtcctaatgccctccttccccttggcccccaccttcctacagaccctggtgtgtgatgttcccctccctgtgtccatgtgttctcattgttcacctcccacttctg

SEQ ID NO: 477693 - DNA, 736 bp, Homo sapiens
cattttacttttgttttattgtgactctagaaaagacaaatgcagaccccagggtcccatctcgccttagattcttctccccaaagaaagctctccctaggagtggcaggtgtttttgtttttgttcttagtaatttcttctagaagtctatgttagtccatgtctgtattcacctgtgcatatgtttcatttattccaaaggttcacactatacccacgatttggaacgtcagctgggagcttcccacaccagcatctcatttcattttcaagagtgtcattgagttcccgcgtgcccaccacagcaccgattcctctagccctttccagacaagctcttcagcactcttcagtgtcttcccaccatcaacagtgctgttgggagctcccctagtggactgttgcccatataaagcccttcaaggcgctgttatatcaaaggatttgtgtggacaagcttcagggatgcatctgggacaaggcttttgctggacctctcggtcctggggcctagagtcagtcacgacaaagaagaaagcctgcaacaattgggaaagtctttgcaggggagaaacaccatatgtgaagtccacctgcgacagcatagaagaagccctggccctgtcctgagacccttcagtctggtcaggcacacctcacagactggatgtgggacctgtggaagatgagaaggggttgccctttttccatgtctcctttggtcttcctctcttt

SEQ ID NO: 477694 - DNA, 759 bp, Homo sapiens
agtgagaagattttctccgcagcgcatatgatctgtaagagggagcccctgctgtctgacgactgtgagctaggacttgggtcattttctgactttgggactgaagtctccgtgcttctcgggtctagagcggacctgctcttggactggagcgaaaacatccactgccctgcgtctcagcttgcggactgtgggaagctggactttcaccctgctgctctgggaggcgggtgttggaagctgcacagacagtcccgccatggctggggtgagggcacctgcttgggtggcacacctggctctggtttccacatggaggagcccatcaggctttgtggaagcttgaaggtgccccaaggtcacctggaggccttgcccaagtacagactgctgggcctcacacccagtgtttctgatttagcagatctggggagaggcctgagagctggcccttctaacaagcccttaggtgacgctgatactgctggtctgcggatgctgatactgctggtctgtggatgctgttactgctggtctgaggatgctgatactgctggtctgaggatgctgacactgctggtctgaggaccacactttgagaagcactacattaattctgcctgtgctctgcggctgtgcaatttactaaaatactgggaatttatttctctcccagaggaatgagtggtttaaagtgtgtctccaggtgcaggctcctctgggggatacccttgattttcaaatgcaagacgtgcattt

SEQ ID NO: 477695 - DNA, 866 bp, Homo sapiens
cgggccttgccgcttggcagtggccatcggttacgtcgtcttcacagcccttcgtcactgctcatcacccacctaccttgtggcccaatatgcaacaacaggaggacctgctaataggagagaaggaggaaccaaaagctctggacttcggctaccacttcctggcccttcagcccagcaaatttgaaaacgtcttctctctcaatgaattagtttgccacctgtcctgccgagcatggaaactgttaaaggcaaatgagacaacgtatgtgaaacatctcgaacaactcacagaggctcctaatctcacattccacagctgtgctccccctgagcccaccgagaagagcccaaaagtgtcctgtgcccacttgacggggctctcaggggccctcagcagcaggtgcagagacatttattttcacagtagaagaaaccactttgtggctgatatttagacatagtagaaatggttgagcatttgtactcctcagcagtaggtcatagcattgaaacaaatgcttagatgtctcttttcaagtggaaaaaaaaaaccaaaacattcggagtatgtgtgtttttcttttctcatattagtgatatgggagcagaggctatcaaaatccctagtttacagattttaaaaactccaaaatcttaagctgagagttaaataactaacttgactagtgtattagtaaaggttctgaagagaaacagagccaatagaagatataaaaatgtagatgtatatgttttataaatataagctcctagatttacagtgaagttgtatcccaataaactcatttaagttggaaatattgtaagtccaaaatgcatttaatatacctaatctaccgaat

SEQ ID NO: 477696 - DNA, 1152 bp, Homo sapiens
gtctattgagaacagtgtgagggtagatgctcctctgtggcattcctgtctggtgattcccatctttggtctgaaaacaggatatgatggctggtgctccagcagccatcttagactatgagaaagatggaaacctttctctggtttcagttccagcaactttgaatgaaaaatccgtagttcacaacattctgagacatgtttattcctttattcatttgctcaccagctgtttcctggagatgtacttcgtggcagccatggttccagggctggagatacagacatgttcctgccctcctggagtagattccaatacactttttaatgatcacagtgtaagtgagaatgccagggaggcagattctagggtctctgtggatctctattctccaggctgtagggagaagtgtggccacaggtgtgtgaaaggcctttgtcaagcaaacctctatctcccagacagactctcagatccagggcccatgcggggctgcaagactggtgtgttcacctgtggagacatacctggagaccccagtgcagcagatccaggaggtggacacctgcagatgacaggtgtgttcccctgtggagacacacctggggaccccagtgcagcagatccaggaggtggacacctacagatgacaggtgtgttcccctgtggagacacacctggggaccccagtgcagcagatccaggaggtggacacctgcagatgacaggtgtgttcacctgtggagacatacctggggaccccagtgcagcagatccaggaggtggacacctgcagatgtgcatgtttccccaggtgctcctaagaaccgttgtttccctcactagaaaaggcatcccaaccacagttacaaagtgcagtagttttcactggagccccagtgacctagggtgcaattcatgtacgatttacacttcccatgcacttctaaaaggacttgagagaataatggagggcccaatgcaaggaaaactacaagggaacagaagccgtgggagggagacagaaggagcggatgcaggcggcacctgaactgaacagatgacagtgtttagggaacaaatgtgccccaagtttcctggcagctacagtacacatcgtttttgttttcagacacgagaaagcatttgtg

SEQ ID NO: 477697 - DNA, 718 bp, Homo sapiens
acacatgatgatatttccagatgtggaatttcaattaattagacagagggttctctggggaaaggcgctggcgatgacaggtctgggaaggtctgaaaagagcaggacatctaaggatggcaaggctgactgtcaaaaacatttcaacagtcaaggcttggcagctcgtgttaaaatacttctggaaagtggtttcttgatttgggaagagttcagggagcctggaataatccatattaggaagctggtatggtcaattattattcagtttaaggaaaagccccccaccagcaagcctgcagtaatgaaatacaacattttctcaacagaagagatgggtgtgccggccgatccatcctgtttcccttacatctgtggtagcatctggtggaccattctaaacacaccccaccttcaacatcgactgtagagaagggactgccgtccgtcattcccgagctttgccggggggggcaggggtggacttgtgtctcaggcttgccagaggtggaagtggatttgccacatgttccagggcccctgacccctgccctctgcccactgcccactgcccacagtggagtgtgtgtgctaaggacaaggcagataagccgatttgaaagtgggaaatcagatgggagtttttgtaattatccaattagcgtttcttcattcccagcaatgcgcatgtctaactccaaaattaaggcagggatgt

SEQ ID NO: 477698 - DNA, 881 bp, Homo sapiens
tgagaatccagtgcccaggacctctgcaaagcccaactacttcaccttcaagggcgggatgccagatctgctgtctgccttggcaagtcacatggatcgtgtttgttgttttgctttggcgttgtgtgcgtgtgaacgagaggacgtcctggccatgggtgagacaatggggagcactgatctgggactcagctgtaacccaaacatgggcagttaccagggctggaagcccagctgccgatgcaaaggccaagtatggccagcagaatcatgcacaacacagagatggcagcctcagaagagcccgcatctgtgtgatggggcagtggcagcagaccgcaggctggtgagcatctccatcggcccctgcctggctcctgctgccccagccactgtgtgcagcagtggagcagagctgggcctgtgctcaccagaagagggatctgcccccatggcagcatgccccaactatgcctctacccttaagatgccaggggcaaccaccctattatcgtatcagaaatagcggcgctgtcagccccattatcccgggaatgttgctgaggatgtggggatgggatctctcactcactgccgattagagagtatatccatggaacacttttagattattttttgtttgtttagattgattttttaaatttttgcagagcagttggcagtatcatttagaaatcagaatgcccattggcccaacaattccatttctaggaaatctatctacagaagtaataccaaaaacgagcagacacacgtatatggataatcatcatgaataatggaaaatgggaaaaaacctaaacatttatcaagaatgggctctgtcatttggggcatctctattatggcacattctgtac

SEQ ID NO: 477699 - DNA, 1174 bp, Homo sapiens
ggctgctctaggagggcttcgcctggactggtctcctccacgttgtctctcatcacccagcaagcctggaactgcccttgcacgcatggggtcctgttggagccctgactccttttggtggggaatggtttgtggaccccagcatcttgcccctttgtggaactctctcctcctggacttctatggctgggctctccccgtctccaccctgcacttgtctggtgtagatgcagatgtagatataggtgcagatgcaggtgcagatgtagatgcaggtgtaggtgcatgtacaggtgcaggtacaggggtaggtacaggaataggtgcaaatgtagatgtagatgtaaatgtagatggaggtgtaggtacaggtacaggtttagttgcaggtgcagatgcagatgtagatgtagatgcaggtgtaaatacaggtgcaggtgtaggtgtagatgcaggtgcaggtgtaggtgcaggtgtaggtgcagatgcaggtgcaggtgtaggtgcaggtgcaggtgtaggtgcaggtgtaggtgcaggtgcaggtgtaggtgcaggtgcaggtgtagatgcaggtgcaggtgtaggtgcaggtgtaggtgcaggtgtaggtgcaggtgtagatgcaggtgtaggtgcaggtgtaggtgcaggtgtagatgtagatgtagaggcaagtgcatgtgtaggtgcaggtgtagatgtagatgtaggtgcaggtgtagatgtagatgcaggtgcaggtgtagatgtagatgtaggtgcaggtctaggtacaagtgtatgcacaggtgtagatgcaggtacaggagtagacgtaggtgcgggtatagatgttggtacaggtgtaggtacaagcgtacacacaggtgtagatgcaggtgtaggtacaggtacaggtgtagattcaggtgtagatgtaggtgtaggtgcagggacaggtgtagattcaggtgtagatgtaggtgtaggtgcagggacaggtggagacgcagctgtagatgtagatttagatgcaggtgtaggtgcaggtacagatgtaggtgtgcagtttcaggtacaggtgcaggtgtggatgcagatacagtcatagcttagggaaaccatccctaaccatctcaggcagaatcagcactttgttcatatctctgaggtttgacatcttccttacata

SEQ ID NO: 477700 - DNA, 676 bp, Homo sapiens
gtgcaggagggcgaggccaagctctgacactgctccccaccctggctctgcctgcatgtggagaggcttcacacttatttttcagaggccaggaagctttataattattgaaattaagcagtgctttgaaagtgatgtcaaagttctggaggctgaaaaatccaagactgaggttccagccagcatggttccaggtcacagagccaccctcatgacctcatctaaccttgatttccttcccaagcccccatctctgaataccgtcatgctgggggcctggctaacaaggaggaaggaagaacacattcccaagggaaaagagacactgcgagaatcacagaccaaccggttgcgggaaaactgcggggagaaagaaatttacttgcaaaaaaatggtgaagggcaaataaagtattgagcttgtgcagcataaataaaaaggctttggttttatctctgggaagtaagaacaaaatagaaagttcccatctcaaaaagctcagacttgtgggaataaaacctctttcccttttgcattatagaacaacgccacaatttccagcatcgtccagagactgcaaaggactcacctgagattgcagggcccaaaatgatctcctcatctggggcctctttatagttcatgtatattcaatcagcagagctctggttctac

SEQ ID NO: 477701 - DNA, 1185 bp, Homo sapiens
gattggctgtcctctgtgggcacagggaagcatggggacctccagccaccccatagcctcaaacagctgcccagggcagcctctgagctccccggcatcaacggcatggtggaagcgagagtgggctttcttcccatgtctcacccaccagtggttaattggaagtgagagtgggctttcttcaaccaccagtggttaagtgagcaggctttggatacaagggtgatgtgaatggggctcatttggtggcactcagccaaggaatggtctggcctagaggctctggagaacttcaggctcatgcctgaccgcttatacagcagctcaggggcccagacaaaatggcccaagaggccccagtgtgagctgcatagcttctcggagcttgaaagcaagtggtacatcctgaacctggtgaatgggtatgtccttaaactggtgaatgggtatgtccttaaactggtgaatggagacgtccttaaactggtgaatggtgacatccttaaactggtgaatgggtacgtccttaaactggtgaatgggtacgtccttaaactggtgaatgggtacgtccttaaactggtgaatggggacgtccttaaactggtgaatggggacgtccttaaactggtgaatggggacgtccttaaactggtgaatggggacgtccttaaactggtgaatggggacgtccttaaactggtgaatggggacgtccttaaactggtgaatggggacgtccttaaactggtgaatggggacgtccttaaactggtgaatggggacgtccttaaactggtgaatggggacgtccttaaactggtgaatggggccgtccttaaactggtgaatggggccgtccttaaactggtgaatggggacgtccttaaactggtgaatggggacgtccttaaactggtgaatggggacgtccttaaactggtgaatgggtacgtccttaaactggtgaatgggtacgtccttaaactggtgaatgggtaaaaaaatcgtggggcatccatgcagtgggatattattcagtgataaaaatgagctgttgcaccagaaaaagacacagaggaaactcaaaatgcacgttgctaagtgaaagaagccagtctgaaaaggcttcatgctgtgtgattccaattccgtgacattctgaaaaaggcaaagctatggaga

SEQ ID NO: 477702 - DNA, 2115 bp, Homo sapiens
gaagcgggaacagtgtgtcatttagtgcctcgtcactgcaaactggctgctgtggttccagtcgttgcttctgagttcagagcagaagaaggtgcagatagtagcaccatctgcatttcttccctgtaccaggaagacaaacactttctcagaatccctgcagaagttttcattgactagtcctaggcacttagctcattcctatctccaaattaatgttaaagaagatggttttagagcaccactgtcacgtgcagacaggatcggacccagatgttcagggccacagccataagaccagcagtgaccaggcacacagtggttccttcattcagtcctacacatacctcagtggttccttcattcaatcttacacatatctcagtggctccttcattcaatcttacacatatctcagtggctccttcattcagtcctacacatacctcagtggctccttcattcagtcctacacataccccagtggctccttcattcagtcctacacataccccagtggctccttcattcagtcctacacatacctcagtggctccttcattcggtcctacacataccccagtggctccttcattcaatcttatacatacctcagtggttccttcattcaatcttacacatacagtggctccttcattcagtcctacacatatctcagtggttccttcattcaatcttacacatacctcagtggctccttcattcaatcttacacatatctcagtggctccttcattcagtcctacacataccccagtggctccttcattcatggctccttcattcagtcctacacataccccagtggctccttcattcagtcctacacataccccagtggcttcttcattcagtcctacacataccccagtggctccttcattcagtcctacacatacctcagtggctccttcattcagtcctacacataccccagtggctccttcattcagtcctacacatacctcagtggctccttcattcagtcctacacataccccagtggctccttcattcagtcctacacataccccagtggctccttcattcaatcttacacatgtctcagtggctccttcattcaatcttacacatacagtggctccttcattcatggctccttcattcaatcttacacataccccagtggctccttcattcagtcctacacgtacctcagtggttccttcattcaatcttacacataccccagtggctccttcattcagtcctacacatatctcagtggctccttcattcaatcttacacatatctcagtggttccttcattcaatcttacacatatctcattggctccttcattcagtcctacacggacttcagtggttccttcattcaatcttacacagacctcagtggctccttcattcagtcctacacatatctcagtggttccttcattcaatcttacacggacctcagtggctccttcactcaatcttacacggacctcagtggctccttcattcagtcttacatggaccttagtggttccttctttcagccttacatggacctcaatggttccttcattcagtcctacacatacctcgcaatcttacacagacctcagtatgaagtccccgacttccgcttccaggaaggtccaaggagaaacgcaggctgcagcccccgatagggtgcagagagatgctggtggggagtctggagagggatgaattgggtgagggcccttccttctctggacctcagtttccctgtgcaaagcagaggggtaagatgtccaactgtggtccaggaactccctgcctggggggtgcttgctaaactcgccagccccgtgggtcctatcccagacctactggagggtgccgacagtggcccacaaaggatccatccacgcagagcctccaaatgtaacattatttggagaaagggtctttgcagatgtaatcagtttcagaatctctagatgagatcatcctggattacctgggtgggccgtaaatccaaggacaactgtcttgacaagagacagagaagacacagacttggagggggaggccccgtgaagtcacaggcagagattggagcaatgcaaccacaagtcc

SEQ ID NO: 477703 - DNA, 772 bp, Homo sapiens
atctgctcctctctgccaggcagaaaattacattatttcctcattttgaaaggtgcttgttttgtcaggaagacatcccttcctttgggggagtactgtatgcaatttgggggagtaccgtgtgcagtttgggggaataccgtgtgcagtttgggggagcaccatgcgcagttggggggagcaccgtgcgcagtttgggggagcaccgtgcgcagtttgggagagtaccgtgcgcagtttggggggagtaccgtgaagcagtttgggggagtactgtgtgcagtttggggagtaccatgcacagtttgggggagtattgggggagtaccgtgtgcagtttgggggagtaccgtgcacagtttgggggagtatcatgtgcagtttggagtactgtgtgcagtttgggggagtaccatgcacagtttgggggagtaccctgcgcagtttgggggagtaccctgcgcagtttgggggagtaccatgcgcagtttgggagagtaccatgcgcagtttgggggagtaccatgcgcagtttgggagagtaccatgcgcagtttggggggagtaccgtgtgcagtttgggggagtaccgtgcgcagtttgggggcgtatcatgtgcagtttggagtactgtgtgcagttcgggacacctgactgtgcttttctgaaggatcctggattctgagtatcactgggggtggaagcaaacacttatctactgatttgctaacatattgcactgttaatctcaacttgccttctcccagtggaa

SEQ ID NO: 477704 - DNA, 1309 bp, Homo sapiens
ttcttgtgaggatgggcgagatggtgaatgtgtcaccagcctgggtcaaggagggcgatattagccatgagctgctgctggggtggccttcctgctgctggtccaggtgcctggcctggtgctggtcaaggccacgagtcctctgcaagagccagggcaggggtgggggacagcaaggggctcgaggcacagccgtatccacgccctgccccgtctggccctgctcttgccatttttttccagctcctctggctgcccctcttccccttctctgcctcatcctcaccctcctgcttctcctgggttcccagcaaggctgcagcagcaggacagggatccaggtgggcccccaactggtcatcttgtgatttggggggtgtctgctctctccggtgccagctctcctgaagtcctcttctctctgccttctcacctccagcgccattgcttaatttccctgtagctcttttcaggggagcagggaggaggaggtaggagctgggctgagatatgtggagcatcactgtgcatctgtgcccacccccaggcccgggacacggaggcaccagtgggaggagcccacggaagtccagtggggcaagctggaaagcgagccttcagcagcagcctggatcccaggaggtgccacaaccaaaaatgcctctagatgttgcccagtgtcccctgggagcagggaccccctttccaccatgcccgagacccccacggttctagacaaagggcacttctgggaagcgttttttccgtgtgaatttgtgggtgtccagccagccagcaagggtgaatttgcacgagtttcctcaagggacattgtgtttggaagacaccacgtggcctcatctcccttgggtacttgggtacctgatgtatgtgctgacaccttccatgtagacgtgcgtcaccagttcggcaatcagagcacattctggatgcttgggtttctaggttggggccacagggactgtggctatgcaggaacactgaagggggctctccctggagaggaggggcctctcatcttgccttctgggggccagaactctgatgtcaaagtgtcagagagccatgctccctccggaagcactcacagccatgcctgcaggggtcctggctcctaccccttgcagctgggggatgctgggcgagtcccgtaacctgccagtgcctcatgtccagagccaccagaggccctttccccatggggctatgtggatgtgagacaagatggaacacatcatgtacatctcacggtgcctgacgcacagccagccatctggaaagagtggac

SEQ ID NO: 477705 - DNA, 492 bp, Homo sapiens
gtgatagcgaataagtctcatgggatctgatgatttgataaaggggagtcccctgcacatgctcttttgcctgccaccatgtaagatgtgccttagctcctcctttgccttccaccatgaatgtaagaccttccaagccatgtggaactgcgagtccattaaacctctttcctttataaatgacccagtctcagctgaagttgaagagaccaatgtcccgtgccgaaccaggaaagcacaccccgccaaatgttatgagacaaagaaggcgagttggcgcttcgcaaacaccagcccccgccagcttattttgcctgataagcatatacatctcccgactaagctgaacaatggacttccagaggggaaagtaaacctgacaggcagtgaatcaacatttccttgtctaataagatgaaggcatcgtgaggagtgtcccaggtttctcattaggagcatgtgttgactcttggtagaatttgatcgtccatc

SEQ ID NO: 477706 - DNA, 1539 bp, Homo sapiens
ttaatattgaattcactataagagctcactgaagttggggataatggtaaccagctccttctcagccaggaactcgacctcggccacgtccatggcggcgcgagtggccagctcgggcctcacagtctccttgggcccttcagtgtcccggaggagctctggcccctcctcaggccgaatggatcagcttccccagaagaatctcctgcgactacaccctgctggctctgctggctgttccactggagtggagagctccagcatggatggcttttggatggaggtggaacagatccaacagagagatgagctgagggaagaggacagtggcgggaatgaaggccagcttccagaggaaggggaagctgaatcccagtggctgcaggacacaggcctgtcgggcctccttggtggcctgggcttggatggtgatcaccaggagctcctgtccaccctgacacagacccaggtggccgctgtgtgccgccggctggacatctatgctcgctcagtgcgaagacaacacaagacacctgtcagagatgtcagggatgtctttggggtcttcaattcagggaaaatgtcgtcagagaatggcgactccggtatgaagggggcccagctcagttccggggcctctaagtttcctccagcagcagagcctggggggctgcaggagcaggctgggagggaagaagccttcaacatggactctgcctactcagaacaagctgcggtgctcctgcagaggagcaggccatcccggggaggcacctctgcctggggcaagtgttccctgccgaagtttaccgtccccaaaggcagacttggcgtgacgaggataggagacttgtccctgcaggatatgaggaaggtaccttctctggccctcatagagctgaccgcgctctgtgacatcctcggcttggacctgaagaggagcaaggcggggaagtggaaagcggcagaaactcgcctctttggtgtgccccttgacagcctgctagaagctgaccacaaagtcctccccagcacacaggtcccgctggtccttcaagccctgctgtcctgtttggaaaagagaggactggacatggaaggcattctcagggtgcccggatcccaggccagggtcaaggggctggaacagaaactggagagagacttctatgctggcctttttagctgggacgaggttcatcacaatgacgcctctgatttgctcaaaaggttcatccggaagctgccgacacctttgctcacggctgagtacctcccggccttcgccgtggtgcctaacatccccaacctgaagcagcgcctgcaggttcttcacctgctcatcctcatcctcccagaacccaacagaaatgccttaaaggacttctcaaagcctttggtatattgaggctttagagaatctccaagtgggattagagtatgcagcactctccaaactcagttgatcacagacctcttttgttgtggaaagcattgcatggcactggtgttccatgcagaaccagtttgggaaacaga

SEQ ID NO: 477707 - DNA, 3095 bp, Homo sapiens
gacgctttcgttgtgtgcagacccctccctttgtacccatcttcaacggaggcagtgattggctggccagaactgtgggcggggcctttggggtccaatcctaggaggatctgggccattcattggcccctgtgggaggtgggcgaggtggagaaatgggacccccaaggagggaggtgagaagcaggacaagttgacaaattccgcaactacgaatgccctccacttccctagtgctggaggacagggctgagccctctggccattcattgatgctcccatgtcacactggtcatgcctcttggtggcccgaagtggcctgcccccaacaactgcaggtagccccaggacacagggagcaccagtctggcctagtgtcgcaaaggcctagtgccacaaagaccacagtgaggccaattggcacatgtggaccacacagaggggtgctctgcctgtagtggccaaggtagtagtggagcccaggccttggatgttccattaggaagtccctagagtgccctgcgggcatcccctggcttggcagcgtctcagtgtgggtccccagaagcaggcagtgagacaaggactccagtgaaagtcatttatgtgggaggcgaaggaaacagcagcaggggagtggagacatgagacaggcaagggaaggcgccaataagcagcgcatcatcaaaccagctaccgcatcacaccagctactgcatcacaccagctaccgcatcgcaccagctactgtgtgggtgactggagctgaatcccactggggaacccagggagaccatggagacacttctcagggcctaattcaagttgctcctctctgagaagctctctaagctgatttcagcttagagagcttctcccacctcccaagtcctccacctccgaagtcctccttagctcttggctctttggcatctgagagcactgggacaggggtgaatattccttagtctgccgcttggggcagggcagcccaggctcttgctccagggacggtggacgatgctgcctggtacctggctgtgggcagggctgctgagagggtgggagatgccttctattgagaactccccacccccatccccaaccactttgcattctggggcaggggagtgggagccacttgtcattgttcctgtacgttggctggcaggaggcccagggagggggctccccaatagaaaatctgcagctgcctgtctttaaggagtaccggtctagtgtagggatgaacacattaaatacggcccccggggtctcgcccactcaccccctgaatccccccaacaggctgccctcagcttttcagacactggacatgagtgttcttggtcttccaatgatgccaaagtcctgccgccctgcaaacagctcctctgcccaccaggacatcttgccttctccggacctgcttctccccggacctcgggggttgtgtggtcagtgctggctggtccctggtgaagctgtacttatgtgtctctgttgccccaggagttgccctcattctgcccatcttgtcctcactccaagcccgccccttcttaaagactccctctgagttcagtgccctaagtccggaaacattcaaagctggacccagggtagcgggatccggggcctctggggacccgagagggacgttaagttcagggcttcagggtgcagccctggggtcggtacccccagcctccaacccagagctggcagcgctcgcccccttctccgcgcgggccctcagctcagctccctcttcgctccccgtgtccccgcgagcgggagggaggggatgctaggacgccctgtcggcgtcgtcgccgctttccgccattgtttagtcgtgatgctctcattttctctgaatcaacaattttctgctcggctccgcgccgaccggcgaacgcggggcttttcctcgcccgcctgatgacagcagagcggcgcggagcagctggtccggaaggaagcgccaggcgcctgcccggtcccaggcgtccgctgccgcccacccacaccagaccccgcccccgcgcgtcaagccccgcccatccataccaagtcccgcccccacaccctcacccacacaccaggccgtccccaccccgcccccagagccccggggcgccccgcccgctagccgcgcacgcgcagtgagcacggcgacccccggtggtcgggtgtctccgcaggccgaacacgctgctcgcccagctgcggatcattaccgcccttttgttctccgtcgcgcgctcgccccacgctaggaatgcaaactgtaggcgccgccagcccccccttcctgtttccctgggtgggagtgggaagggagttttaaactgaattgtgctcagactcccagcccagtcttcccggagccatccgttccttcatccaatgcggacacccatatctaaggttcgggcaggatttccggggcaccctcaaacccagcccgtgggatccgggaaggcctcctggaggagagtccacgaggcacggagccgaggatggggttggggttaggtcttggagggcttcgaatttccggcaaagggtctgggatggttcttgaggacagcagggatttgcagggaggctgggggtggaggtgggcagaggtcttgctcacatttgtgttctacaaaggtccttttggcttttgggaggcggagactgagactggagtccagaggaccaaggaggacgaggtaactgccgtggtccaggtgggagaaaatgtcggagtattaaatggggttgtacaagtgcccctggtcctaggagaacctcttttaagttcctccacctgtcaagatgactactttgttacaagagctagaatctacaagaggccaggggtaacatccatcaggcaaggtgctggcagttttcatcctggctctaagtccttaggaaagtcatgtcacctctctgagccttacttttctcatgagatagaaaacctcacaagattgttaagaattacataaaaattaaatcctgtgtaaaatgagaaaataccttctgactagccacttcctgagggcatgggcatgtcaacttatcttcgtgtcctc

SEQ ID NO: 477708 - DNA, 947 bp, Homo sapiens
cagcctctctccagcactggattcttgagaaataaaaagaagccgtgggtcacagaagtgaaccgtggaacccagcgactagcgttcagctcaattaggacgaacccaggcacttagccatgcaggaacaatggcgagcctctagcccgatcaggagctctgttttcactctgctaaatcttgcaactgcacactctttctgtgacttcgcacgtggctatattacgctgtctggtgtacaaagaggggccaattctgacccagatcaaaaggtctggggaactccgcttccacccacgggaccagaatgtaagaaatgggattatttcaactgcgtgaattgttcccagacaccccagtgtcctcatcagaacaattctcagtggcagaattttcaggacatcagccttgtccaaaatgcaagttccaaggtgatggaggatgatacactcatcatcagaatccagggctcctgcgagccactgccaaatgattgggaaccctatttgcatttgagcaaatgttttggggcccagatgatagcaatggtgttggtaatggtggtgacagtaatgatggtgacagtgatgatgatcctatttgcagatgaactttgtggtttgaggcttgcaaagtcctgtcagctatatggctccacaactcattcctacaactgtcaaagacagcttgcgactgtgaggagcagggacagagagcttcaaagacagaagagcgtacattccaactcactcaacccccagatccaatcgcaggctttttcttgtgcactcccatttccacccccagccccacaacgagaactggctgttgagtatagtcactacaacaatcacaaaataattgctatcacgtattgggcatgcagcacctgttaagcatttcatatatgagatctcattgaattttctcaataattctatgaggcc

SEQ ID NO: 477709 - DNA, 644 bp, Homo sapiens
tgtcaggaatgatctggacagagggcatagggcatctttcctgagcatatttaggaggaatttgggtggccaagagaaaggatctgagcagaccacccaggaaattaagcttctcccaagaaaggagagggagcaatggtgcacaaatgtgaatatcatctatattgtggagaagatgttagagcaaaagagaaattgctaaagtattcaacagagaaatatcaaatgcccctaaataaaatgtatagattggaggaagaaattttcagtgtgtgcagaaacgatgatgatgatgatgaggatgaggatgatggaggtgatgatggtaaggacgatgatgatgaagatggggtggtgatgatgaaggtggacatggtgatgatgatggtgatgaagatggaaatggtggtggtaattatggcgatgaagatgttggtggctgtggtgatgatggtgctggagatggcgatggtgatggtgctgatggtgatgatcatggagatggtgatggtgttaatgatggtgctggagatgacagtggcaatgctgatgatggcaatggtgatggtgatgatgtctgacctttgttgagctcctactgggtaataggtactgtactccatggattatcttatttaagactt

SEQ ID NO: 477710 - DNA, 674 bp, Homo sapiens
tcctacaatttgcatttctaacgtgttcccaggtgatgtcaatgccactggtccagggaccacactttgtgaaccactgcccaccattggctgaggataaaagagatgctctctcctgggtccttaaatgcccccagaggcagagctatcttctggatttggctcctttcacattttgccaatgccaggagatggcctggctggaaccacctacttcaggaagtcttatcttttttgacccccaagatgtgctcggtgttgatgctagacgtgctcctcccattgatgatagtggcaacaacagtactgatccctttaacattattgaggtctattatgtgccaggatctgaactattgacaggttctaatttatttcgggcccacaaagcgggctcctcctctaaacaggcttccaatcagtcacgcttccctgggcctgccaagaagctccagtcgataaagaagcaggtagtatctcttcaaggacatcctaacctcagagaagttgaattaattgtttaagtgaccactatgattatacttcagactgttacgggctaaactgtgttccctcaaattcatgctttgaagctctagctctcagtaccttggaatgtgaccgtatttgaatatagggccattaaagaggtgattcagctacaacgaggtctt

SEQ ID NO: 477711 - DNA, 569 bp, Homo sapiens
gccacataccataagccctgtgaagaattttttggctttacccaacagaaagagttctaactttgccatgggtttagaaggtgaagagctagaaatatttgaaaaaaaaactcacaacatccacagtgatgaatacagtaacattctgcagtattgggcactggggacttcaacgtatgaattttgggggaatggaattcatcccatgcaggattcaagaccaacttcccggcatctgaagctctctgggaatagaggagaactgaaagggctttcgaaagagccatctgttagttttcataaagacattatgtgcttcccatcacagggtttttgctgtctctgtcatgtgtccgccctccctccgctgtctgagagagcaggagcgtggtgcctctccactttcctgtctgtgcatggctgctggaggtgggctgcagatgagtatttatctaaaagtgaagagatctgacttataagcaagcctgatattaaatgtataaataatgcatcctgtggcattatttataatgcaataacatccctataatgtaataaaagtatgcagg

SEQ ID NO: 477712 - DNA, 595 bp, Homo sapiens
agcagtagcttcctgcctcactctttctgctaaaaagtttcacccagactcgaaaattaatgtgtttctttcttgtccctattttcttctaaaaatctgatcgggcacttggaagaatatccaagctccccaccatgacctatgggcctgtgctgatctcggtctcttctccctgcccatcttcattttgttccatggcctctcatgttgcagatgtcaatctcaggtcctatttgaattattcccagttgcaaatcaggaaggtattaattggtgcatgttctgtaagtgctgttagaattagagctactgggctggctgacaggagtttagagggcagcccttttcctcctctgagcctgtctccccagccatcccttctaaaagttgctgggctgatgcttgtatcttggctggctctgatgccagctctgacggggccaccctggaacctgcttgcacaggctgtcgagggcgtgagaacccaagcagacaactcccagtcctacctcctttgctgtgccaggctgccagtgccagctgaggaggccccctcctgcctctgcttgtttcccttgattgttatgtaatgttc

SEQ ID NO: 477713 - DNA, 637 bp, Homo sapiens
ccttctccatgtgttcacaaacaaactcctttaataatccattccataacctccttttggatctacagcaaactactcacctagtggttcatggaagctatgttcctcctctgttgaaatttgggatgacatttttctcccatcttctaccactctcacctcttctccatcaattctgtcagttcgacaagtcaaacccaagagatgagaaaggagagctgctagatatgacaccccacacttggaaagtcccaggcccttctgcatgtaagactctccagctgcaggatgggaagtcctgtggcaaggatggacctggatcctgggtctgcggagatcggcttggtgccaaggtccacaggggtgaactgagtctactggacaggcctggagtctgcgtccacaaggcctagactgaagcttggctgcatccgaatgttttcatatttcatgattttatcgtccaaaatgctatctaatttttactgtaatttatttttgactcacaggttatttagaaatgaaatgtttaatatccaaatatttaagcatttctaattttatttttgttatttgtttctcagttccatggctgtcagagaatatatgctgaacagttttaatgctttaaatttgg

SEQ ID NO: 477714 - DNA, 568 bp, Homo sapiens
ggcaggacatcaaagttcctttccagagtgtctatacagaaaatcttattggaccacagccatgctcattagtttacatatcatctatggctgctttcacacaccaccaccagggttgagtagttgcagcagaaagtgtataccacctgtaaggcagaaagtaagatatttactctctggccctctacaggaagtttgccgactcttggcttgggggacagctgaagggctttggggttacagcagcggaagtgacttgagcagaggagggactctggacatcatggacaatggggcactgggaagtgaggagctggcggcagggtgggcacaggatgatgacgatgataacagagtcttgagagcccgtgcatctatcactgcaagctcttttcgttctaggatgctcagttctctctttaacttgacccccattggggctgcccccccatatcagaaatgtagacagagctaggtccctactaggctgtaagtaccatgaccaaaggagccatggctctagatctggccaaagatgatttgggaagtgtaattatctcttggcttt

SEQ ID NO: 477715 - DNA, 718 bp, Homo sapiens
gacagcgagcatcaactgcccctgtgtgacccagacgttctttctaaaatgttactgtggccctttcatggctcagatcaaggctgttctgtggatccctattggccacaagccagttgtccaccaacccaaagactcaagtagaaaaagtcccaagtatttaagggctcatcccaacctaagaggtccacatgagcttcagaatatagcagattgggtctcacattcattgttttgttgttgtttttcggttttacataaacgtgagtgccagtatctttgggttgagactgggcctctaacaaggcccctgaattccagtctgctcttacatctgccctcttggtatagttcaagatccactcaaagtggtcctcagaacagccttcaacagattttggaagaaaataaaaggaggcccatggacagaaaacttagggagatggtgcataccctcttctcttctgaggaacaaaaatggtaatcatatattagaggctctgagaagtcttacaatcaccataaggaaagaaaaacccactttgattaaacccacattttacaaatgtatttgctcatacatttctcctctcctttagggaaaatcacaatatgttggattgtcaaactttcaataaatgtgagtggctgttggcaattggaggtctgcggagaactctaaagtttccaggaattggaactctaaaggctaccttcc

SEQ ID NO: 477716 - DNA, 558 bp, Homo sapiens
ggggcagagccagttatgggaggactccaagtgcaaaggacagagctagccatgggaggactccaggcacagcagacagagtcagttatgggaggactccaggcacagcagacagagtcagttatgggaggactccaggaacagcggacagagccagttatgggaggactccaggcacagcagacagagtcagttatgggaggactctgggcacaggtggcagagccaattacgggaggactccaggcacagcgaacagagccagttatgggaggactccatgcacagcagacagagttagttatgggaggactccaggcacagggggcagtatgcacaaacacccagaggcagaaagaagttcacgtggtgaagcctgtgccccagcacattgcctgcacatggtaagtgcccaataaatatttgttgatttaatgaattgttaaccaactaatgaggaaaatgagcgtgtagaaagctccctgtaccaagctaaaatgggaacacagaagcatgcttataaaagaaggagctaaataagtggatatttagcaacac

SEQ ID NO: 477717 - DNA, 788 bp, Homo sapiens
agtgccgcagtagatttatgctgcacaaaagctgcaaaaatcaacagctgatttggataccaccaagacacctgaaaccttattatgagccagatgccaaggaagagattccgggaggatcccgagtactccccggttgcagccatgtcaagactgatgctgaggaggaccccaactgtcacaaacaacacatgtcaaacacagccactcatctggggacagatcaagaagctgccacagatggcggaagaaaacctgaggaaagtgggacaaccagtcacaacaagtaatttaatggtagctatgatagcagttatcaccgctgctgctaagctgaaagagatctgcattaatggcctaaattttattaacgagaactggaagcacctaattgctaaggaagaagacatgaagatgagagaaagtttggaacttcttagagactcgttaaatgattgtgaccaaaatgctgaaagtgatatggacagtggagtccaggctgatgaggtctcagatggaaatgaggaacttactggggactagagcaaatgtcacgtgttatgccatagcaaataacttggctataaagtgcccttgctctaggaatcttttcagcttttggtttaattaattttctttattgtttttggtttgcaattgcattagtttctgctcttatatagtcagtaaaaatttaataaaattttatttccactgatttatattcttttgcttttttcaacactgatttacattaaaaactccaagcacactataactgaggggaa

SEQ ID NO: 477718 - DNA, 2584 bp, Homo sapiens
caggggtgaaggatgattttgaatgagatatgggaccagaacacagatgtggaaacccatgggttcttatacctgaacacttggtgtcagcggtcaagctccagcaagtgggtgttatccctcagataccactctcttgtcctaactcaggctggcataatccgcaggaacctgaacgtgcatctctagcctatgcacttaggacagtgattcctgctgtcctggcaagttgctgcagctctgaccatggagaagaggcaccattaaaattaagcacattaagcaagtttgcacaagaagagagagaagaggaaaatgcaaaggtaaccaggggagtagaatgttctctggccttgctgggactgtccactccagtagaaacgaaagggagtcctacaggagatgatgcagctcaggtgccttctaagggaaatgagaaaaacagtcaaaataatgcagcccacgtgacactcatgccagcttcacccagggaaggagtggaacttaagctctccagcccctccaggtgtcaggatagagtgagtggggccatggtggacattgtgggaagggacagaatggatgtgctctgccatgagtggaccaccatcactaaaatggacagttgttgtaccaaaaaagaaccatagacagagaccatagacagaaaggacacatactcctttgggaaatatgtactgcagcaaagaagggtcacttattgctataaattttcctctacgtactgctttagtagtatctcacaaatgcaaattttaatgtattgttttccttttcatttagttcaaagtactttattttgatttcacctttgacccagaacttatctagagtctcaggtacgtctttgccagctgcgtaaaaacagactaatatagcatgtaaatgtttgggattgttatgtctcttatgaatttacatctttatcattataaaacaatttttttctatccttggtaaaatttcttgctctgaaatttagtctgatattaatataatcattacagaattttttaaaaatggactttattgttttagaacactttttatacttacagaaaatttgagaagataatacagaaagctcatatacttcaagctatgggatgaattgtgttcaacaaagaaggtatgttgaagttttaacctcctcaaaatatgacttcatttgaaaacagtgtaattgtaaacaactattctaagtttattttcaaatgacactaaaccacttcaaggataatgcagttttcctaaaaactcctttttaatagtctgtgccttgcagttcttttaactgtaattcactgttattatatgaaagctttgatgacagggtggtaaggtatacactttctataatgctatgattaagcctcagtcttttagtgggcttctgtctctgatctgtgaccatcctaagtgtatctcagtgttttttcccatattaggggatgataataagaaacacttgagaaacactggttcagatgcatattttcatcgtcttattttccttcagcctgaagtatttcctttattgtgtcttgtggtgtaactttaccatctgtaggtggtaaattatttcagtgtttctatgtctgaaaaaaactttagtttgctttcatatttgaaaaatactcttgctgggtatagaattctacattgacagttttttaccccttttattactttaaaagattgttgcactgtcttttgtttttctggtttctgacataaagttcactgttatccctaaacttgctcttctgtgtttaacatgtcctttttctttgtctattttgaaagtttgtactcatcacttgttttgagaaatttggttatgctctgctttgggttagttttctatgtttggtgtttatagggcttttcaaatctacatatttatagttttaatctaacttggaaacatttgggcaactgtttcctcaatttttgttttcttctcctcttttgggtattccaatttagtgtatattagatctcttaaaatcgtcctatagatcactaatgcttttctccatttcttttttacttttttaaagtatttgattttgcatcatttctattaccatgtcttcaagtttactaatgtttcttccagttatatctaagctacatacatcatagatctttctctcaaacattttacattttaccaataatattttggtttatatttatatttgtcctgtctctacttaatttttaaacatatgagaaaaattatacatccaatgtccttgcttactaattttaatatctgtgctgatactgggaagttttaatttattgatttttttcttattattttagtttttgtttgcatacttggtaattcttgattgtgtaccagatattgtgaagtttgcatttttggatgtttgatgcttgcatgtgtgtgtgtgtgcatgttcttaacctttgttctgaataaggttacttgaaaactggttctctagaattttgtgttttaagatttgttaggggagaccagaacattgtttattctacgactaatctttctctagtactgaggcaagaa

SEQ ID NO: 477719 - DNA, 990 bp, Homo sapiens
cagcaaaaaccattgaacagggataactcttttccgtggagccttttgtgtgtgtaggctatctgtctcatagcatgggaactgatggactctgctcccaggacatactggtgctgttatctggtgaagtcaaggtgttggacttcttaaatgattgttcaggtatccaagagtgtatatttccagaaataggaagtgacagctgctggtctcttgcagcttgggcctcgaacctagagtacatcacttctgctgcatcctgttggttacagccaccatcaaacctgcccagacttcaggagaaggaacatacattaggagtaagaacttggttggttctcagtctaatgcctacgaaaaaagcctgggaaacagggaaaccaagagtcacggatgtcatttacaccagaagagtcaagcccttggaagagcagctgccttccttcctttgctataccaggagctcctgggagttacaggaagctccagttaccactgcctccatcagacgggatccttcttcaggaatgcaagctttgacattgcatctccagtggcagtctcttctgtactcccagcacttagcatgtaggccctggaggaatccagaagcagataaaagataaggtagtacttgtaaagtacttagcacagtgtcttctgtatgataagatcctttccaaaatgaagattacaacaaagagcttattctgactagtttgggaagtcattacaaggtttgaggaaaactcacattatgagcatgctgccgattgccttgagtgttttcttgtgatttttatacatgtcaccattttaccaatgggttattttgatttcaaagaccatggtgagaaaaatacggacagttcagggcaaatctaactctactgctcaggtagagctcagagtgtaccggcatagaataagtctgaaacaccaacatcatgagctgatttagaataaggtcagcaaacattttctgtaaag

SEQ ID NO: 477720 - DNA, 1886 bp, Homo sapiens
cccggaagcacttgaatccttcaagtcatgccacatttctggaccaaactaatgtctttcttcaagtggggaggtggtgatgaatgtggtggccatgctgattgtgatggttggattgtggtgatcatggtgatcatggtggaggtgttggtgatggtgctggtggtggtcttggtggtggtagtcatagcactggtagtgatggtgtggtttattgatggcagtgtgattgtcttggtggtggtgatgatggtgtggtttgttgatggtagtgtgatggtcttggtggtggtgatgatggtggcgctggtggtggtcatagcactggtggtggtcatagcactggtggtgatgtttgttgatggtagtgtgatggtcttggtggtggtgatgatggtggtgctggtggtggtcatagcactggtggtgatgctatggtttgttgatggtagtgtgatggtcttggtggtggtgatggtgtggtttgttgatggtagtgtgatgctcttggtgctggtggtggtgatggtgtggtttgttgatggtagtgtgatggtcttggtgctggtgatgatggtggtgctggtggtggtcatagcactggtggtgatgtcaacgagtcgctttagctttcaaacaactgtagtgtctttaactttatctgaagaacgtgaaccagatccccagaaagaacatccctttcaaaaccagaagtcttaggctgttaatgtgccataaccactggctccaagcaattcttcagtgctgtgtaaagggtacattccatctgttccccatctggactccttagaaatactcagtgccagggagttagagcccaccctaagtccagaatgatctcatcccaggatccttaatgtcattacatctgcaaagacccatttttccaaataagctcacatttccaggtaactagggttaggatatagacatgtttttttgcagaggggaggacacaagtcaatcggtacacagacaaaaaaaaccaatcactgtgtatcatggtgggggagtgtattagtcacagttctctagagggacagaactaatggaatatatataattcatatatatataatatatatatgaatatatatatgaatatattatatatagaatatatatgaatatattatatatatgaatatatatgaatatattatatatatgaatatatttatgaatatatatgaatatatttatatatgaatatatatgaatatattatatatatgaatatatatgattatatatgaatatatgtgatatatatgaatatatgatatatatgaatatatgtgatatatatgaatatatgtgatatatatgaatatatgtgatatatatgaatatatatggatatatatgaatatatatggatatatatgaatatatgatatatatgaatatatatgatatatatgatatatatcatatatgaatatatattcatatatatgaagatatatatgaatatatatgatatatatgaaatatattatatatgatatatatgaatatgtatgaatatatatgaatatatatgaatatatatgatatatgatatatgatatatatgaatatatatgaatatatgatatatatgatatatatgaatatatgatatatatcatatatgaatatgtatgaatgtatatattatatatgatatatatgaatgtatatgatatatgatatatatgaatgtatatgatatatgatatataaatatatgatatatatgaagatatatgcatatatatgaagatatatatgcatatatatgaagatatatatgcatatatatgaagatatatatgcgtatatatgaagatatatatgcgtatatatgaagatatatatgc

SEQ ID NO: 477721 - DNA, 1612 bp, Homo sapiens
cccctaggtgcaccccttcttccttcctccacccccaggactagccagcgactagccagccacatgtggagcttcccatgtgccatgcagggtgcattcactgccccggcctgtgcccataagaagctaatggcatccctagacattggaaaaacccaaatgtacctctcacatttccaaactgccccatggggtggtgccacccccatgagagccactgtgcttgactctgagatcctcgaggacgctgtgtatggtccttacatgtcatctgcagcatgggaccaagcaagcatgaaggagccaaacatgcatgcagaaattcaactcccaaagcaggtgaaatttggtggtgactgtgatgtgagtgacagtggcagggatgatgacaatggtggtgatagtgatgggggacaggtgacagtgattggtggtggtggcaaagatggtgatagtagtgatgatggtgatgctgatggtcaccatggtgatggtacgatggtcatgatcatgatggtgctgacagtgctggcactggtggtggtgatgtcttatcatggtgatggccatgatgttgatgacagtgctgatgctggtggtggcggtgatggttatggtcatgatggtgacaacagtgttgacactggtggtggtggtgatggtgatggtatgactgacactagtggtggtgatggtcatggtcatgacggtgatggcagtgctgacactgtggtggtaatagtggtgatgtcatatcatggtgatggtcatgatgttgatgacagtgctgatggtggtggtggtggtgatggttatggtcatgatgttgatgacagtgctgatgctggtggtggcggtgatggttatggtcatgatgttgatgacagtgctgatggtggtggcagtgatggttatggtcatgatgttgatgacagtgctgatgctggtggtggtggtgatggtgatggtatgactgacactagtggtggtgatggtcatggtcatgagggtgagggcagtgctgacgctgtggtggtcatggtggtgatggtatgtgctgacactggtagtggtggtggtgctgatggtatggtgatggtcacgatggtgatgacagtgctgacactggtggtggtgatgataatggaggtgatgatagtgatgatggtgataatgatttggatagtcataatggtaatggtaatgactggtgacagtagtggtattggtggtggtgatgatggtgataatggtaatgatagtgatggtgatagtcatgatggtgatgggtgtagtgggggtgatgaagacggtgatgtggtagcagtggtgacaatggtgacagtggtgggcagacccctctccctgggctgccctgtcgacagtatcctgctcccatctaagccgcctgtttccagggccattaccagggagaatttgctgaagaccaggttcctaatacaggacttggttgcatttgtagaaacactgatctaaatttgaacctctaaaatgaatgttggaacctccccttcccccaattttacacaaattattttaaagagaatattgataatctaggaagccatttttttttaaaaaaaatgcaaaa

SEQ ID NO: 477722 - DNA, 2859 bp, Homo sapiens
ggcagcttcatttcgtgaaatgaattggcatgctgtgcttcattttgatgattttggcaaaggacttgggttcttcaaaattgaagtcagcacccctgttccattgcgagatgtaacattccctattgtgaaagcatccctgcggaggaggctgcagttagcacaccagggccctccttcctctgtggatccaagcatgcacagagcccattcactctgccagggtggtgttgggtcccggagatgcacagctgaagaagatccagcccaggctcctaagggcaaccccagccaaggagagagctccacggtgctctgccagacgaggcccagcaccatttgtgaaaaagataatgctttctccattgaattgcctttgtcttttgccaaagatcagttgaccgtagttatttgtgttgatgttgatgctggtggtattgatgttcttgctgctgatgtcagtagtgttgatgttgctgatgttggtgccattgctcttgatgttgatgctgatgtaatggtgttgattgttgatgttggtggtattgatgttgatggtattgatgttggtgttgtcaatattattgatgctggtggtactgatgttgctgatactgttagtggtgctgatgttggtggtgctgatgtaagtggtgtcagtattgttgatgttggtggtgttgatgttggtggtgtcaatattgtcgatggtggtgttgatgttggtggtattgatgttgctgatggtggtgtcaatattgttgatggtgttgatggtggtggtgttgatgttggtggtgtcgatattgttaatgttggtggtgtcgatattgctgatgttgttggtgtcgatattgttgatattggtggtgttgatattgttgatattggtggtgttgatattgttgatattggtggtgttgatgttgctgatgctgatggtggtgtcagtattgttgatgttggtggtgttgatgttggtgttgatgtaggtggtgttgatattgttgatgtttgtgatgttgatgttgatggtggtggtgttgatgtaagtggtgtcaatattgttgatgttagtggtgttgatggtggtggtattgatgttgctgatgctgatgttggtggtgtcaatattgttgatgttggtgatgttgatgttcttgatgctgatgttggtggtgtcattgttgatgttgatggcggtactgatgttcctgatgctgatgatagtgatgttggtgttggctggcctctctgcaagagacgcagaatacaggcctgtgtcagtgctgtagcccacactcgctgtgggcctttccggagttccattgtctgtgaaccagtcttcttggatggtaatgcaggtcagagtcatgataaactttcactcccaaccctctagggtgaccccctccagaaagagagcagacccagtgtggattccgctacaggtggcccccaccccagtcctgggagaacagtggcccgtacaaattgccatggaggcaggtggatgcccctcagagcctggcccatggtcctcagtgtcccccacaaacctccccctgaagcaagacctgaacactctggagcggactctccaggtctgtgttgttgtgacagctcagcagccacactgccagacaaagagcaggctggggagaaaatggccgtctgactgctgctcatcacacacaactccaggagcaggtggagacaggagcgctcagtggggccgagccgggctgggtgtgagcccctgcaagttctggaggctgggtcccaggttctgacttaaaatcacggctgctgttcatcctcaaactcgagagaagtttggtgtcaaatgttgccttcatcctcctttctctaaactcaataaggagacccccacctctgctcgtgcatactgtgcaaatcgctgaaatctatcaacttgaatagacttagaaaatcatatgctgctatgaaagaaacccataaatgaatctttatatttgaagttttttcatttaacaaatgcattgttatccattatcctttcagtacttaacaaacaactcataatgaaatacagaagggctcaattggaaggcttttctttttctctccaaaatagctatttccttgcagctttgacaaatgcttacatttgggtgaccaagactccaatcaagatgcagaacatcattctagaaagttctcatatccttgttcagtcagcccctcctctggccctagagcagccactgctgtgatttcttcactatggttttgcctgtgctgtgttctttggatgtgctgtaggcttggtttgatgttggctctgcttcttccaatgaaaatactgcatgcagcttgggctatgatgggtgaagctgctgagaacattcttgtgcaaatcttgttgtgggcaggtgtttttttttgtttgttttggggattgattttttttttttttttttgctttttgttttttcctggtgaaacatcttgccttaagtctctcttatccaatgttaatatcagccgtgaataagcctcttacgttcaccattggcatggtatttttcatattttgactctccacctgtctgtgtactcacagtgtgtgtcttgtgaacagcatgtctttgaaccttgatttttttccccatcctttctgacaacccttgccttgtaacaggattcctgatactttctggtatgttactggtgggggtggagtcgggtctaacacttgtatttgtgtttttgtttgctctgctctgtttgtgatgtctcttttcctgcttctctcctttcttgtgttaattaatttgttttagaattctatgttaatttagctataggattttt

SEQ ID NO: 477723 - DNA, 766 bp, Homo sapiens
caaccagcaaacaccaccatgaccaacaccgacctgcacggacccaaaggtggagaccttccttctcaaaaagcagcagatggggagctggtgcagtcttctcgcccacaagcccctacagagacctcagtgcaggagttgctcccagccacgctcatcagagctggtgcctgtgcttgccattggtatactaatgggcaagccaggggcaccagctcttctcagctctgtcccaccatccccacagaacaagaagctcagtacatcaggcacccccactgtccagcccttcacctgaaacaactgagagcccctaatagtaaaaaaagatcagatctatacccatctgtttatgggacagctggctgttacttgcaaatacttcaaagattttctcactttatcttcaaatgtgcctgctaaacaatcatttttctaatttccaaaagtttactacttctccttacatagcatgatattattgctttatggatggaatacactcttgaaactccagcccctaaataatagttattctaatgtgcctttcttcatttattttcagtcatgttaaagattttctcaaatagatagccagcctagattgtttattcatattttacatatatactgagccattttatgtgtgcaaacttgtccacagcttttgttttaaaatgcttgaactgtgaagatagaaaagacatgtttgctggaatgcataatactgaagtttacttctcatagtctttctttagaagttatc

SEQ ID NO: 477724 - DNA, 619 bp, Homo sapiens
tgcagttaccccatcacattccttctcatctttttactttgcatctccggttttgcctcacacaaggtctcttcttcctctgtggatcctctacctacatgtgtctacctgctaattggacaggcacatgcacactagttttccttactcccaaaattcaatttgcaaatgggaccgaagagctccctgttcccctcacgacactgacacgacaaaaaagagttattccactaattcccttgcttgtcggtttaggactttctgcctccactattgctctcagtactagaatagcaggcatttcaacctctgtcacgaccttccatagcctgtctaatgacttctctgctagcaccacagacatatcacaaactttatcagtcctccaggcccaagttgactctttagctgcagttgtcctccaaaaccaccgaggccttgacttactcactgctgaaaaaggaggactctgtatattcttaaatgaagagtgttgtttttatgtaaatcaatctggcctggtatatgacaacataaaaaaactcaagaatagagcccaaaaacttgccagccaagcaagtaattacactgaacccccttgggcactctctaattagac

SEQ ID NO: 477725 - DNA, 791 bp, Homo sapiens
atattgcctgtcagacagcaagctccctgagggcagggggctagattaatcaccctggtgtccctgaaagcttctagctcagacttaaggaagaagactttttcagtcccggatagaggtctaatgatctgatggaaccagagcaagtagtccagtgcactgatccgctagtcagacagagtcctccaaggttgaccaagtcatggactgaaggcaaaaaggaccgggggacctggaggggaggagagaagaatgctggtgtttatcacgcactaactatgctagatgctcgggtgccggacgtcacccctagggaattcacaaatttgggggcagacacgtcctacaaaaataactcaagtttctggcgaaagtgtgggtttttaaaatggatacactgtaagccagagttgctggcagctatctttgccaccaaaagagagaggttctctgaaaatgaagctgacaggaaagcagggatgacagatggagagacagctagagtcctaatgctactgtatggtcacctcctggacccagccgtgaaatcagtgaccctgaacacatacaggatccagttcaaagtcatgtatcgcatttacctgttcaggtctatacttgatatcacaactacacgaggcttcctgccattgacaaggccacagtccttttcctgtggctttgccagaggctggctgtacctgggagggtaggcgcagggggagcaatgtgctttcctaatcagctcccaaagggggaagcacagccacgctgggacacaggataagcac

SEQ ID NO: 477726 - DNA, 768 bp, Homo sapiens
atgtccgggtttctatgccaggcagggatgatgatccctgtcaccggatgatcttatccctgtaccctcagcgccgccgtctgcagtggaaaatgctgttactgctcggaggcgtaagccaccattcccagccctcaatatgtgtttctaaatcaactttgaggtataatttacatacaataaaatgcacctattttaagtgttatcgtgcaatgcattttgaaaaatgtacacagccatgtaactacgaccacaagcaaaacacagaacatttccatcaccccacaagtgctctcgtgccccttttcagtcgagccctcttccccaccctggtcctgatcacttcatcagaaagtgccaaacacttccaactcccactggccatgtccaaacaaaggaaaaatcaaaatcccttgtcacaaataaaagcatcatcggatagctctgggaacaaaggggcctaggaatcagaattccatgatatgaatccagggctgtgaattgttttctcagcactgggattgtgctgttattggaatgcagccttgatgtcattattcacccttccgtcaaatattcactcattgatctgtccaaccacatgtactgagcacccactgtcagccagacactggagctgtaaagtacagagagctgagttaatcccatttctcaagcatagctcattatcatcacacgcttcacttttattttttcctcaagccctactccttttccccttactcccaaccattgtgggcatccact

SEQ ID NO: 477727 - DNA, 2752 bp, Homo sapiens
ggacctgctttagcaagtgtgggatggccactttcttgtctgtcaaatgggaatgggacaagatggtccctgagctgctgtccagacccggtaatggaattctgtatgaattccaaggaggagagtagccacaaatgcatccgctccacgctgatggggctctctctccggcaggcccctggaagtcatgcttggcggtaccctggtcgtgggggggaaggggtgctggcgcttgctgccccatctgtctcagtggcattgagctgtgacttcagtggcctggggaagttcaaggtcacctctggggtggaggaggtggagacatctcaccagggctggcaaaggccaactgggaagctggggccgatacctgcccctcacggcagccaccacaaggggccttctgctccgaaggcccaagcacgccctgttcctttatttatgggccgtgtgagcaatttgctgcttgctggccggctggctgggtgtgcgatgcggggattactcacgccccagttgtggtccggcctctgcaggctgcggggtagagcaggggagtgagataatgtaggataatagcctagccaaaccctgcccaggcagcccggcctgtgctgagaggtgccccccaaacggccaagacaattcagccttttcagggaaaatgggggggcttgggcagggcctggctcccagggacagctgtatggaaatgacagctcctctccttcgtcctgtcctgtgttggctcagggtaggggcaagtaatgcccaataataggtgtggaaggaaggatgcaactagtatggtaataattgattcaaacaagaagcattactagatgctaaaactaaagccattgtgtgaaaatttgttgaggagtaggatatttacatagtcttaaagagtctttccacaagatacaatacctgcaaaaggaaggagagtgactttatagcgaagaaacatggcagagactatcttagtcgagtgatcaaaggctgcatcactgttactggacaaactgacatgaggctcctgatgggatgcacagggaagagtgaaaaatcacttctgtgatgttcctgccagagatgcaaaactgaaatctaatcacgaggagccgtcacataaacccaatttgaggaaccttctacaaaacaactggcctgtaacctggttgcagagaggaaaggaggaaatttttcgatagaaaaatcttggagatcctgttgctgtcacccatcgggctgttggaagctggggttagtccagaagtcttcagtacatcttggagatgtttcctattggctcatgtggagctgcccattcttttgtacagcagcagagcagtctgttatttggatgaactgtcatttattaactagacatgcccacaaccctgccacctcttttcctaacacactgggcagtcttggcctctcccaggctccctgggagggtcactactttcacaaagatgatgcccacttctgcccatggaatctggcttgcccagtgactacctgacagggttgagtgacaccacccagaagtgcaaagaaggcagtaaagaagaaagaagaatttattaggtgcccgaggaagggctcaatcctgccagtctaaacattgttgtacatacctcctgatatgtttttctagaatgtctccaggaagggattgctgggaataagtgcaaaataatgcccaattgttctccagagtggttgtacaactgactcccttatcaccagtgtcaaggagtccttgttccacataattgatcacatttggacttgtctagctttttaagttttgccaattgagtagacaggaaatgagcttttaatttggatttctctaattactcagaggttgagcatcttttcaaatgtttgttggctattcatgttttcgcttctctatgtctgtccaaatctttagtccatttttctttttgattgtttgtccttgtcttattgaattgtaggggttctttatatatttgggtgctaatctttgtcagttaaattgttacggacatcttctagcttgtgacttgtctttccacttttaaaaaatggtgaactttgatgaacgataaagtcatagaaatgaaattgcccatagaatttaaggcttcggatacatttgaccaaatttgccagaggatccacttttgattcctttccaagaagcaatatgccattgtgttcaattgcccttcccaagagtctggaatcagcaaagtaggggtcctggagatgatgttttgaactggagctgttagcaggcatgttctgttgtgtgcagaaatagttactgtagcagttaaagattttccctgtcctcttccttcctaccctctcctgactcctgacagtccctggagggcaggcgggtgagcatcttcaccattgagggatgccccctccttaattgtggcaaggggggccctttgcagcccagtgcaggccttatgggacagtgaagaggaaaagaagcaagctggccaggattccctggggtttttgtggagctgacaggctgaggagtggcaggggcctttaaggcactcagcaaagcttctgtcacagggtaccagggtctccacctgtgctatcaagccactcttttgacaatgttaaactttacctgagccctgtgctcctgaaaaacagcgatggtccagaaatccccccaactttttgttttctgaagtctccctaccttttctgttcagggaaa

SEQ ID NO: 477728 - DNA, 4540 bp, Homo sapiens
ctctaagtccctccgatccacatcaagctaaaaaacccaggggaagtagtaagaaggaagcaataccctattcccctagaaggatgggcttcttgagccctgtatgtctccttataacatcccaatcaagaatcaagaaatcaagactgctaccagccaggtggaaacaacaatatcgatggaccgtcttgccccaagggttcacagactcccctaaactttttggccaaattttagaagaagtactagaaaaagttgtcatcccagaacaaatatgccttcttcagtacctggatgacattcttatatctggtgaagatctagagaaggagaagcctaaccgtctcctgtggacttctgaggaagttgatcaaatcgagaggttggaggaaaggctcataactgcccctgttttaggcttaccctccctagaaaagccattccacctttttgctaatgtggacagtagggtaccttcgggagtgctgactcaagaacacagaggccgccagcagcccgtagccttcccatcaaaggtcttagacccagtcacttgtggatggcctcaacgcatccagtccatcgctgctatggcaatactaggtgaggaaagcagaaaattaaccttcggaggaaaattgacattaaacacgcctcaccaagttagaactatcttaaaccagagagcagtgagatggcttactgacttgagaatcttaaagtgtgaggccattctgttagaaaaggatgatttaacattgaccactgataattcactcaacccagcaggtttcctaacagggaatccacatctaaggagggaacacacatgtttagatttaattgattaccatacaaaggtttgaccagacctgggagaaacccccttctggactggacggcacttactcatagatggttcctcccaggtgattgagggaaaaagacacaatgggtattcagtgattgttggagaaactcttgtagaaataaagtcaggaaaattgcccaacagttgatctgctcaaacgtgtgagctgtttgcactcagccaagccttaaagtacttacagaaccacatctatacagattccaggtatgcctttggagtggcccatacatttgggaaaatttggactgaacgaggtctcattaatagtaaaggtcaagaccttgttcacaaggagctgttcacccaagcattgaataatcttcagttgccggaagaaatagctattgtccatgttcccggacaccagaaaagcctttcttttgaaagttgaggaaataacctagcagatcagactaggcattagtgaatcgggaccatttaatctggggagatttctataaagatcccagtggcaaccaggagtcttcccccagtgatgtagagcttttaagccatagttggtccaaagttctgtggaccattaaagagcaaggatggattgccccaaccagtttttgtaatttcctaaattcatacattcgttttactaaagggacagtgcccactaactctcagctaaaccagtgcaaccctatacaggttattattttgagcccacaaaattcttcctcttttctaagctggttcccttctttaagccagttttatggtatgggggctgaagtttcagggacagaccctattggattctttgaaatgcacttctttgatcccctgctgtctgcacctgcctctgagcctttttccaaaacctctcacaacggaaccattgttcctcctctatctaacgacaaggccaagatagcgatggtagaagttaaagacttaaaacaaactggcaattgagacaggataccaagatgtaaatgtttggttggaatggatcaaatatttcatccacacgttaaacaaaagcaattgttatgcttgtgcgcacagcaggccagaggcccagattgtcccctttccactagggtggtcctccagttgaccgggcatgggctgcatggtagctcttttccaggattctatagcctgggccacaggtactgaattggcttaaagttaaagaatattcataaattaataagcctaaatgcttttcaagttcatgtgacttaagtaaaatctttaataagctagctttaaaattattggtaaagtaatattagaaatgtcttaaaaattgttagcataaatttttgtttgcatttattgatcaagggacttcatatactgccaaatactgtaaggtgtcaaaatttggcatagggtttgtaaaactacaaaaccgttcaaaacagaatgatttttgcttttgtaatttttgataaataagacattgatattggtttaatgaaaacagctaaatcatgaattatttagtgaaataacaatatatttaatcttaaggtttttacttagcaaacacctgaaattcacaggctatcaaatgtttgacagggaaataactttaaatgatgactatcacagttttcataactaacctgggtaaactattaaaataaaatatttaggtaaatgtaatgggataaatacttgtagacaaagttgtcataatttaggatctaaagttatgttaaattaaacaatagatatttcattaactgggtttttttaattaaaaaagatattgcaggaaatcattttttttctaaaaaatgtgttcttgttaaaaggaggataatttttgtctaattcaaagcttatttaaaggttatatataaaataaggtaaaaagaaacaagaaaatatataaagaagttatagaaataaaaaagaatttttggtaagaaagcttaaagaaaaataattttacatgagaaagaaccttgtatggtacatttttgtcctagaataaaatgactggttgtttaagaaagaggaatgttcatacaaaccagaaagtccaagcatgtcgtgaatggtctgtttaagttataataagagcatttatggaaaaagacccacaaactttcatataatcaagttgtctataattaaagggaaattatttataatgatcttttgagagattgggttttgatattaaaaaacatttatacactaaagaattcattagaacaacattttcttaaggtattgatttacttttaataaattacaagactatatatataatatattttttcctgcaaagttcaacttttattgcatctcactgttttcagctttctctccccttttaaagtacctgaaataataactctatctttcaactcatttttagctcctgtaagtttttttattttctcctttgtgttctaactgttgtggcctgacgctaataaatgttttatctttgtggtctaaaggaaacattccttccaacataatatttcctgtagggaacagcggttgaaatgcagaaggtgttttgttttccctttgggaaattggcctaataaacagagtttatgctttattgaaataattcctatgtcattattactaagttttggtttgtttagaaaaaaacccgagattaaattttttttaattaagattattacatacatgtaaccctctgtatgtgcttttaaagtccttgtgccattaagttacagagctttgagtccttggtctaaaaagaacaccaagtcctgctaaatattaaacactgacagcagttaaaacctcattttctgacctggtagaagatgccaatcaaaataaactgtgttcatgagacagaaggccggaaattaaaacgattcaactcctcaaggtctggagactatcaaagaagagggcaagttctgtatttatagcttttaacaattgaggaaattatactcctataaacaaaatttggagcatatttctctctatctggtttctctaaaatttggaaactagttgggagtattcttaacttatagcaatatagttatctgcacaagtacaataagaatctgttttcttttgtaagaggacataattggggacagtggtgattttaccaaggttttgactggaacaacatgctatcagatgcagactcctttaaggaatcaaagttgacttacagagctaataaaagcatcttgggaaagctggcctcctatcttgtctacacagtccctgtacaggttcctgacctgtgaaatcaccaaacattaaactgtgctttcctaaagccctgtgaactaaagctagacaatctatttacatacataagctactttcatacctgcctactgaatagaatgaatgggaatggtcggctttacacagagacattccattcccagggatgagcagagaagccttcctcttatctcaactgcaaagaggcctccctctttcactcctcctcctcagcacagaccctttatgggtgtcgggctgggggatggctgaagctacctgctcaatcttctcttgtgtcttataggatcacaggatcccccttgccttacctcactgttactcccaaacagttctcacatgtttacaagggaatgtaacagagtggatcagagaattcattctggatccagaccgaccttagttttctcatct

SEQ ID NO: 477729 - DNA, 1709 bp, Homo sapiens
gaatccactttgcctctggagacacagaaaatccttccaagggccaggggaaagtggtatgccccaggatggccctggcttggttgcttgtaacagtaatgagaagttgtcatgtcctggggcagattgtcctggggctgctggagtggggatgtggagaggaggcagtggggagaggaggttggagtgccaggaggctaaccctagatctcgctccccgacagctggccacgagacctagggtgggcagctgtgcctctctgggcctccacaccctgatctgtaaactgggtaaaccttatctcttgcaggaggaatgcgtggtgggaaaacagggtcattccgggaggaccacttgccaatttggggtcctgaagtacctggatccaaaagaagaagactgtccccagtctgaatctcccactctggggagagggtcactcctgggttgttcccacaatccagcccttctgccagcccctcccttggcaactccttgcatttcaacaccctggatgatcattgagggttgcacgtggggcagctgaaacagaccccaggcctctggtcctgttcatatctaggtatataaataatgtataatatttttgtgttctcaaaacttaagtatatgctgttatactgaatgcgacgtcctgcttatattatattttccagattgatataaatgacacatatagatcttgtgaccaaggacattttcttttcactgctgtgcagcattgcattatgtaatttttaactctttatccagtttttggcagatggatatttaaattaattcagttatcttgttattcctgacaatactgctattaccatcttatatgggaatacttgtgcttacaagcaagggctcctctggggaactaatccaggcatgctcctcctgggtcgtggaatatatgtgctgccagcctgaggcagttgccaaattgtgctccaagtctctctgtcgagttaattccagtagggtgccggggtctccatcgctccgcacccctgccatcccttgagatggtcatgctttacctttgttccaatctgatggctgtgaaatcgtacatgtaattacatagcctgctttccctacttaatagtatattacggaactattttcctgtgcagaatattgttctatatatgtgacctgtgacctttcttattgcttcttggttctccctgctgcctctttctcaaaaatgtactcatccttccaagttttctggagagtatcaacatgagtcttatctaagtaaaagctaagttatgtctttgtgcagacagaccgacagtgtgacagaatccattaccgttgacttaaagaaagttatccttggcattttagtaagtacatcagatcacgacagtaattgttttgaaagcataaattgttatgtgatattggaacatctgggcattttgctgtcgtaagagtttactcttgcaggcattattgagcagcttccttagccataaacatcttatgactgtgggctgtgattagcaaggaatgtgtcttgctagttttaagatagagttgattttaaaatggtgtcaccctagctctcctatgctcctgtttcccaaacataatcccccctctacttaagagagaaccctaaatcttaaggggagatgaaaggtgaaggtcatttttctgtaacttattcctgctgacagtggac

SEQ ID NO: 477730 - DNA, 952 bp, Homo sapiens
ggaaaaagggtcttatcccatatcgcaagagtgggttcttggatctcacatgggaaagaattcaggaagacttggcttggccctaatcactcccagcccccttggctgagtggccacccgctgctggctgctgtcatcccacattggaagtgacggaggagcagaagaacgagtgggtcaccagccggtcttcaggctcccgggccagcattcagactgggcaggaggtttgtgggtggaagcttcctttgtctgctgcacaatgggctctggacggagccctgttggcgcaatgagtgagccctacatcaagcttcgtcatcgctgcatcgctttgcaccgtgtggctgggccgccatcagtacagccaactgcctctgatggacatctgggctgcagccagattcctcctaacagggcttcagggaaagtcctcctcagcgcctctttgtgcgcatggcacatttctctaaggcaggtttctggacatgagactgacgggcagcatgtgctccttacatttgggggtcctgtcaatcccctcctctcccgcaggctgtggccagagggtcgagactcatctcacagccgtgcaatagatgcgtgtctctcagtcggtcagctctggctgggatcagtgtttatcttcatgtcggtggacaccatcacaggcacccgcaagaatcagcgatcgacggggaagaggtttgggtgcatggaggagtgctttgcagtgagggctttggagccttgtgccctgattcaaatcctggctgtgtcccctgccggttgtgtgacttcggataaattacttgatgtctctgagcataagctgggtcatcagaaaagccaagctatcctgctaggagagaaccgcaacacgaccccgtttcagaaatgcgctccttgacaagcctggctgcgacctgttcctggttgactgccgtcatcc

SEQ ID NO: 477731 - DNA, 489 bp, Homo sapiens
tgacctcctggccgcggatgccgaagtacccagggggacagtcgtgcaggcacttgccgtactggcggatgccttcccggcggatgaacaggaagagcctctgctggcaggtggaacagccgttctcctctgagcagatgatacagcctgtgcagttgccccccaggccaaggaattccccattgtgcaaggtcctgatgaaacacatcctggcaccttccccctggaacagaaaccaaaagagttctggccctcctttaagttggcagcagctctcggatgagtactgctacttccccagtcctcaccttctgttccttagattcgacagcgaacagatcacggtggagcagcgctgctttggcgcggatgaggaacctggagcaccacctatccaacctgatcaccctggtgctccaggggacactgaggttccagggagcacactttgaaaccccctgggtccttctacacatcttggcctctgtc

SEQ ID NO: 477732 - DNA, 779 bp, Homo sapiens
ctggaggccggaagggcagtgagaggcttttgcaatttgcgggtgcttttcatcagccatggttaccttgtggtcctgtgctgtccccaagcgtcccaacgggccgcttttggacaagcagcctagggaaaaattctatgggaatcaccaccgttctcagcgggcccacgagagggcgaaagagagtcaacgggcctgggacatcttttctctggctcccaagagcagggaggaagtggaatccagggcaggtgtgaggccgattctggacttgggtgggtgggtaggggctgagataagggaggccccgggagcctggcagctgcttcccttgccctcgccttcacagcatggtaggagaggccgctgtcacccccactgctgggcagaaatgtatctagccttggctgaccccacaaggacactgggtcgcggcacctcagataagattcacttggttgcaaggcagcagggcttatatgtcagtcatccacaggctgcaggctgtgggagtgggcgtgactcccactgggcaaagggcaattccctagagaagagagaaggcccctgtgacccaacaggcacagcagccgcagatgcaccctatcctgcaaaggggtctgggcgaggcacccacagtgtccatttcagtcccctatcggtttactgctgaccccagccagcctctctcctcctctttcccgggtaagaacagacatggcccagggttttcacattggctgggacagtccatgaagttctaaggggtcctgaggccc

SEQ ID NO: 477733 - DNA, 1074 bp, Homo sapiens
gaagcggcaccgtgctcacgcatgcccctgtactgtctccctttcccacacccttccttccctactcaagatggagttgctgttgttgaaacgcctctgacagtccaaggtccctttgaccatcactgcaaggctacaggctgtggaatcagaagaactggggcctctcttgttggtgttacactcagctctggtgtccccatgtcatcatggcacttgctagatggcagacactgtgctaaccacacattcacccattacctcattaaatcccagaaggatcctgagaaggagcctcatgcatttcaaggaaatcacttctcttctaacaacaagcagccagaaagagcagacagtaaaacacagataagacagcttggacacagaaagaggtgggggaaaagtctcttgggtaactgccaaacttcaccctcatacaatgggccccagtaaaacattttcagaagtttgaatattatgcatcatgctgtggatttctttggatttgtcctgtttggtgttctcttatcttcttgaatctgtatgtttatgttgtttgccaaattcaggatattttcagccattatttctttgaacactttgtaaatcctacccactttctgcttgcctagtgggacactgatgacatcaatcctaaatcttttgttttagttccacacatccctgagagtctgttctttatttgtgtgtgtcttatctcaggaagtaattttgtctttctaggcttcatttcttcatctgcaaaatgggaaaattaatatctgctgttcaatatcatgatgcttaaatgacactgagtgctcaatgtttgttgaatgaatgaatgaacaaacaaatgagcaagctgatggatagaaatttgccagtttacttgtcagctttgtaatattaagtacagtcaagtctttaccaatcacacacaaaagtacatttgatagaggttgtaagtggttcagcaaattcagttccatttctggggacagagcttggatctcatgctgtgatgaattattatgatatcttctttaagtatgagaagagtatgcataaaac

SEQ ID NO: 477734 - DNA, 629 bp, Homo sapiens
ttcaggctctgcttttttgtgtaggtgggcaccgtctaatcaaccaccagcatggctagaataaagcaagcagaagaggtgggaaaaacggacttactgagtcttccagccttcatccctctcctgtgctggatgcttcctgccctcaaacatcagactccaacttcttcagcttttggactctgggacttatgccagtggttatgctacattgttacagcagcactagcaagcaaattcgccttccctgccaaatatgacccatcccccaaatacgacctgtcccccaaatacgacctgtcccccaaatacgacctgtcccccaaatatgacctgccccccaataactggcaaattcttccggaccctcagaaccctcactcactccttttgtctgttaatctcagcctggcgcaatggtgtctcatgggcaatgctaatcttctgctctgcataatttctggggactcagaatttcaggcatcccggagggatcctctgagacataacccttctcttaagaaatgatgttatcctcaagatgcgataaagcaacagcatattaacagttgacagaactactccttcctcagccccaggactctgggtggttggtcccgtggtggctg

SEQ ID NO: 477735 - DNA, 1098 bp, Homo sapiens
cgtgttgctccaaaccaccttgtggtgtttgtcggcgcgctctcgggtttggaaccaatacaagagccttgcacctgcaggctgtagcaggacagggaattggaagggagatggtgcgggaaggtgatctttccctgaagccacaccatctgaagttaactatgtctatccgtagtcgccgacgctcagccgcatgtatccctgatactcagcagcttgcagccctgaccacttgcatcagccgcttgtggttcttggatgtcactaacaaccctcacttcttttacatcattcaattgggctgcattcacagactgtttctcaatttctcctctaaacagaaagccagagattcatttcaagagggtgaatacaggatctggttaggagacactgaactcagtggaaagcaaggagtcacactgagaacaggagaactacatgagtgtgggcactgcggatgctggggcagccctatcccatcccccagcctcattcctcatgcggttcccagaacgccagccaccatcccaacaggaagcagagaggtttccagtcaaagggcccagacagttgaagctgccaagccccacctgtgcactcggagcatccaatcagctgtgaagggctcacccttccacacgagcagattgccagatggctgaggaagaaaggatcaaagtatacagacaacttaaaaaaaaacaagagtaaaagttatttgaccaacatcagccatgtgtggctaatgaacacttaaaatgtgacaggtgtgattgaggaattaaattttagttttatttaaatgttttaatgtaaatttaaagagcacatgtggcttatagctatggaacatgcagctgtgaacactatagttaaaactgacattttgatctgaggattccttttatttaatcagttctgaaactatagttttctacatttatatatttgttctattgtgaattttaggatttattttgatgatgtactttttctttgtgaagtttagaaatgaccatgggggtcatgtgggccaaattaactcaattcctggacaaaaactatttccccgaccaccccaagcttcttgccaat

SEQ ID NO: 477736 - DNA, 1157 bp, Homo sapiens
taaacagctgttacagtctgaatgcttgtgtccctcaacaactcatatgttgaaattctcacccccgaggaggaagttcaaagcactgtggagagagggatggattcagcagggaaaagtctttgccaagtcgcagagccaacccaagtggaaaatgcagggagaggtcacttcttggtggtggtggctgcaggacacagggttctcaagtgccagtttgccagggacagagggaatttccaggacacaggattttcagtgctaaactgggaaagtatgctgccacatggaaacattactgattttccaactggacatgaaccaatgcctctcttccatcttctctgctctcccgactccaactgcaagtgctacgcaggaaacagccatgcttggatgaccccaattggagactggaaaccctcctttgggacaagtctggtccacaataaatgccctactatctgtgtggcagaaatagcaaccccagcacctgtcattcctccactgaaaggcggtgtagagaaaggggttttcagattggctggtgagaaaaggcctcctccaggggttggggtaaaaggagattcagagtcattcagggaaaagaagaaaatcaaaattacaggcttctcattggattctgcagtctgtgagtctggacagtgggcagggctagtggtcacccatttggaaggacttgggcctttgagatcctctgatcctctctgtggtgcttcccctgaccttagacttgggggcctcaggaaggagctatatccagaatggaaacacggcgatttgctctgccatgggcgctatgaggtaggcacccttggtgatcctaaggacctctataccaaactcttaaatatcatcacaaatcaatggccatgtgtttccataatatacttttggggagcatactgtgtaccctgggtaagtgagagaataaacgtttctgaatgtgagcttcctaaaatggacagcgttgtgaagatcagagaggcccccctgaaggcagaccggccaggtttggtgcataccatttactgattaaaaataatagttaccaatctttttctcattgtaaaagcaatatttggtcaggaggttggcattatattgtaaatttttaaaaacttcatattttcctg

SEQ ID NO: 477737 - DNA, 2138 bp, Homo sapiens
cccggagccaaagcttccttcagctggcccgcaccatgccctggacagctctgagacatgcagagaacaatggagccctggagagcctggggccggcttcctctggacaatcttcatcctcacctgatgtttttgctgaagtcactttgctctcatggaaaggtgttggcagttgtgccttgggggagacagcctggaaagattgggtgccagctgcagagaggagagcaaggcgaccaaacgcaggctgtggctgcctgcagcccatcctgcccccagcacctagagtcatctttagaaatgcaagcctgatcgtggaatccaccttcctaacacccttcagtgccctcctcttcgttacacccttactatacaaacgatagtccatggaccagcagcatcaacataaccagggagcttgttagaaatgtagaatctggtccatcccaaacctgacgaagcagaagctgcattttgccaagatcccagggaatttgtgtgcccgttatggtttgcgaagtgcttcccaagagaacatacggcaagccagagggatctttgcagatcttgctcctttcattctctggcctcatcttgtcgctctcctccatccgtgcccacatccccactgtactggaccgcttgcagctccttgaatgcagcatagtcttgttttcttttttgcagtgattctacatctttcccatcttctccacctggatgcctccatccatcctttcagacttcccttctctagcaaacctttcttgctaattcccatgtctaacacaacacttccccatactgcatggccattatcctttctgcatcagactgtgagcaccttgaaggcagtggcagtgactcattcattgtggcatctgcagattccagtggactgccaggcatgcaatagaaaatcaaaaaagatttactgctaaataatcctcaactccagtggcagctccatgtgccatttctcttccgctctggcctcggctcttcctgtgcctacctggggcttggctttcacctaggtgtctgcatggaagggagagcgacctggaggaccatcgccaatccatcaatagcctcccggttgagatgacttcagctctgatttggaagagctatgatattgtttataggagtgaattaatatgtgtaaaggttacaaagtaaacagttaaattaaattaattgtgctggagcaggtcaaacaggcttctgagagatgaacatacacatctctattaactccacattcagtgagtgtgggtaacttgaaattggctgggtcaccatttacatcatagaaattggcaaatagtacaaattagggctccctcacccctactcgggcatagagctggtacactagcacacctctggttatacatgcatgcgtgtgccaccagaacaaaacacctaacagcaggcacgttgcctctgttgcccaccattacagctcccgcacggagcagacagactcatggcaggaattgaatgcatgtttgtcgagtggaagcatgaacaaatccacaaaatgcccaagatgaggcaaagaaggacattggctcaaatgttaaacataagttaggagctgagataatgcccagaggaaaaatgttctgtaattctaagtaaaacccatctctaaggcaggatgctgcttatgagggctccacagacagatgggggaggcctgggtcctgcccttggaaagagtctgacagctcgacttctggaaacagccatctgcacaggtcaacatcttcttagctgacagggagcagatttgcagaccacatcacatttgaaattccagaagaaacttcttggagtctgctcttgtgcaaatgagcctagaaagcccgttaactttgggtggaggcttccactgtttggctatcccaagtgggcccaaagctaaggaaaacccaccagccctttgcttcctgcttcctctatttgtttgccccaggaaatcagaggtgatgacatgatttggcttgggcacgacaggaataaacgatatttaagagacgtcataagcgcctccattttgttcttgattgctaagtagccccgaaccaaaacagccaattaaaaaaattagaatcttaattacagatttc

SEQ ID NO: 477738 - DNA, 736 bp, Homo sapiens
tagtattgctgggctaaatattcggggtacatgtgcatgatgtgcagatttgttacacaggtaaacatgtgccatggtgatttgctgcacaggtcatctgccatttgtcttttagaggtccgtggcagggtgtggggctggggaaaggaggacagatctcctgtggtgtcacaagttattgccacaagcaaatacttcacaaagcacttggtaggctttgacaagccaatgactattctaaacctttacctggaccttgtttccaagttccagaacttaggaccctctactcacctgaagccaccacgggatgcctctcaaactggaaacattgccgtccctctccaccaaagatgcttctcctccagccccatcagcctctctcaaagcctggctgtcagagtgattccttcttctctgtcattttccatactcaatctatcaccacatgttgtgggtttttcttgcaaccacctcctgagtctacccttgtctctccacatccactgttacccctgatagtagatcgcatcacttttctcagttcttcactcaccctgagtccatatcctttgccatgtgcctttgcagcccctcccactaaaggtgatgtttcttttagaacaaatatgtccacacaaaccaggaagtaagaggagttattgggcaacatttaagtatgtttgaaacaacttgggcatgtgaatctactttttcaactagaagttttacaaaa

SEQ ID NO: 477739 - DNA, 1296 bp, Homo sapiens
aagttccttattaatccgtttcagcgccatagtgtgtgcttgtcgtctggctcctcactctctcagtgtatgctcaaagctcatcagctgcccagtcggctctcccctaaacactctgaatctgatgtgcctcctgatacagtccacctcttctgtggtgggcaccccgttggttctgaggtcaaggtcagcactggacttgctcccccgctgggagggacgccagtgcagcagcatcatcttcttgaagtacttcatggtgttgttcttgaccgtcacgaagcacacggtgttgatcatgctgttgctcatggcgatgcactcgaccacgtagaaggcagtgaggtagtgcttttccttcacgaacacagtggggaagaagtcacgaacgatggtgaaaccgtagaagggtgcccagcacagcacataggccgtgagaatgcacatgagcaccaggaccgtcttcctgcggcagcgcagccgcttgcgaatctgctccgtctggaacccagggactgccttgaaccagagctcccgggagatcctggcatagcacagggtcatggtgaccacagggcccacgaactcgacaccaaagatgaagaggaagtaggacttgtagtagagctgctgatccacaggccagatctggccacagaagatcttctcctggctcttgacaataaagaggaccgtttctgttgcaaagtaagccgatgggatggcaatgagaatggacaccatccagaccaaggcgatcaggaaggaggccgtttgataattcatccgtggtttcaaggggtgaacgatggcgagatatctggtgagaacaagagcaggatgccgcctgctggtaaacaggccccccaaaacctggccataaactggcgtcagcgtaacaatgggacaagtgtgggctctgctcgtctaactcctgctcagttcttacaatttaaaacttggtgggcagatgaagcttccattcaggctgcttgcaatgcccaggcccatcctcaaattaatataactgcagaccaacttttgggggttggcgactgggctggtttagatgcacaagtggtcatgcaggatgatgccatagaacagcttagaggagtgtgcattagagcttggggaaaaatcacttcatgtggagaacaatacccttcctttagtgctataaaacagggaccaaaagaaccatacgtggattttatagctcagttacagtagtctcttaaaaagatgattgcagattcggctgttcaggatagagtgttgcagttattagctttc

SEQ ID NO: 477740 - DNA, 617 bp, Homo sapiens
ctggacgtgaggaaaatggatgagggtcagtgcccgccagccatgctccctgtctatggagaaagacccaagaaaaagaagcagattgattgccaaacttttatttttgttccatatcattgcccggatggtgtggccacctgctctgaatccatccattctgttggtgggacccctatgttcaaaagacttacagccaaagatgtacagccaattcacattccaggccatatgggaatagagtctccgcttgcatcctttgatattgtcccatccgccaaagcgagccatatggccaagttcagggtccatgttagaacgcactgccaaagaacgaggggtactggaggcctaaacaaattagattcgttattgcaaacagcctgccaaggggaggccatcgctttagctgaggggtcaaactttgcattcccaaggctgtggaacatggcatcatgtggcctctgatgtaatgcactgagaagggtacaattgcaggtcctgccaaaaacacatacactgaatcttgtcatgaggaaaaagccacacaaatacagttgagtacattatgcaaaaactggtttggacccttcaaaatgcccatatgatgaaagaca

SEQ ID NO: 477741 - DNA, 810 bp, Homo sapiens
ggattatgcaaacgggtcagccttaaagtatacattgagagtgagtgtgccatctcaggaagggccgcagcagtgaaccagacctggaagatctcctgctagtgaggggtgatggacaaaagcaagtccatttcaaatagtgagaagcaccctgggataataaagaatgacatggtagtgcctggggtggccactctggacagactgggaccaggaaaggagaactcagtgaggagagccacacccagtggcagtggtggacccaatctgctcacagcactagcaccagcagaaatgagcttccaaccactcccctactccacagccacagacagcagcaggccagtatccctgcagcagtggcaacagaagaatccaaacgggccaacccacttcacatcccatctccaccagcagcagggggctcaatctgcccgtattagtggtaacagtgaaacccatgcaggccaggtcatctactgctccacaccaggtgacagcagaagttacaaaaagaaccaaatggaaatcacagaattgaaacatgcagcaacaaaatttaaaaactcaccaggtgggctcagcggtagcgtggagatgacaaaagataaagtcactgaccttgaggacaattccactgaatttattcaatttgatcaacagagagaagacggatgaggacgagcataatgaactctgcctcatgggagtattttaaggattcacagaaatgatgtttaagatgcaggaagcacatcataggaatggaggaggcttatagaagccctcaatacatgggaacggctctta

SEQ ID NO: 477742 - DNA, 619 bp, Homo sapiens
acaaggggctataccttcatcatgctggcggccctcgcagctgcggaagcagaggacatgcaggttggggaagaactctggctgaaaggtgagcctcaaagccagtcagctggggcagatggccctcatgctgcagtcagttactgtgcagatcggcatggtgtatggtctgccggcctgtggggctcaggtcaacctccaggacgacaagggctccatggtcctcattgtgccagcaagcacgggcacatggagatcatcaagctgctgctggcccagctgggctgcaacgtccacctgcaggacaatgatggcagcaccatgctctcgatcgccctggaagtggggcacaagggcatcactgttcttctgtatgcccacatcagctttgcaaaagctcagtctccgggcacccctaggcttggaatgaagccacagaaggaattggctatgtatttgcctctagagaaatatagtgtagttctctgtatttatggattcctttatactgtgtcacatttactttggtcctacatgtatttaaatatttgaagtgccttagacttttgccatattttcaaaataaaatttcattaagcttttaaaaaaaaaaaaaaaa

SEQ ID NO: 477743 - DNA, 544 bp, Homo sapiens
cctcatctcaacctaattatatctgcaaagaccctatttccaaataaggtcttattcacaggtactgggggttaagatttcaacatatctttttgtggaacaaaattcaactaataacagacatgaatcctgaaaccatgcagagccccttcatccaaaaagagccccctggaggggattcccttgattttcaacttgccttagttcctgtgcttttcaaagaaccatccgcttcccagaacaatgatgccaaggaggtggccttgggagccacagggcaagactcaggcccaaactggactcagaaggaaaaacagacacttccttcactcacctctaacgtggatgtgcccagtggaggtggagcaaggcaacattctgtcttcttgttcctgctctcatacagagatgcccggaggatggagactgagagcagtgtagtgcgagaagctccagcacgggagccactagggcagggttcgaatcccaaatctggcatctgttagcggggtggcctcaagccagtcacttagcatttctaaac

SEQ ID NO: 477744 - DNA, 1364 bp, Homo sapiens
gaggagaaaagaagacggatgggctgccggccagggcctgactcgatattaatctataataggtgtagcaaatatttcatgaacgtggctggctacacagggcagcacagcacaacatatgctctaacagaagacatgtttactacttacagacgccagagaggagggcagcaggcctctccaggccaatgggaaggggagccagctgggaaccacaccctcaaccagagggatgctgaaaatagtctcaccaatctcttctgtgaagttgaccctccagaaagatggaccaaggatattctgctctttgcatcctccctgcacagaattgagtctgtgcctactcccgtttcagaagcatgtgatacaggagccagaaggccagagtgggaggaattttcttctctcatctgggatgaggctctggcaaagtcctttgttcctggagaggccgtccaagggatggacacatttcctggtcctgaagcagagaaattagaagcaaaaataggcatggaaagatgctctgcccaaaagaagtcccccctctcttccccaggagttgaataacagttctctttcatttgggtatattttacttttaaaagcttaatttagtcatttttaacaacaaagtagaatagttcagagatttataaaaacagcagcaataacaacaaaaaactttgctgcagtgtttgcttttcctgcaggccctcctggtgaggctgctctttgaagcacttacacaggttctcacaactctgcttgggccaccttcccaaaagcaatggccttttatgcccccaggtgacccatcgcccccaccttcttcattctcctgatctatgtcattgtcccacttacttctcctcaaggcaggaaaagggctgtgggatgagctcattgatatcattcaggtgagcagcagactcctttgtgtccaggtgagaacatgggatggctccttcacgtggtttgggaataagtgtagactccttttccacttttagggaacccttgctcagtttcctgggaagagttgggataagaacagatcctagggatgctgatagaatccatctgcagttggggtcttaccagctcagggcttgtcccagataaagcctccggggaaggaagtgtggttcttttgctccctctgctttaaagcacatgtcctgaaaattcccattggcatcttcttccttttcagtccctttgcctctcgtggacatgagttgcctgtgtgtatttgtttatgtgattatttgtttagggcttagggtttgccattcttttgtgctaggctctaacaggggtcttgatcactaatcattactgtgtctttggggtctagtata

SEQ ID NO: 477745 - DNA, 760 bp, Homo sapiens
gcagcaaggtgggctctgaaggcacacgctacctcacagtgctcaagtagcatgtggcaaacttgtgggatactttccattggaacccagccaccatgctttcaggaagcccaagcttcatggaaaggccatgtctaggtgttccggggccccactcaaggaccttcacagtcggctccctgtgtacagccccagctccatcactgaggtctttgcttggcccacagtgcctgcagttctcccagtggaccaggctttgcctcacctctgggagtcctgcctgctgcattcttctctcctttccttgcgggctgtctttcccaggctcttgtgcagctggtttcaagctgggttgaaccaatggaagcttcagcttccatcacacagacctgctatgttttcaggttccacaagatcaccccagccatgggcactggaaacaccacctcctctcgaggtccctgctgtcctaggggtagaagtagctttctgctgttctcagtgcctgggtgttcctctggccctgtttggcttcttaactcatttgtaaggtttcttttccctctggcttctttcagcatatttttaaaaaatcttcaattttctctacttgaatatagtatgcctagatgtagtttttattgtttacatatttatttatttatttggtatttatcttgcttggtgttctgagctgcccctctgggttttggtatctgacattaatttatggaattacatactgatatggtttggatcc

SEQ ID NO: 477746 - DNA, 1567 bp, Homo sapiens
tgcagcaggtgttgaaaataattgaagctatgaaacttggttgctggatcgttacactgaggctaataatgaaaggaaggcggaataaagggccttggttagctacaggatcctatcggacaggaaggattgctgtttggcagagggtgggcatttctgaagatcttcagggagtaaaggagcatgatgtctaccacttattctcaaatgggttgcaaaaaattccttttagagagaaaggagaaaacaaatgggaaacaatttcagttagccccaatttggacgtggataaaaagtaccttggaggtgttgacactcctgttgatgatgacttccagttagaagaacagcagccaagatgcctcctgactgcagagctggctggaatagatctggctgctatagaagcccttcctttttcattcaagaagagcacctagcatcttaactcctcatgctgaagaggaaatagttctgagcaattatttatttaaaatattaaataatatttaaaatattaaataatgtttaaaatatttaaaatattaaataatgtttaaaatatttaaaatattaaataatgtttaaaatatttaaaatattaaataatgtttaaaatatttaaaatattaatgtttaaaatatttaaaatattaaataatgtttaaaatatttaaaatattaaataatatttaaaatatttaaaacattagtggtggtaaggtgaagaaaaaagttaagttggttgttttctacaagttaaatagataagttttgtggttggtaattgaaatagggagcaagctttttgtgaaagctttaaataaacttttagagttttaaaatgggaaactcaaagtatattttgggaaaatgtacagtttagtacaagccgtgagctgtctcatatgtttagagcaaaatgctaattggggtccaccttaatgaccttatcttgattacatctgtaaagaccctatttctatagaaggtcatattctgaggtactggggttaggacttcaatgtataaatttggaagacacaaatcaactgatagcagaggataaattctcattccaaaagtgaattgaagaattaaggcaattctctaggtcaaggctctccagtagaaataaaaagtgagccacatatgtaatttaaaattttctagaatccacactaaaaagtacaaagaaatagataaaattaatctgaacaatatattttatttaacttatgttccaagtattattttaaaatataatagacgttaataattattaatattttacatattttttatagtactaaaattttgaaattgtgaattttccacttagagtacatttcaatttgggccctaaatttatatcagaagtatataatctgtagtttgcaattgtaaaatttatgattgaaaagtggatttcataccaggttgaaatatacttaagatttttccaacaattgagttaatgatgtttttaaattttaatttaaataaattaaagtgaaataaaactaaaaactcaatttctctgacacattagccatatttcaaggct

SEQ ID NO: 477747 - DNA, 884 bp, Homo sapiens
cagccaaactaaagagtaacaaccaaagtaaactttctgagagcagctgaagaaaggagggtcctggcagacagtgttttaagcacagtaaccccaccatggcccaagaaactttctgtctgagtgtacactgggaagggaagctcctcctctgcagagattggagctgtttctgaagaggaaaaggggcagagtcctcttttccatggaacatgaggatggcgactcagtttctcctcacactgagaagatggtttctctgctcagtgtttgaccagaaaatgaccaaaccgagatggaagctccaaatgggaggagtctttgcattgtgtctctgccagaggaacatcaagagctaccagaagctggaagacacaaggaagaatcctttccctacaggcttcatagggaatatggccctgtcaacaccttgttctgggacatctagcctccagagttatgagacaatacatatctattgtttaagccactcagtagtactttgttatggcagccctagcaaactactactttatgcaaaggctgctaactcttggataatgcctgctatagcattaatcaagcgtcacatttgttatgtgatggacaaagactgtggatggtggatccatgacttgcccttggaaactcattgtcagagcagctgtccacaactgttcaaaggttcattagtcatgcaaaggcacatggaatgcagtggatgctgctagtaccatggccaggttttctttactagactgaggacgtattccctggctgctgtgtatattgtctgcttttcctgaggattgctgtcagtcaaatagaagcccctttactatgtctttcccttcccattttagtgtgaagccataaaggagtct

SEQ ID NO: 477748 - DNA, 1472 bp, Homo sapiens
gacactagagcagccatagttacgaaaagccacttcaaagcattggaaatggcacgaactgacaaggttgaaacatatagttatatggttctgcttcattgccttatttctttcctcagagctattgtagacaaaaccaagcagaagaagctggaggctggacgaacagctgagcttcagctctctgctgggtccatagtgccagtgcctttgtttcctcatcagagaactgtggatcataatagctacatggagaggaagatgaagaagtccaagatcaaggtgctggcaaggtcggtgccgtcccagcgctgcaaaggagagcttattccatacctctttcctggcttctggttgtttgctggcaatctttggcattcctttgcttgtggatgccaagggcctctgccatcatcttcatatggcattctctttgggtgcatgtctttctttgtgtctaaataattgaacacaagtgcttattttataataatttggtagtatattaactattttttgatgtaatattttgttgattttgaactttcaaagccaggaaagcaaatatttcttggttttgccttctaaaagttccttctgctggcaggagcgagcacaacgctgtgtgtctgtgtgtgtgtgtgtgtacctgtgagcatgcacttctatgtagtttatcctgtcatctcttaagataaggggggaggttgaaatgtatttttggtcttctatactgaaaccaaaaaattgaatctctttttaaaagacatttctagatgcagagcctataggaatggtaacatgaattactctggctttgcgtaagtatcttaaaaaaataaatatatacactttgatagtaggttgactggactatacagtccatgtttacaaactaacttaaatcttaattccaagtgttctggaatataagaaccatgggaagagcattggttttaagttgtttcaagaggcaatttttctttcagtttaaggaaactgatttactaatctatgtcaagaaattatgaactattcaataagccttattgctgtaattttgcctacggtaatacagtagtaaattagacattaatggcaaaagtagactaaatgccccactagaagacactgttaggaatatcaaaactttacaaatgttgaaggacataaatcatggtgaaagtgtaacataaacagttacacggaggtttatagtaatatcctggcactagaaacttggaataataatattagtacaaatatatactaggatgcctttgacagtatagaataattttattttgctgtattcatgtgaatacagtaagtcttcacttaatatcatcaatagattcctgaaactgcaaatttaagcaaaatgctctataatgaaaccaattttttcctcatcaatgttatatgacaaaacaacattgaattaaacgatgtcatttgaaggcctgctgtac

SEQ ID NO: 477749 - DNA, 1628 bp, Homo sapiens
ttaatcttgctgtgtctagattgcgaacatgaagtccagttccctctggcaccccttactggcccagcccaacagagagctggctgcaacacagaaatatgagtacaagagaagggagagtgaggccccgcaaaacaggacaaagagcggggccgtgactctaaaagatctcagaagtatttgcgtagctgcaacatgcatctcatttcagggaatcccacagacagctttcccaaagtgggcatttcctcttgagcaacccacaagcctttcctggcccctggggcctgcagtcccctctctccctgaaaaaccaatgccacaatttcaaagtgattcaactggcatactctcacctggaaactatgcatcctttttgaccgtgatgccccaccagtgttccaacccgatctatggctcgagcagctgtttaccttcctcagaccttgacctcacattttctaatgaaggagaacagtatgatgtagtggaaagaacagtgagacccgggtttctcaacctcagcactactgacattttgggccaaatcattcttttgatgtggacgctgtcctatgcattgtaggctatttagcagcattcctgggcctgctacaagcacatccccttcctgctatgacaaccagactactgtgacaaccaaatacatctccagacattgccaaattcccagggagtagggtgaaataaatacaccccctggttgagaacctgctttaggcacattttaatagctcttctctggttgtctccattccagttcttggttttcttgagctataatgaccaaatgatacacatggctccaggctgaatagtattctattgtgtataaataccacattttcattatcctttcaaccactgatgaacacttaggttgatttcataccttggctattatgaaaaatgctgccatgaacatgagagtaaggttttcaatttattttgcacagatctatcaaaaaagtcattatctatggcagctgtaaccttaaaaatgtatttcctagatagtaagacttataaatcaaaattactccttgatccatgggctacagaacggatgctgtgttagcagacaggaaaacaacattcagctccttatatatgatttgcaaatattttatcccattctgtggattgttttttactcttttgataatgttttataatgcaaaataatttttaattttatgaagttcaatttatttttttttctgttgttgcttgtgcctttggtgtgatatctaagaaaccattgctagatccaagggcttaaagatttatctctatgtttttttgctaagtgttttatggttttagctcttatatttcagtctttgattcatttgaagttaatttgtgcatataatgtgaggtataaatttatagtagtgcctataattaacaatatcgtattatgcatttataaaagcaaatggtcacaagaaaacttttggaggtgatgaatatgtttattaccttgattgtagtgatattatcataagtgtattcatatgttcaaactcatcaaattgtttatgttaaatatgtgcaattttctatatatatcagttatgcctcaataaagctgggggaaaatc

SEQ ID NO: 477750 - DNA, 616 bp, Homo sapiens
ctacgagcagctgctgttttgacacgtctgctatgtttgtctctgtgatcaaccagcaatcctgtcccactggggaggggtgttcttggcattgccagaatgattagtttggagtatgctcctggtgtaccatacaatcagagagcctcattcccagggcttctgctagagattttagggaagaggtgctctgttctttctagattagatgtaccagcagtatgtaaacctaacattcctggagaccatctttgtcaccacataaagggatctcctctgagaacgacaacaatccagaggaaaatagaattgagagatgaaatgcagctggatcctatttataatccattttcacatttgtttgaattaaaatcccagattgttgtgctttcaaggttgaatgtgcatggcagccaacatttatccagccatttcaggagttactgggtaactgggctccaggaagggaaaccacaccatgcgtttgagccacagggaggagagagagaaaacagactcacacctaaaacctctgacatcactgttgtttggagagagattgttctgctctgaacatgtgctccctacttaagactctaattactctaaattactt

SEQ ID NO: 477751 - DNA, 533 bp, Homo sapiens
gaaggcttctctgttaactctggtgagttttgcagcctgaggaatggacagatgtgataagccagcacaagaaaaagaagttcaactctccactcacacacacattctctctttccagtttctcctttctttttgccacctggctattcctccaaagaaaaccagagtacaagagctctggttaaagcgtgatgaaggtgaagtgtcagcaataccggagcaattgagatacgctaggatctcattttgtgctatttcaaacaatgctgaaatgaacattgtgtgcatgtttttcatttctgcaaccattttaacggtttttacaaatcaaccaagcagccccaccatgggcttgatgatttggttgtgcaacatgaaagaggagggagctatgaaattgaaatgtatggacagaaagaattctcaccctatatatgcagtattgatctaagtgtttggtgcaacgaattcttaagtgaacttttctcgttccatatatcaagagtcctatattcacacaaccattaaatatc

SEQ ID NO: 477752 - DNA, 2014 bp, Homo sapiens
tcctccccagctatgttgagctgatttgctcatggtggcctggaggacactgttttgagaaaggttttctgggggcattccgactcaattgccaggatgaatcaacgatggttgccctgagcatgggactggggagtggcagctgcagtgttagccagcaggaggaactctcaggcaacaatgaatgtcaaagaacccagctccttagcagggtcccggtgtgtgatgtcccccttcctgtgtccaaatgttctcattgttcaattcccacctatgaagaggacttccaccccaatccaaaggtagctaaaatggggctgtgggatagtggtatctctggagctgccactagtgaggaaagccagccggtgtcctctgtgcccatgtcccatgtagtagccccaggcatgtcagggaccttcacagaagccacacccatcacagactttgaaggtctaggagggaaaaatgattttgtgggccaggcccagggctccctgactgtatgcagcttagggacttgatgcccttcatcccagctgttccagctatgactaaaaggggccaagattaaaaatatggatgatacgttattgaccacactttaaaaaatcacaagcaagtgttaaagacttttcagagacaaacactaaattgaagattaggattcaaattattgctttctcctaagaggaaacaatcttccagattttccatgtaatatgcttcttgacttagcttctagagagtgcttagaaggttaagaaacctagcattccaaatgggcattggaggactggagaagatagcacaatgactgaacaaaagatcctttaccttctcaccttccagaaacatgttaagtgcccttaaagcacagaccacttgacctcctttcctattcgtgtgtgtgtgtgtgtgtgtgtgtgtgtgtggtgtttactatgagctacagtgtttacgaattcagttttaatagggccagttgcaggactttcatttagctttattttcaatgacctaacctttgtagggggaaaaaaatttacttcagtggaaagctatacattgtccagtttctagatgacgcccctgcaagttatttgatccagattctatggaagttactttacaacttcatgaattgtagatgatatcaacgcaaatgattctatgtactgacacaaattctgtcctatcctgcagaggttcagtttacttcccccctacagtgaaaaatctttccccagctcttctgcagttattacaaaattttctatctctaaatgtatctgttctttgcattcttttttgaaatggttataattacttgtttctctaatgaatcaaataaactctttggcatatatttatcttcatatctgtatgagagacgatgaattgtggaagttaatattctatgtatgacatcctcctgtgtaccctatctccagctctcctatctctgaaactggtagaaagagcaacagatgaatccacactgttattccccttagactgataatggaaccacacaagagatactatacagttttattgtgggcaagaaggttttaggctaagaaaaacaggagaaaaaaactgatgttagtttgagaacgaaggttgagatttttgtaccagtctaagtgtagtatttctgccaaaatttttcaaccatttaacatgtggatggatctttacacaaaatcaaatcatgatggaaatgtgctgcatgtttattactatctcaactccctcattattaaggcagtataaaaatgactcttatttcacaagtgtctatagaaagcttgtggctaaaatgtaagtagactgaaaatgggaatatatcttaaagacaattcagagtcagttgaagctatactgcatgaaaaactgttaactctcctgttttcataaatgccaagtgcagcatattttaaattttaatttgtgtttgtattcttggtaatttttatcccccttcagccaagtcctcatttatttgttc

SEQ ID NO: 477753 - DNA, 592 bp, Homo sapiens
cctatacctcagctgtgagacttgggaacgtatcaacagaattgtcagcttctgcacaaatttaatcttcatcacctctatgctatgtttaacgtcagatggttgtgcttgccagggacttccaataatgtgcttccagaaggcaggcacttcataaacattaaacactggacaaagcaagcatcaaaaccacactcagatatcagacaagatctaaacataactgacggctatgctaagggatatgaaggaaaaagtggacaacatgcaataacaactagactcttagaaattccaaataattcaacaatcatttgtcctctcatttttgccttcaaagatgtaggttccaaaggtaaccaactgaggaaaaagaaaagaaaagaaaagaaaaagcaagtgaaaataactaccaaaagatgggagaaggggacggcccttaggctctgcacttatcaggtggtaaattcagccaggcctgtgtccttcacttcaaggcggtgagttccctaggacctgggtgggtacagagctgctgcccagaagccagggactagagtctgaaatcttagaagtctatttggtgttctat

SEQ ID NO: 477754 - DNA, 560 bp, Homo sapiens
acacagtacttaagacacacttctcttcacaaatacttaaagcatggcccgtgtaatagcttcctgggccacacggttcctcatcttgcctgaattcctccccctgcaccttttgagaactgctacctatgatgttagcagttgtcagacactacactctcattcactgcaccagccccttcacccagatccaagcattgcatcaccatctccagaagctgctgccttgtgtgtgccagatgataatttgggcataggcacaaatcaataccaggaatgggtgtgctgggagcgtgcactagaaactcttgtgaatgcctataaggaaagatttgtaagcactgtttgtaacaatagaattcaaaataatatagctgcttctccatcggttaatagacaagtaagttattttatttatacagtggaagctaaatagtacttaaaatgtttccagtatcctgtattattactatcgaatgtttgctgtcctatgtcccttacctagtggctgatagaagatttagccctataattttgtggtgtcctttctagtggggaga

SEQ ID NO: 477755 - DNA, 856 bp, Homo sapiens
aaaactgctgtgaagtatctctttttcttaggtacatatttgaaaagcatgcagggaacccatgccatgctgtaagaaccccaagacaggtggagggtttgcactggcactgctagcgatagtcccagctgaaatcctgacagtcagcaacaactaccagccatctgccagcagaaacgaagtcagtaaaggagcaagggaaaatgagtcaaatgagtcagcaaaaagagagagggcaacgggctccaaagaccagttgccagaactgaccttacatggagaagtagaagaagaagtaaagaagataggccaggtgtgcgtgtgtgtgtgtgtgtgtgcgcgcgtatgtaagtttctgcctggcagagacttgcaaatctctttgggtgcattgtcttctgatggctcctatattctctatgaaataatatttggtcactttctacatgtatgctgtgctttaattgtaattacataaaaatccttctcattcatagaaaaagtactgaagagaaatatatcaatatgttaataattatgttatctgtgttataagtttattggtgatttatattttctacattttgtttcatgtaaatttttaaattgaaaatacattaattttttaatgcagaaaaacaatgaagctctttgcttttccaacaagtgtgaactctggtttccggaataactacactaaaattatgaggttcatatttcatcttcagataaaaagacactacatcttcaaaaacttgtgaaaaactgaaaatgaaaattaatatctattcttattttagtgagttatcagcctttgaccttaaaattttaatttttttacatatttaaaaatttc

SEQ ID NO: 477756 - DNA, 1123 bp, Homo sapiens
agggctgaggagtgcaggcgcatggcacgggactggcgggcaactctgcccacggccctggcacgggatccactaggtgaagccagctggtttcctgagtctactggggactcggagaacttttatctaaaggattgtaaatgcaccaatcagcactctgtgtctagctcaaggtttggaaatgcaccaatcagcaccctgtgtctagctcaagatcatgaacccactgggaagaaagaacaactctggaggggaggaacgatgaactctagacgtgctgcgttaagagctgtaacactcaccacgaaggtctgcagcttcactcctgaagccagcaagaccatgaacccaccagaaggaagaaactcggaacacgtccgaacagcagaagaaacaaacttcggacacaccatctgtaagaactgtaacactcaccggacatggatgaaattggaaatcatcattctcagtaaactatcgcaagaacaaaaaaccaaacacagcatattctcactcataggtgggaattgaacaatgagaaaacatggacacaggaaggggaacatcacactctggggactgttgtggggtgggggaggggggagggatagcattgggagatatacctaatgctagatgacgagttagtgggtgcagcgcaccagcatggcacatgtatacatatgtaactaacctgcacattgtgcacatgtaccctaaaacttaaagtataataataaaagaaaaaaaatttagaatagttgtagatttacagaaaagtttcaaaaatatgaccaagctcccatgtaccctgcacccagtttcccctattttgacgttactattacaagtctgttactacaaatggagtcgtattaacacaatgtttagataacaagtgtttagataacacttgttatctaaagtccatacttcattaggatacttagtttttacctaatgtcccttgactgttcctggagcctattcagaataccaagggttggtatttagttcatttggcaatgtcatgtttttctggatagtgtagaatcttgtgcatatttatgggtgtctgagcattgaagagtcaggtatttattgtagcctttgcagtcaaggc

SEQ ID NO: 477757 - DNA, 566 bp, Homo sapiens
tgacactgtcattacatcagatcaagggtgccagcatgatttataacaatgatattaagcttgatcatacgaaagcgcctcatcccttggctgccataaccacaggcctatggggagtacatctacactacccctgctgtttgtttaatgcccaagggctcttcagtccgcttgtggtgaatgctgcttggcctaggactcacccttcagcacagtgggttcccctctggctgatggcaggtccagaaatgccatccaaaagccaagtcctggaattgaagaccccaagagcctgcttggtgctctaccctcctgtggccaagctggtatctaagacgcaagacaaaatccccatttgcttatctcaagttgaagaagtcttgcttatagccatcacagttggaaaagtgtcgcatctcactggaagccagcaagcctcagagtctctccaaaggcccttgatatggtacttcggtattgctgctggttattcagggcccaaggacacttcagttagcatgtgataaatcctgccagtacttcatccttcccttcaaggaatcggg

SEQ ID NO: 477758 - DNA, 1370 bp, Homo sapiens
agggctcctcaagcaccgccagagtggacactgaggccgagcaggcgctgagagcaagcgagggctgctagcacgtccaaacataggtaatgacacaggttttacctggctgccccagaggaaggctgccctccccacagcagacccagagcagggcccatgtgtggggctgcaccaaggcctccttatgggaagaggagggggcaagcctggagacacatcccccctctgcctcagtgcccaggactttccaacccctagccgttcctcctcaccctctctgcaacctcagggtccctaatactgcagtgagacgatccccaggagccccaggagacccacctgacccttcaccggtgcactgccccatggagcaaaagggaacaggggaaattaccatagagaagaagtctgagtcctgctttttgggctgtttcacatatgacaaagtctttactttggtaatgagggaagacactggtaagcagaggtctgcagccagacaaagttgggtagaaattcatttccagtagacctcagttgtgtgacttcagcaatgatttctaatagtttccacattccaaagacaatgagggcaagaagccaatattccatgcacaagctctgtgacatgaaataatgtacggaaattactaccattgctgattaacactcattaagcgccaaaagcatttgactttaatttgcagttaatttttttttctggtttacattttattcactcgacattgtgaaacacatttcaaacaagtccactttatattcataatttgcatgttactgaaaaatctccagtgtagtggctacattgctatgtgtatatatagtacattatgcaccatctaaaagaaacggtaaataataatataggtgcaaattatggatttttgtttaatctgtcctgtattaactcattcgaattgtcatttcatattaagattcctaaatactagtgtaacatacttatggctgaatgaacctagtaaaagtattttcaggggaactaccacaggtcaaatttgtggatttctatttcaagaaaactttactaagagtaggagagataaatgaggcacagtctcttgaggacttgaagctgtagcacagcattttagttcattacaggaacattagcctagcaaattgacaattcttacctctctatttttttaatatagttggccatgtcagggcatgtttcttaatttccaagggctaccgtaacaaattactacaaactcagtggcttaaaattcaatagaaatttattttctcacaattctgggggccaaaagtccaaaatcagggtgtcaagagagttgtgttccctccagaggcttcagggagga

SEQ ID NO: 477759 - DNA, 540 bp, Homo sapiens
cgaggcgccgagagggagcgacggccatcccacaaataagtgagaacatgcgatgttcgtctttctgtgcctggcttatttcacttaccactgctctctactcagggggtcaacaatgttaattacctacaaattgtgtttgttccaagcctttgtcattaaatctatactaaataaaggtgaacatcgctggcttaaggggactgctgactgtcttcggcccctaccaaatattaatgtgctgaatttattacagttgagctctgaaattaaaaatgaccatctgtggcacatgtgtgtggtacgtagaacagtaatatattgtaggccagcccaacaagacacaaaggatatcgtgattgtgacaaggtgggaaaactcactcaaacaccaagacagttcagtgaatctagtggacactggtattggtcctctctgcaggtatctgctttctgaaacaatgcacgacatatatgagatatttattaataattccttcaacatacctctataacagatggtgcgctctaaatctggaaa

SEQ ID NO: 477760 - DNA, 1219 bp, Homo sapiens
tctaagacaataagaattaaaccaatacgtagatattaatcaacacttcgaacttccttctgagataagatttctcctccttctcgccagctctgtgctgcatttggtggggtccccggccattagagagggggatgtggacagcctaggacagaactgtttgaattatagagtagatgccatcggtaccctgtctacaaccttcagatcttatcgcttctgtgtccactggcctactttcagctgcagataatgaaattgagaagttacgaaactctcccgaagcttgtatttctggatctagaaacgatgtcattaaccatcatatgatagctaaaaagaaacaggtccaggaagaatggaggtcccaatttacacttggctccgggggtgaggggccacaagctaaaaatgtgaatcatcaggacagtgccgccttctggaaaggtggaaatgtctttagcatatctaaaggcaggttaacccaaacacattcttatggtgatgccaggggtccgagaaagaaagtagaaatacccaagtgctttttcaaagcttgcttgagtcaagccactggttcaaggaaagaatcagtacagggtagcactattacagtatatagttgccaggaggtgtgaaaaaatggggacattaacatagccaatctaccgtaatacttaaaaactgtcggttttccttgtagctcttgtaataagatttactaagttggtcaactttggaaaccaccacattgtttttaaatcggcaactttatattatttgtgggcaaataacactccaggcagtccccaaattaacatattttatttcctgatgtgaataatggaagtcctgcagtgtttcctgagatcacttctaataactagcaatgttccgaatatcactcaaagtatttggactcaaatccatgtctccacttcggttgctagggaaacccaacctaagacaacttatttggcagttgcgcatttaaaccagcctagcaattttctattggatagctggcattgattgcaaattttatcctttcgtgtgttaatatttatatattactataaatgtgtcctgtagctttattatagaagagagttaagttacttacaaacagtttaatcctttcaggtcttgcttttataacttgttaagtgaatccataggatacttagtcgaaggttaattattctttactactgaggca

SEQ ID NO: 477761 - DNA, 721 bp, Homo sapiens
acctacgtagcaaatcctgcacgtgtatcccgtgcagcccgaggtaatgatcactggctataccgtcttaaacttctgctgggcggcccgcttcctaacaggccacagaccagaggacctataccacaattttgtgcaaaataaaaaagtgtactacgtctttggggccaattcagcccagtgccaagcaaaaggctttgcaagaggagcatctcagcgaacacttggcccattgactgagtatcctcatgcagtgcgcaacctgacctactttgttcagtgcacaggggaacaagacacaaagttagggaaaggataccctgaggtccagacagctcgtatcaggcctgtctgtgtgctgcccacttttcaaagatatatgtctctaattaaggtaaactgggcaaatgcgccagtggtgatctctgtcttccaaagcacagcatgcaaaaagctaggtgaaaactgatttagagaaaaaaattatttaatgtttatacctgagttgagattccttaataaacatattattagattgaagacttaacagtaacaacaaagattactgtgacttggtttaccaatatataaaatgaaagataggcttaatctatacaactttgaactctaaggcaggagggctagttttatggactctgatgtgtgtggtagattttaaaaacaaaatactactctattttgtgtctccttttattaaaat

SEQ ID NO: 477762 - DNA, 647 bp, Homo sapiens
tccttctcataaggtttgccagaatggatgctactcaccttcttccctactccctgctgtgtatacctgtacacaacatccaaagcaggacacatcagggaattcaatccaaaccctatcacgacatgagaaatcagtacactgtctaccatataggcattcacttattctacaaatatttattgagcaccacctgcttacatagcactgtccaaggtgctagggagggtacaaaggaagacagcagacaagccctcaagaagcttcagatacatgtggagaaacgtgcaagcccacaacgcagcccatttctactgtcaaagaaatggacccttgctacagaactgaagctggacccacttatcagccaacttagtctctcaattattaccaaaaatgtgttttcaacttggtgcacactgggggtgtgcctgagcaggatggcgagaaggggcaggcacacactgagaagcgtagacatactcccctttatctaagggctctgctatttaggaaagggcttttgtgtgaggaggttcgagcctcaaaggctcatcttgtcatttttcctgtgcctttcagagatggagcatattgtgctgtgtttttgaaatgatgaaatgaaagtgtgaggaatctgaaagcca

SEQ ID NO: 477763 - DNA, 767 bp, Homo sapiens
gatttagaaagagggggcatagataagccgtcttgatactcaggtggagatcagacccgagtcactgtgatcttcttgccatgaggacaacactttccaagttcttcaagtggtcccacaagttgctgagggagcctctagctgacagccagcaagaaactgaggctcacagtctggcagctggcaaggaactgaatgctgccaacaaccatgtgaacttggaggaggatcttgcagatactgacggtaaagaagtcctcagtaaggttttctttttaatgaaaagcagcccccaaatcttcttcttttctaacaaagagcagtttgtaaaactgagctgcagacacaaaaacgcaagctggaagcttgtatgggtgaatgctggcagctgtgccaataaggaaaggctacctggggctaggcgtattcaaaatggcggctccaccttcccctttccttgcaaaccacacaacatggccccaggccacgcaaagactccatttgcataataagattccagtagggcaaccagtttcctcatgcgctatggatgcgttattaatctattgctgttcttttctgttcttttaatttttcaatactctttcaatattgaatacatctctaagactgtgcttatatccatactcaactgtctttcaaaagtatatatgtatatatcacttttattaaatatatagtaagaagttattgtatgtttcctattgcaagccactggactgaaatttaaattatgtatataacat

SEQ ID NO: 477764 - DNA, 1269 bp, Homo sapiens
agcctaattctgagagtgcttttctgagcttcagcggaagcatgggagaacactgcccaccttcccgcatttttgtctcctgcatctttcaccttccgatgactgcatccccagaaaggaccttgactgcagcatcttacagactccaagccagaggcaccctgctaagctgcacctggattcctgatcctgaggacggtctaagatattcgccttattcctttagtttgttcctggcttctaaagtggcatccacgtgcataaaaatgcaacttatttcatcatttgtcagcatttccaaaacagagaaataccactttccttgttgggtagacaggtaccaagtggtaaaagtgtttaagaagaagttcatgtgtgaaaatacgaacactgagggctcggactcagacaagtgggagaaacgacctacctgcactgaagatgtaaatttaatgatggagtgaaggatgactattttgcttattcatctaattttacctaacctggactgatgttaactcaatttttttttatattctgtatttcatgttatttaaataaaaatatcatgttttccattgtctgcaatctattgaaactggaaaatatttttttatcattcctaccaggactagaatattattctatcttagagtcaaatgctagatggcttcaggactaaagatatctatcaacttggtaaatttcttgtgcttatcctgaattaattttctgattcacgtgaattggtttcagatttctcttgcgtctccttgatgttccttacaatcaatatttttaattatctggcattttaaagatttctttttggttagggcctattggtagagaattattatgatcatttgaagatgatgttaccttttattcatcttttctatacctttacgctgctttattcacatcttgagtaatagtcactttttctcattttttaatttgcttttataaatgtgaagggggatcttttttcacttgaagatataactatgatgtatgctagagtactgtgctattgtgtcagcagttataacgggctgtgtggactgatatccaggacaggacagtaggtggcactttcagtgttgaaaaacaggatgtaattgtttgccaaatcctcttgatttacccgattctgattaagaccttgagattagatgcaaacagaatgtcattcaatgaaatcagactctttagagtttgttggttgttttagtctctgctacattgactgtaaaactggtccca

SEQ ID NO: 477765 - DNA, 487 bp, Homo sapiens
tcctatgattgcaactaaagaaagtggatttccatggctgtgaagatagctgaactatttaacttgttccctggaagaaactttctccgtaattttgttgtggtcctacaggaagattctgtctccatgcacataggtgaacattattttattcctgaactttcggtcaaaagatggtgtcttctggacaaggtggaaatgaccattgccggaggaagcaacagaccccctcccgccttgctgtgtccgcctgacagggatttagcaggtcctcccctaacatcttctgcagaacactattggtcctctgcctggagcaacccaaaccctggagctactgcctacttcatattcaaagtgcagcaaagtcttaccttctgctgtgttccccattttgtttttctattctgttcctcaactgtggaaatgatcatcttttattgattccagccatgtctctttttatgtatatttttccctcttgcta

SEQ ID NO: 477766 - DNA, 628 bp, Homo sapiens
cagacatcgatggagggagtagactttggcagagcccctttgaaaaacaagttggcattggaactcaagttgtacatccacaacatttgtgtccaaaacattctacaagaaagtggctcagcagtcaggcctctcttctgtagcaccgctgaagtttgctgggagtcaactccagaccttatttgcctgagtcccttcttaacatggaggtatcaccagtggaggctagagaacagcaaagatggcagccttcttcttcttctgggagctctgtcccagaggcacactgacctattgccagccagaacacccctgtatgagaatgctaaattcaatgtgtcctgttgccttggagttagacggtgttgctacacattgacagaggacaaggatgacagccagggagctatcaccacatctcactcttatcacttcagttctaactgagaatttgtcaattttgttgatctttaattaaaagcaactattagttttattgattttttctattgcttttttattctccattttatttgtttctgctttaatctttattattttcttccttataataactttgtgttttatttttttttctgtttccagtcacttgaagtataaagaagct

SEQ ID NO: 477767 - DNA, 843 bp, Homo sapiens
cttcaggaaaacaaatatagtacctgaaggctctctcctctggctagaaagacaagccttctgccatggttttaggtttttcttcactgccagacatctatgcagctcagttactgagctgctctgggcagggtctggagctaatcgtcaagaatcattttggaatgcttcttggcaaatctgtatgggatgatggccataaaatgagatctaaaactgagctgcatttgaataagaacttagcctctgtattaatcctctcctcaccccctaagcatctcttacttgggtatgacaatcactttaaattccacaaagcaaggaaacttagaagcaaacaggcccttctccaggatttggttcttggcgttttgaacaaagaattggaaaaatgcgcaacaaagcacagaaagaatgaagcaacgaaagaacgaaagcaaggatttattgaaaatgaaagtacactccacagtgtgggaacgagcctgagcagcggctcaaaggcccggatacagaatcttctcgggtccaaatacccactggccacttcatgctcacctcatgtaaatgaagtggtggcctgcaatcagaggagttgcgaagagtagttacaaagtggactgaagtggagttaatgaagttcacactcctgtgcaaatatctgattggttgctttttgtaatcaatcacaggctaaggtggagttacaaagttgcacttctaggcaaaggaagactggaccggccatcagtctgattggttgcggacagccaatttcccatctgcttggcagaaaaggtcgggggtttgcaaagggagtagcctctggtccttttttccctt

SEQ ID NO: 477768 - DNA, 671 bp, Homo sapiens
agtccagtgacatcaagttggataaatgctttcattaggactatggaaacgtctgtggaaacctgtggcagcagtttaccctgtgacctaaattctctgatagaactaattgattttagtttaacttgttatgtattgttaggacagagtgatgacttccaagttccttacattcagttgactgagccagactttgctggtcctgtctgggctcctcacatgactgcattatggtataagctggcaggggctggaaagcccaagataatctctaccatatatgggatctttggtgctcactgtgagctgggatgctattattcccctctttgtgacctgtctctctatgtgatgacccatacctctggcctctacctggcctctttctccagcagcctgaagttggccttgactgtctgctggcctgtccgatgtactattttcaattggtgtttggcccctgaaaagtccgcacttacttattaagtcagcatgcatctaaaaatatgttattcatattttagctagcattttacattgttttcagtatgagggtcagtctgattttgtaattttcaatagtcccagtaagagaactgggcatttgtttttaaaggcatttaaatttataataagtttatgtatttttcgtaacttctataaattaattc

SEQ ID NO: 477769 - DNA, 703 bp, Homo sapiens
ggagccgcagccacacgcagatggaagcctttgactaattagttgagaatggtgacaactttgaagacatgctttcgaacagctttagcgttgacaatgctctgcaaatatggggacacagtgttactttctcaggagttgggaggggaggaggtaccaggcttgagtctggtatcttggctttggaggaggaacaactgaggctgtgcaaggtcacttgggcagctcaggtgacagtgctgcctgcagagctctcaggagcctttccaggttttttggcctcttccgtttcttctttctggatctgtggatgggagactttttccctgtcagtccagaccctgtctcagatgccctgtgccttacacagctggtcctttttgcttctggaccatctacatagatgtaagaatcacctgaagagcttgtcaaacccagacacctgggtcaccctcccagccattcaggtcctgcatgtctagccagctcccaggtgatgttgatgttgatgttggtatcttgagggaccacacttggtgtatctctgctctaaagagcgatacattgatgtaagcacagggttgcaaactggcctcctgcaggccaattccagccctagaatctatttctttccttgtaatattttaaaggaaaattacccacaaaaatctaaatgttttgtcttcttttgcaaaatgaaaac

SEQ ID NO: 477770 - DNA, 554 bp, Homo sapiens
gcagtggctgctccagttgtgtgtgggagtcgggggcgggccggggaatgggagatggagtccagggcaaggttctgaagttcaagggctctagcagtgagagccttatccacaagaccaagactcttcggaggccagcccatggcatcttctctcctgtgccctgtctgaatggtcctgcagacacctgctcttctatacccgagggctttctcttggcccaagaagtgagaagtttgaaagtgctgagaagtcaacatctccaggagcagccttcagccaacaatggatggaagctggaggataaatacaccagctttattcctgcaaaacctgtgccagtgagaagccttgagcttcagcttcattggcttcttgataaatccatctctgtggatttacatctaagaacaacttctcgtcatttgctgaaaatcactgaagttcgaatcttacaaataagatgaaaaagggaagagctactttgtaaatacttctggggaccaacatgctgctgaggttttaagatttcagcctgtctcctggtgatgttt

SEQ ID NO: 477771 - DNA, 1429 bp, Homo sapiens
aggggaggaaataacaaccagcacccaggagctgcggctggaggagaaacgaggctgcagtggtggtagtaggaagatgttgggcaaggtccagcagcaggagcaaactatcgccaaggacctggtcgtgaccaagtataagatgtgtggggggaccacatcgccaaccgggtacttcggtcgttggtggaagcatctagctcagaaaggagatgccatgattatggaagaaacagggaaaatcttcaagaaagaaaaggaaatgaagaaacgtattgcttttcccaccagcatttcagtaaataactgtggatgtcacttctcccctttgaagagaggccaggattatattctcaaggaaggtgacttggtaaaaattgaccttggggtccatgtggatggcttcatcgctaatgtaactcatacttttgtggttgatgtagctcaggggacccaagtaacagggaggaaaggagatgttattaaggcagctcaactttgtgttgaagctgccttatgcctggtcaaacctggaaatcagaacatacaagtgagagaagcctggagcaaagttgccctctcatttaactgcatgccaatagaaggtatgctgtcacaccagttgaagcagcatgtcatcgatggtgaaaaaaacattatccagaatcctacagaccagcagaagaaggaccatgaaaaagctgaatttgagaaacgagactcctctaaacagtatggactgaagaggaaaacttcacgtgccttcttcagtgaggtggaaaggcattttgatgccatgccgtttactttaagagcatttgaagatgagaagaaggctccgatggatgtggtggagtgcaccaaacatagactgctgcaaccgtttaatgttctctatgagaaggagggcgaatttgttgcccagtttaaatttacaattctgctcatgcccaatggccccatgcagaaaaccagtggtcccttcaagcctgacctctacaggacccgcagcagagcaggggtctccctttctcccccatcccagttccccaacccactcccttccaacaacaaccagctccagctgactctggtcttgggagagcagtttggagaacctggtgatttattgaagtcctctaaataccaactgaatggtgtatgtgggtgtgttgcgatgttctgccaggtggttttgaaaagagctttccaaggtttaaatcaaccctatcatcagaatcagagcaaatgccagctatttttttcataccctaattctggacctgattgggaacacctgttaggaatattgttcatttgatgcatattgagtcaagcaacatggtcacaaagagtttggtaacagcaaaggtagagccttgtgttggtgggtgaggcaaaaactttctgtgaagccttgtttgccaaa

SEQ ID NO: 477772 - DNA, 628 bp, Homo sapiens
cagctatcctattagttgtgtccctctagagaactctgactaatacagaagcagggtctgagatggggatttaaatgcatatgattagttgggagagtgctcttaggagaaaggcggaaagtaggataggacaggagaagaaactcagccaagatgtggttcagctgaggttttatctcagcctgatcctacaggaagctatagagaatgaagggcaccggagaccaagtccttccccctttgccttctgccatgattgtaagcttcctgaggccctcaccagaagtccagcagatgttgggactgtgcttgtacagccttcagaacacaacagcagtcagaataatgggtaccttgtggaggtattgagtgtgaggcagtatgaggaaagcttttatgctgctggcaatatccttcatcttgatctgtgtgatgattgcgggaagaagaaagaagaaagagtaaagggactggtttatgccataaaagatccagaaacatttatcctttgagagctggtctagaaaaagaaaaaatgatggtgaagaaataaacttagatatggcacaaaaggagcaactagtacttattgttatggacagtagtctttaaagcaaccactggctct

SEQ ID NO: 477773 - DNA, 1548 bp, Homo sapiens
caccatttcttaaagaaactgtgccttcgccattgaggcagtggattctcctctggtccaggtcaggtccagaatgccatccaagagtcaagtccacagggatgatctggagcctgggattgtggttgctggccagatgacgaggacttcagtaggcagctttactctggggtgggcctggagctttagtctgtggggactcacatggcactggagcaggctcaaagtctcaggtcactggggccagctgggcactgcgactagtccagggcctggagccagtgggatggcttggtggatcttgctaggtgttggaacaggcttggaagctcagtcttcagggactggcctggagtctgggtccatgaaggtctgcacagtgctgggttttactggggtgggctcagtgattgggcctcagacgaagtctaatgttcacttccctcttttcttccacatgaagatttatctctccgtgatgtgatgcctgaggttggaggaggagtgatacaggaaggcaaagtgtgattatgcagctctcatagataaagggattgagatccacagaaattaagtggtttatttaagagccctcctcttattagagataacgtcatgggttgtaagtcttttgacatggaaggataggaaatgttgaataaaggtgtttgatatatattcaattttgtgtatgtgtgtgatttttttcacagtcatttcccccaaattatgcatttaaaaataaacacaaaaatatgtcttccctgcagtaagttaaagtaaaactctgatgacttggaaatagccattggaaggtagcaaattcaatttaattcacgtttaataaaagaaaattattcaattatctctgttttcacagctcaaatttctatatacatgaggtaaaggcagattcctaacaatatgggtgagacaaaataattatgagagtaaatattataattatgtaaataacctttggaattttgggactttaactttataacacttacataaaatgtaaaggtcacaaaggataggtttttctgaaagtagttcaagttgaaacaaaaaatgcaatagcataaaatgcaccaaataagctttcataagatttatgtcttgtttctgtttaaccatttactacaagctccaaggtaacgaggggtaaaactacttaactatcaatattctcattcatactcatttaatcctcattattaagtatggatggtactaactgcttcactctttttgaggagttgtaagcatcaacaaagtgatggatgcaatagtaatttgtgaaatgataaagtcccgtacgaagggactaagggattcattcaggactaataaagtcccttgccagatgcctaattgcacatactttcttgagctacttctttcagtaaattgtttagctaaaatgagttttcaattaagtggaatatttcttttgggaaattccttgagaatatcacaatacattgtccatatttttacaacctataaaattttatcataaatatttgaattaatcaggcctct

SEQ ID NO: 477774 - DNA, 897 bp, Homo sapiens
cattactttcaatgttttgcttcaaccatctgagactgtagctaagatgagtgtcctggaagctctccatccaaggatctgtaggtacatggcgggctctgcttcccctggcattgcagcttttctgacacggactgctcatcagtttgagccactatataattggaaacatgggtatgatacatcaggatgcccacagcctgagttcatagttattcctcagcagaagtcagacatcaatggtacatggcaatggatccagaggaacattcccactcccaataccaatgtcattccagataaaatgctctttcaaacaagtataattccctttgtcacatcctctcagttcctctcggattttaaccacagctgtgctgggcaggtccattcaagtctcaagctgccagaggccaccttcatctgggaatttctctgctcttctgtcttggagccaccttcaaagaggcagaagccactcaacacacagcccagaagtatagaggaggtaaagtccatgagggatgggaatgtgccccagcctcttgtttgtcatgaagacaattctgagatgtttactccacaaaatctttattggtagcatgtaaagatatcttagagctattacttgtctccataaatgcaaatgctgacactgcaattgcaggacaagacttacttatacgggcttatctgggggacccaaagtagcctttaaaatgttactcttttattcacttatcaaatgaaaaccacaaatgcaaaatttccgctaaagaattcataaatcccagtttgattgaaactgttctaacatcaattttaaaatatcccatttcctgacactgcattcctggcaaataaatatctccagtttctgaaaatgagtagccttca

SEQ ID NO: 477775 - DNA, 581 bp, Homo sapiens
ctgctctcctacgggagctgaacagaatcaataccattatggacaaaagaataaccaaagatttcatgatgaagactccaaaagcaattgcaatggaagcaaaaattgacaaatgggatctaattaaaacaaagagcttctgcacagcaaatgaaaccatcaacagagtacatagacaacctacagaatgggagaaaatttttgcaaactatgcatctaacgaaggtctgacatacagcatctttaagaaacaaacaaatttacaagaaaaaaacattatgaagtgggcaaatgacattaacagacacttctcaaaagaagacatacatgcaaccaagaagcatatgaaaaaaggctcaatatcacttatcattagaggaatgcaaattgaaactacagtgagataccatctcacaccagtcagaaagactacgattaaaaagtcaaaaaataacaggtgctagcaaggtggcagagaaaaaagaatgcttatacgctgttggtgggagtgtaaattagttcaaccattatggaaaaagatgtggtgattcttcaaagacctgaagacagaactaccattc

SEQ ID NO: 477776 - DNA, 728 bp, Homo sapiens
ggtcaggaaaggctttgcagagaaaacaaggtaagcagcctttggcccaaggatacaagagacacttggatcatgctcaaacccaagccatgtcaagtctacctgatgtttagcttaaagcagaactgcctgctgagcccagccaaagccaccccagatacagacctgcagacttgggaaatgctagttgttgtaagacacccagttttgagatggttgattatacagcattattatggcaatagccaattaatgcatggcattgacaagacatcatttattaagtctgcatgttcggtggacctgaacagcatgtggtggcggtgtgtctggaattggtgggtccttggtcttgctgacttcaagaatgaagctgcggaccctcgcggaatgaagctgcagaccttcccggtcagtattacagctcttaaaggcagtacgtccagagttgttcgttccactcgttcctcccagtggagtcgtggtcttgctgacttcaggagtgaagctgcagacctttgcggttacatctgtgaactaccaccacatcaagaatcagaatgctatcagcaaaccagaaacttattaaaaagtttaaaaatatatgaaacactttaataggcactttacaaaagggatacacaaatggccaataaatatgtgtaaaatgtgctcaacttcattcatcatttggaaaatgccaaataaaaccataacgaggtacaatt

SEQ ID NO: 477777 - DNA, 1146 bp, Homo sapiens
cctgaatgtgagtacacgcactctccacctgtcttacgttctgtgagcttcccaatgaaccacgttctcttaagttacccaaagttaattcctgtaaccaactttgtgatcaaaaaaccttatcagacagagaattatggaaggagtgaagggagaaggtacacttttggaaaaacagaatgggaactgtgccccaagagtagaagacacataatcagacttaataccgagcagactggaataaacatcggctttcagtgtttctcaaatggaagactccaaggcatccattctgccctttctctgccagtgtcagcccctccctcaggaaggacaatatctaggagatctatgaaactcggtaccaagctgtcctccacaacctaccaaagccagagggtggaagaagggacaaatgtcagctgcagcaggtgtcctggtgaagcccctgatacctgggcatggggcaccttcatctgcactgccctgaggaactgtgagctgttggagatgccagcaagcttggctgtgtgctgtggtgaacatgaatgtgtaccggaccctgagcaaggcaggcatggccctgatttcacagtactagggaatcagtctgtgacaatggtcactgtttccttctgggagtttccagaagaaggcattatcatcataagaaatgacaactccgtgagtattattgcccctgaagaccttccagcaggacaaaatgaggaggtaaaagacagtgatattggtgattctgatcctgtcaaaatagctaagatatcaggctttggaaccaggcctctggggtatggattccagctctatccattacaattcgtgtgcccttgggcaaggtactttagacctgtgggccacactttccgtgtctgtgaaataggaaccaccctagttcacaagtgatttgtaaagtgagttaacatatataatgttttttaaaaaatattaccaaattgttttcctggcttcttacaaaaatgtatattcccatcaggaatatatacaacttcctgttgctctacattctcacaaaaacttagtattggcagacttaaaatttgtcttcaaatgtgtacgtagagatagatgtaaagagatatagtcactgagtgtttgaaacacaga

SEQ ID NO: 477778 - DNA, 1423 bp, Homo sapiens
actcctcctcctcctcctcctcctcctcctcctcctcctcctccttctccttctcctcctcctcctccccgcgcttctctggcggccgctcccgctccagctgcggcgccgcggccacatctggggcgcccatgtgcgctcgggggctcggctgcgcccgccccgccgccgaccccgcagccccctgccagcagggtggcctccggcccggcccgggtcccgggctgtcccgggacccagtctccgtctccgccgccgccgccgccaggcagcgccggggcttgctccgcagccggcttggacacccccggcctcgcggtggctccgccgtggtgcggcggcggcggcggcggcggcgccggcagctcctgctcccccggccccgcacaccccgccgcgcccagcgccagccccgcgggcccgggaagcggagccctggcgggagccgaggcgggagccgcgctgccgggctcccgggctcctactcctcctcccccggcgtcaccgccgccgccgccggccgccgcgccgggtcctaaagccgcgcgtctcaaaaggatggtgcgcctggcggccgagctgctgctgctgctggggctgctgctgctcacgctgcacatcaccgtgctgcgcggctcgggagccgccgacgggcccgacgcggccgcgggcaacgccagccaagcccagctgcaggtgagtgcgccgccggagagggccgtgcgcggctgcggggacggtttgtggggcgggggtgctgagctagtgccgggtggatgcagggaggcaggtcccctgccccacctaagagcaactgttttggcagtagttttgcccgggccacttgacttaggcagaggcggagcgggggcacgtgcctggaggctgcacccggcttccaggtctgcgggctgcgctccttcagttctgtctgtcacgggtcaggtgcggggttggtggggaggtgggaaggagcgaggtttgggatgagcagaggaagtgtggagaatgtgcttgcttgggggtgctaccagtctttcatactcagattagttctttcacatatatttaattaatgttaatgataaaacatacatagatatggatatagatatagatatataataaaagtcatctggaagacaaaatatagaatccataggcaataatagtactaataaaggtatctcctttgtctgaaattcaaatgattgcctttccactaaatctcagtcagttttagaatcatgaatttctatatatttttagtattttttaaaactacatataaattacatgcaataaaatggatgaatcttaagggttcagtttcatttttgacagttgtatatgcctatatagttaccaccaaaattaggatatagaacattccccatcaccccagaaagtcttctagtgcaca

SEQ ID NO: 477779 - DNA, 561 bp, Homo sapiens
caccacttgcacccagcgtgagttgaatccttacatatgttatcaaaccgaaatggggtctgcttgcctggcacggtaaggccaaacatctacattgaggtttgcagtgggagaaaggagggtgtttatttgcagggcaccaagcaaggagaatctaggcagctcgtgcttaagacccaatctcctcgatggttttcagcagaaaaagaatgccagccctggcttgtggatgtgaccttctccagaatcatacaaaatgaaactctacagatgggatcaaagaaggctgaagatgacaaagaaaaaagggagataacaaaaggaatagaagaggaaattttagggaatttgttgttagaaggtagaaaaagtggtggaattgcagagaagtgtatatatggggcaggagattctgtgcccatgtgttccaatggatgctcaatgctaagatggactcagcaggaaggtcagaaagaacacagtctggaagaaattaggcatgaaaactgggagaaggtggtctgtattgctttagtataacactgtctttggtgggcattt

SEQ ID NO: 477780 - DNA, 1375 bp, Homo sapiens
ctctataccagagttccccagtgggactgagctctggtgactcacagtggtaccttttttttcatctcggagatgtccagaggctgcaagatgcccaaccatgcacagaggtggagaagaagaagaagaagaagaagaagaagaagaagaagtcaaatatctggagaagaagaagaagaggaagaagaagaaaaggaagaagaagaagaagaggaagaggaagaaagaagaagaacaagaagaagaagaagtcaaatatctggagaagaagaagaagaagaggaagaagaagaagaagaggaggaggaagaaggagaaggagaaggagaaggagaaggagaaggagaaggagaagaagaagaagaagaagaagaagaagaagaagaagaagaagaagaagaagaagaagaagaaaatacaaatatctggagccgggatttgagcctggcccttgacatatggagctttgagagaggcctctcagtgaagagcccgggtcaacccccattccctcgttcaggaaagccagtccacaagagactccctgatgggccttgtcactttgtccctaagagttgctcactggagactttcagagattcaggacctgttcaagacaaacttacattaaaaaacaggatatcccggagcaaatgcgtagtttccagtttcatgacggcaaagagcacagatcaatcctgtccgccattcaaacacgctctggcatcttctatgaacaaaaataaaccctctctttatcctgtggtgtctccttctagctcatgccccatttctctgttcccctttacactgaaccttttcaaaagtgtgttctatactcactgtctccaaagcttcacctcccatggactcttcaacccactccaaactggcttctgcccccttgcccgtgaagctgctattttgaaggtggtagatgacctccatgcagccaaatccattgccacatctctggcctcatcttacccgacgtctgagcagcactggagtgatgggccccatctgcccaagcactgtcctactccttacgacctacaagttatgcctcacctgccctctgcacaagatccctgcattcgattcctcaaggccctctacctggcaggtttggaacactctgactcttcccgtggctggcttctcgtcattctcagaagcgccaatgccacttctctcctagaggccatgcttccaaatgtacaggtcagtaactgggagcaagaacttataagaatggtgcccagaaaagaggcccaagggagtctgaagaagcaggaggtccaatggagctctaaagagaaacctattccatctctaattttgcccaaagctgccttcctttgaccctaagatt

SEQ ID NO: 477781 - DNA, 1701 bp, Homo sapiens
aggacccgaagcgccaccatgatttatctcgccatctttgtgatccttccatatcaggacacccatatagcttctcccagccatgactatggcgtatgcagcagatcccaagccaaggacttggaatgaactagaagaacaaggccatcttaggcaacctcaaccccccaagatagtacaaaacaggtgctcctgctgggccaccgtggaaaatgccagtgaccccttgaccggatgtgacctccttgatgatgtggtctgctgctgccctggctcctcctctgacatgaaggacttggtggggatactcaggctgcttttggtgccccagataaaggctgctgttatatggggcttcttcccaaactgtcacctcaagaatatcaccctcgggttgcagccagatgtcccacttagccgcttccgtgaaagaggcctgctgccctatcctaataatgccaaagatgtgtgcttagacattattctgattacatttagactaatggttgcttgaattgttctcatatgtggtgacagatacctccaatgtataccttacattcattcctttaggaatttttggcagtcatcccatattctgaatgttatatttagggaaactgcttaatatttatcggtgctacattcaaattctcagtaaggaaagaacatcacaaaggcaagtaaaacagaattgtttggggatacatattaacaaaaataaaaaatgagtataatcttttaaaaccatttggaaagtaactattaaggaaacagaaactgtattatgttaaaagaattgtattataacatattaaaaacgtacacttttgatattttcataagtttatatcaattgaactgttattgatttatttttctaattccttggcaactgtttattttaaaataaattatgtggattacttactataatctgccactttcttgtaataacttagggcaacttcacaattctgtagaacattgattcccgacaaatatctgtacccctaaaacacagacagatgcattcttaatattcaagacaatgctgtatttatggcatacaaatttggttccaagaatattttgtttacaaaccaaaatcatctgggacatcatgtttcctccagcacttccaaaggtgtaatatatcagtgcctaaagtaaaaacaaacaaacaaaaaaccccccaaaccaggttggccatttaaatttgaaactcaaaccaagtattccatttttattcctagctccataatgacccattgagttactccaaaataaatttcaaatttcactctcctttgtaaagatgtttgccatttattaggggttaactaatctctggagtctgtgataagggcattgtataagatatttcatttaatcatcataatttccttatgaagcagatattatctatcttcaatgaagaggctgactcatgaggctttaagaaacttatggcataagaacactaaatttctttgactattaagttggtgttttcaactactacactagagctgcaggaatttgggaaagctcacaatagtgggaggtttgtgtaatatacatgaatataggctaattcttactgtgctttagtataaattatagcaataaaaccaagggcccttatatactttcctttcttggaaacgaaatatttttccttcaatatttaaaacattt

SEQ ID NO: 477782 - DNA, 850 bp, Homo sapiens
tcctccttacttgtttcaaagatagtagatgtcttcattctctcttctctcagtctcgctctctctctctcattttctctctctctttctccagcttctttacccacatttctgttgctatgttgtcctcacagttcccaatacttccagcagtgcgggcaggatttctgtaccaagctggcacaaacggcccaagaagaaaggtggtcactgggccagcctcattagagaactgtggtttcattttccttcaaaactcacgttttgggctttacatgatccttctttagccaaggactcatataattggatagctgctgttatattttgcacgccaaaatttccaaatagcaaagcgtcagccattttctccatagctttcaagtttcccatgtcagctgctttggcaaaaaggttgctgtggagattaaatgagataatccatgggaagtgcttggcattgtgcgtggtatagagtaagcactcagtaaatttagctgttattattgggacagttgcattgattctaaagttttatagcatggtaattgttctcctataattaggtggtgtcttgcattccaagggcagtgtgggcatatgggttccatagcagaaaacccaaggcactaaaagggatactagaagcagtatccagggctggagaaagttgctgataggaattgaagatatagtgacacataagacagaagcattttctgatcatatggagcttccatttgtctgtaagaaatacagcaaccagtaaacaaataaatgaacaagttagtatcagatatccatacatgctatgaagagaataaagcaagaaaatgtaaaaagtcaaata

SEQ ID NO: 477783 - DNA, 728 bp, Homo sapiens
ctcccacctggccaactcggaatgggtcatggctccctcctgttcccagcttccactggctctgcggagcacacagccctaagcgtgcttcccctgctgcagctggcatttctgcaagcaattctatatccacccatcatcaactctatcaacctaccagcagctgtaacctgcactgcctcaaccccagacacaaactacttcaggcacatgtttactgggatgtgtaaaatggatctgagacttgacatgttgactactgaactcttgatttttctgaactccaaacctgttcctttcctgacatctcctaggccagtaaatggctccttcatccaccagatgcttagaacaaaaatcttaagctcaccctctgcttctttctctcatacacaatatcccagttatcttgagctttatcagcagaatttaatgtattacacagtgccaaggaacagtgactattttgggggatatgaaccaggaaagaaaaaagggacatagattgttaaggaaaacaagaaatgtctttgattgttgagccctaggaaaaatcagggatttttaagagtaatgaggggaagtgatatcaaaacattcttgtgaaatgtgcacagtctcaggcaggcagttactcattgctttctaggtcaatgccggtgaccttctgcaggggccatcaacctgttcttacgaggccggtcagctcattcccagagttgttggtc

SEQ ID NO: 477784 - DNA, 1021 bp, Homo sapiens
ttctcctattccggggttggtaacctggatttaatttttcaaaatgggtcgtaaagcagcaaagacaacctgccacatcaacaacacatttggcccaggaactgctaacgaacgcacagtgcagtggtggttcaagaagttctgcataggagaagacaagagccttgaagatgaggagcatagtgggcggccatcggaaattgacaacgaccagttgagagcagtcattaaagctgatcctgttaaaactacatgggaagttgccaaagaacttaacgtcgaccattctatggttgttcggcatttgaagcaaattggaaagatgaaaaagcttgataagtgggtgcctcatgagctgaacgaagatttgaaaaatcatcattttaatgaagaagctccaaagcacttcccaaagccaaacttgcacccaaaaatggtcatggtcactgtttggtggtctgctgccggtctcatccactacagctttctgaatcccagtgaaaccatgacatctgagaagtatgctcagcaaattgaagagatgcaccgaaaactgcaacgcctgagccagcattggtcaacagaaagggcccaattcttctccaggacaaggcctgaccgctcgtcgtacaaccaaagcttcaaaaggaattgaacctgggctgtggcagtgagagtgctgaattctaaccactagacaagcagggaccaaatacatatttcttaaattgaatttatcatgagcacattatatgaggattgggtaaaaagtaactaaaaaaatggccaaagaaacaagatggaaaataacttccattttcagatagtaactatttaggaaacattgaaactttggaagtgaaattgttattgtgtaaatattttaaaaaagcatgtttatacatctttcacactctttgagtcttatatttttcctttaaagtcttggaactagacctttatgatattctaaatttaataacacttaacaacttgccctaaatatccctactttataaca

SEQ ID NO: 477785 - DNA, 631 bp, Homo sapiens
gacttaccctccactgtgagagttacctaaagctcggcgtccacgatggtctacagggcttccgaggcgatcaggcagtgtcagtcttcagctgctaagccgagaagatctgggaaggagtcagtcagagagccttgggccagagttccagggggctctgggagtggctgccaggtgagttggacagtccaattttcagtggggtcccacagagatgggacgcggcttacgaggaatcccaggctgcaggcattccttggcccgatggccagatttccagcacttgtagcaagctcctgggggaggaggttctggaggaatgcctggctgctgcggttcaggcgtttggaagttcttgtgtgctggagatgtggctggggtttgtctcacagtggaggcaaggaattgcaactcagaaatatattgctacttggctgtctctactctattattgtacaccttgaagggtctagggctgtaaagcatctcagagttgctgccaaatgagccatgaactgggctggatttttatatttgatgaaaaagagcctaaacactctctgatttgggataaaggaaaaggagcattaaccttgactatgtctttagctctagccacctttttaagagt

SEQ ID NO: 477786 - DNA, 791 bp, Homo sapiens
ctacagccttgctacttaaagtgtggtccctacacaagcaatatgggcatctctggggaacttgttaagaatggagatatcagtgcttgcattttcacaagatctccaggcaaatcccaaagctccccccagcccctcttgcagttgggcagcaggtcctctggtacctggcccctggacagtgcccaatgcaaggcccttagtcagattcctgtgaggcctggctgtggggagtaccaagaggccccctccccccagcagttcccccagtgccagggaacatcagacacacgtctcctggcagtgcgggcaccagcaggcatctgctcatgcccagtgctccaagctgcatgtggagaagtgcatgactcccctgtctggtgcatgactgcccctggttctcaaaaaccatgtacctctggggaggccagctgtgctccagcaaatgacaaacactccctgaaggtggaagagatgaatgaatttgaagagacactctcccagctgcccccgtctcagctctgctgccatgggctgtcccgcctgaatctccacacgtggaggcagctgccatgcaaggacacagctccaggtggaggactggcttcatcccacagcgggtgccattcagcgctgtccctgcactccctggatcccatcaccgggcaaattagtgtggaagctggaacaactatacgtcagtttgccaccgtctggcagaggccccctcaggactgttgattgtggtgaggtactgttctaagcactttccatatatttatgcctttcaa

SEQ ID NO: 477787 - DNA, 743 bp, Homo sapiens
agagctggagtcaccgcgtgtggatggtggagcccaggtcgctgagggtatttgcgttaaaaatagtgacagcacacatcatatttctgagtgaagaaatggcactgcatccctccatgttcataccaatggctgaactcatctctctgggatcgggacttgagccaccttgcgctgtcctcctacctctgggttcctcttctccggttatctgcaccctggctgcctgtctcctgttcacgtctaaaaatcgcctcagggttactctagccctggggaggaattggagagcagtctgcctcctcgtgtcactctttgtgattgtccaggacctttatttgcacgtggcctttatttacagacaagcgccctgccctccaagtgaaaacggcacagaaagcctttattctgcaagtgaaaccaagtacctggggccagtggaggtgacttgccttggcatgtgaaatgtaataaagccttatttacaaacacaggcagctgggccaagggctgtagttttccaatttttaaaattttatttctagctttattgaggtgacccgagccattttacactattggctacaaggttcttgtgaggcttagatgcagaaaaggtgctccctgttcacatggctacagccactgtggcctctttgctgttcttcaaataaatcaggcatacccctaccccaggacctttgcactgactgtgtcttgagcctaggacactttttccccag

SEQ ID NO: 477788 - DNA, 816 bp, Homo sapiens
tgtcttctcgcgctgagtcagttcctggagtgaccctgagaaaggcattcatttggaagcttttctccccgcactctattctaagtgacccattgctcagtgcctattgcccagtggacattatgaagtcctggaggctgccagtctcctcactgtgactggagtcatggctccaggctctgccggcttcatgcacctggggagagtgaccagcagcactgcccagagtcccgtgctggccctgcaggaacaaaggccttgcaggatacgcagtttggtgcctgaggactgtaaattgaatggacaaagatacattaataggagaagaagtacaacttttattgatgctaagattttacgtgcatgggagcttctcagaaaagaaatgaaaacacgaacaagaggaaccaatgtggtctgtctggaacccagcatccaggaactcttgggacccaaaccaggtttgctgcagaatttggagacatgtccatccttcagccagcttcagactctcaattccccagccttccccttgggctgtgcagacttggagattgatgaatgcactgggccacaggaagctgcacagagttctggcctcctggaggacatcaatttggctcccccttttccctttagtggtaattgaatgtcaggataacagatgaagggtggggagaataaaccacattctcactttccacaagtggggggaaaggctttgtggagaaaggaagggttaaaatgttaagacctcaagacttaaatttcagttaagtttggtgtttgttgttgttattagtttggagagaattt

SEQ ID NO: 477789 - DNA, 843 bp, Homo sapiens
caccactgtttgagtgacactttcaagtctctgctcaatgcaacctcccctgagaggcttccctgaccatctgataaaacagcacaactttggcttgtcagaccatgtccctgaaaaggcaaaactattcagggaacctggtgagtgtcagcccgagaaatatgggcagctcatctacatatcttttagtgaccttctggaatgacagccaagccaccaacgcttccctgtttgcaaatgatagagatctcatttctggggacgacaggattgatgtggcagccgcagtgccattagacctggaagatgctcttttctcattactgtctcctggcaacatagcaccagatgccgccgtgaatattaatgatcctcattcatcctgtggtcataatctggactcattcagagaaatgagtggagacaaagctaacttttcatctaaccttgcccacaagatttcagaaaagctcctgtttcaggggctgtgtggagcagacaccattggtatatcctgcctatatcccgtcacacttaccattccaatgccagctgagggtatcctcctacaacatcgctactccacctgatggctttctctcagcctatgactgaaccaagtcagaaataccaaagaggatgctggcttattaaaatattaacaacagtatcttttgggtcttcaagtcatcaaggcaagtatgttcttcttaaatcatatctattgcttatttatatttcattgattttgcaaatgcttcatgaatggatctttttttgcaaactttaatgtcttcctctttaaacagaatagcaacattcaaaaggatattaaaatgagaa

SEQ ID NO: 477790 - DNA, 1395 bp, Homo sapiens
tttgttttgttttgttttccatctaataagggcatagtgataactcattgtggttatgaactcaaatggttttggctcgtattatgttcaggagcttattgtggctagaagatggaagctaaatgatcatctcaatgaaatacataacaaacccactgaaattgtaaatatggaagatttgcaggctttaagagggtatgaactgtttgactttgtgtccaggcaaaactcaaaagaataccttccttacatcctgggagtaatcatggccatagattggtaccacatacccaagacatttcatttggagcaagccaataaagtattcctgaaatacagccagaacagcagaaggaagaaaaggaggagggaagttaacaagaagagttggagagcctattacatctttatatgcagacctggtttatctttgcaatgctggtgcaatcttttatcatgcagataaattctcatttattggatgtatctttactgataaacatttatgttgttttacaatcacaagtaatgctgcaattcatagccttgcacacatgtcattttgcatatctataaaatatttaaagatgcattttatcatttatttctgagtcaatggcatgtacctttttagttttaacagacagagctgacacaccctcactaggtactgtactcctttgcatgcccattagcagacctgtttctacatacttcctgcaaacttgttatcaaacttactgactttaccaatctgataaatgaaaaaaaatgaatttcattatttatcttcatgttcagcaactttttttctccctatttattcttgcatttcatttctttcttctgatccacttctctttttcctggagtttatcctttagtaattatttcaatgaccatccactagagaagcatgaagcatgtaaaactacacagtttcctgagtcactttccagagtcttacccatgctgtcttttcaaactttattccttgtccctaggagttcatgagatttccttttcttctacttaataaaactcaagttgaattgagttagtgcctgttctgtgaagccagtgtcctttctagagaaaatggcatatatatatcacaacttttttactgcatgtgacaacaaaacctgtcaaatatgctaataccaaataggaatgtgtggttccagaggactcatttgatccaagtcaagtaatgctcttcacttagttgtctattgtttcttatgtcaatttgctaagtgctggctttgttgatgggcaactatcaaatatagtgtttcaagataacttccaggtttaatgctaggagaaaaatgaagacaattttccagcaatcttcataaagtctccctgcatttcattagctatgatttc

SEQ ID NO: 477791 - DNA, 680 bp, Homo sapiens
ctcccacctgctccatggagcatggcagcgtcagggacccagctttgccttccaccctgcaccttccccacagcagcagcgggtgacagtggtgacagggagccagggtctggagcggcagaggctccaggtctggtggcagatccaacctggctgtgtgagggtgatggcggtgtagtcagctgccttggggatgcaaggcacaggggacccatcgcttccactgctgctcccgcagccgctcctgccgccactgctcacacctccctgctgcagccaccagaacagaacacagatacagattttcagggccacaggaaggaggccacaggactggctagtgagtggcacctcagatcagaccgctgtagttcaacatggaaaaggaggaatttatctgagaaggatgctgttcccatgaacattgcagagttgcaatttcaaatgggtcatgaactataaaaccaggacttgaagaagaggccaaaataaagagaagcttcaccaggaatttacgtatgacaaacacaataacagaaactcagatgcagcttttatttaaattcagggatacatgtgaagatttgttatataggtatacttgtgtcaagggggtttgttatgcagattatttcatcaaccaggtattaagcctagtacccattagttatgtttcctga

SEQ ID NO: 477792 - DNA, 769 bp, Homo sapiens
gaaactggtccctggtaccaaaaagaaaaaatggttcctttcaaactattactgctcattgacaatgcatgtggtcacccaagagctctgccgaagatgtacaaggagataaatactgttttcatgcctgctaacacaacatccattctgcagcccatggatcaagaactaattttgactttcaagccttacttaagaaatacatttaataaggctatagctgccatagacagcaattcctctgatggatctgggcaaaccaccccaggcttcaacaaccacagcccttatcagcctgtggttatcaacactgaggcaagaccctttataagcaaagagataatggagataatgaaggctcagatgatttttttaagcagtaaactatttttaattgagagtgaaaatatgaggagcaaacctgaaactgacacaagcctagagtccagcccagcccagccgattgacctacggctgatccatggacctataaacaaatgaacatgtatttcagatcactgtgttatagtgtttgccggtgagtgtgtgtaggagtgtatatacttatgcatgagtgtttccatattgtatgtatatgtatgtagaattaaagctgattagactttaggaactgggagaaaagtgggggatatttgttcacttgttcatttagtaaatattaatggagcaactgccaaatgagatgtactgttttaaacactacaactatagttgtaaataagattcacctttctgagacttacatttt

SEQ ID NO: 477793 - DNA, 502 bp, Homo sapiens
ggccatgccctacagtgtagatggcgtttctgctcctctcccatctgcttctttcctcctacactcagtacacatggctggcaaagaagggaagatggagctgccatgtttgatatggctagccccagggccctgccctttgactaagtttgtgactgtattgccttcaaaaaataaaacatcccctggtaaggccatcctaccagatctcgtgcgacttattcactaccaagagaacagtatgaggaaaaccacccccatgattcagttatctccgaccaggtccctcctacaacacgtgggaattatgggaactacaattcaagatgagaattgggaggtagctggagacactggttgtgaggcactacctggtactgaggagcagggttggggacccactttaaaaagcagtctggccacattttcacaaaggagctgtgctcgggggtccactttagcctatgattgccttggactctccaaagtctgaaggctggaa

SEQ ID NO: 477794 - DNA, 600 bp, Homo sapiens
agaaaaagaatgaaagccttgacaaccgtggaaaaaaggctcaattctttgagagaggatgtggtgaaaatacccctgaaaggcactaagaccagcatgggcaaggcccaggaccttggcatgcattctcctaacctgatgaggttgtcagtagtgcatttcggatcatcagctctgttttcaggattggcaattgccttgaggattgttcccgggatttctgaaccaaattccaatatgtccactactcaccttacacattttagacatcatccaaaacgaatatttgaaaaaaaatacttcgacatagagctcctcaatatacaaatattcctgtgtctccaaaagcaatggaaccacagtcagatcatgcagccccttacaaatggccctttaaagtttacagaggctgcaggtggtgtcaaaaatatggaacgcttcacgaatttgcatgtcatccttgcgcaggggccatgctaatcttctctattccttggattgggtttcaactttctcctgaatgttaatgatctttattcctatccataatctgaattctgtttctaacatttcagcttggttaaggaccattgctgggaa

SEQ ID NO: 477795 - DNA, 870 bp, Homo sapiens
cagatatcctgtccttggagccagtctgcaccaaatatgcgttcttgtgtccacaaaattggaggagagcagattagtgccattggaaggggcatatgtgtgttgctgggtatttccctggaggatacgcagaaggaactggaacacatggtccgaaagattctaaacctgcgtgtatttgaggatgagagtgggaagcactggtcgaagagtgtgatggacaaacagtacgagattctgtgtgtcagccagtttaccctccagtgtgtcctgaagggaaacaagcctgatttccacctagcaatgcccacggagcaggcagagggcttctacaacagcttcctggagcagctgcgtaaaacatacaggccggagcttatcaaagcaatgaacgagagttcctgtggctccccattcttgctaatatttggtgttgtaattgttttggattttggccattctaataggtatgtagaggtacctcattttaatttgcatttacctgatgacatatgatatggaacattttttcatatgcttatttactatctgtatatcatctttggtgaggtatctgttaaggtctttggcccattttaaaaaattggattgttttcttactgtgttttaagagttctttttatattttggatactagtcctttatcagatatgtcttttgcaaatattcaacttgcaaatatttatcctttatcagatatgtcttctgtgaatattcaatttacaaatatttatccttataggatatttcttttgtaaatattttttctcaatctgtggcttgtcttttcattctcttgacagtgcctttcatggagaggaaaattttaattttaataaagcttagctt

SEQ ID NO: 477796 - DNA, 798 bp, Homo sapiens
aaaatcagacaaggtgagctgcctgcaaccagcagcacttacctaggcttgaaggattaaaacctagcccacaggaacacgatgtctgctttgacctggttctttgtggcgcaaacacctgcacaggggcttctcgtaactgccacaggtccaggacagcacaccctgtttccattcttgctggacaatgccagaagtgggacatctcttgaactgaaatcccacgagtctgtgacctttggcttctccctgtttcttcctgctacttacaggcctggtggcagaggctccccaccacagacactgccagagcccactgtgtcccccagcccagaggtcacctgcagcctccatggacaactgacctgcaaatccacagcctcctacctgagcacctgcccctttctgcttaaggacaccctgtggccacaggcgggcacaaggcctgagtatagggcaggccagaagtgtccagaagttaaggattctagaagtggtcctcagtcactgagaaatgagacatggggtgctaagaaccccaccctccttctgcccactgagccaactgagatatgtcccacacagtccccctgaggacacctgggatggttaacgtgcccttttaggctttcctcccttggcctcccttcctagtcctcacttccttcatggaaggacctcctaaacaaaccacctgtatacctaaatcctttcacttggggacctaaaccacaagcattttaaatgctttgaaaaaaaccacatgttaacatgagaattcgttatgtgtaactcatt

SEQ ID NO: 477797 - DNA, 1127 bp, Homo sapiens
tccttcgggctctctcaccttgctgggaggagttgaggttttctaggtggagtctacagaggcaggcaggcctccttgagctgcggtgggctccacccagttcgagcttcccggccgctttgtttgcctactcaagcctcggcaatggtgggcgcccctcccccagccttgctgccaccttgcaatttgatctcagactgctgtgctagcaatgagcgaggctctgtgggcgtaggaccctcagagccatgcgcgggatataatctcctggaaagggaattccctggccccttgcgcttcccgggcgaggcgatgcctcgccctgctcggagggtatagaggagtgtgaaacaaccggcggagctgccacaggtgtgagaggaggggagtttcgacgtctgctggcaggtcggtaggactggacttggggagagagggagcacgtagaggaagagggacgtaaacaagacttcgtaagtgagcagggcctggaccgcagaggtcttttcttcagcagtttcttatgtgatatgactgtcaagcgaccctagagaacaggatgcagctctgccagtgtggtgtgatgaaggcccacgatgtggacagtggtgttgtggtctcgacaggccatggggttgcacagacttggggtcgaatcctggccttgctattgacctgctgcatggcctcaggacagtttattcaattattcagccttctatgcttctgttccctcatctgtccgaagaaggaagtgcttgccacttggagcatggtcatcaataggtgcattacttcaattcccatcgaaccctcattcctccttcccatgttgcccattcttgctgaaatcaggccatactgttttcacagtattctgattaattcaacgatcctgtcaaaaaatattagttccgcacagtgcgttatttgtgaattcattctcagttccaatgatcactgattctttctttacccttgacctttggaagtctgattattaaatgtctttgggtagtcttttttgggttaaatcggcttggtgttctataaccttcttgtacttgaatactagcatctttctctaggtttggaaaattctctattattattcatttgaagaaaca

SEQ ID NO: 477798 - DNA, 686 bp, Homo sapiens
cgggtgataaaggcaactcaagactgtctttcctaccctcttcagtgcctctttccttaatatgatgtttaaaccagttctaagttgctagccaatcgggacaaatacagactgtgaggtcccgttccagccaatgaaaaccagacacagcagtagggtggatgcatcagattataaataacgctatctcctttgttcggtgtactctcgtggcaaaactgctggagagtggcaagcatcacatgtctgagtctaccagtggtctcaatctaagctacatattacagccacctggggaagttttgaaaatcctggtgcccaggctgcatccaaagccagtgaaatttcgttattcagttacattggagcagtatctgagggcaaagccagcactccagaccctgcaccatttttggtggtattccagagaaaatgggatttggtctaggggtcttgtcttccttttctgggccaagcacagggataggctttgccttctctgtggtataataaatggggtagaacccaaggaaattgttggtgggggttgctcggtatgtgaagtgggaaactttatgccccagagctcagcattaccagaaccaggtctggcttccgtcctgtgcaagttattagaggcctgaccctttcaagccatttgacctctgcatctctcatatttgtac

SEQ ID NO: 477799 - DNA, 844 bp, Homo sapiens
ttaagacctgagttgatatgacttctacatccaatttggggaatgaaggagggaactttccacagaggatgtatgggaaagccctgggtgccaaggcagaagcctgatgcaggggcagagcccttgcagagaacttctactaggtcagggctgagggtaaatgtagggctggagaccccacacagagttcccaccagggaactgcataatggagctatgggaaggggcccaccatcctctagactcaagaatggtagagccactggcaacttgcacccggtgcctggaaaagacacaggtgctcaactccaatccatgagagcagtcatgggggctgcaccctgcaaaaccacaggggtggagctgcccaatgccttgggagcccaccacttgcacagtgtgacctggatgtgggacattgagtcaaggattatgctggagctttaagatttaatgtctgtcttgctgggtgttgaatttgtttaatataattctattttctctcttttattagcatattagttatgcttcttttttcttcttaccttttttagtgctcaccctaaagttttcaatatgcatttataattaatccaagtccactttcaaataacactatactcttcacttgtagtctttattgaaggacacttggcaaataaaaatggtgtatatttaaggaatacaaggagcagtggttcagtagtcaccaatttgatgttcactgtgactttatagaacatatactactgcgaataataatagactgtatgttcaactttaatgcctaatagtttactaacatgatcgtatgatctagggagctttaaaaactgcccttggt

SEQ ID NO: 477800 - DNA, 582 bp, Homo sapiens
tatctgagctgcagagcatacacagttgtggggaggatcaggccttggcttgctgctatattggaccctggatagaggttgggaagtccatggatgaattttaccaaggtccacgggtcccctgagatttcaggcccctctgctgcaggtctgctggagcttgctggaggtccactacagaccctgtttgcctgggtttcaccagtggaggatgaagaacaacaaagattgctgcctattccttcctctggaagctttgtcccagaggggcccctgccagcagagcttaagcgtcctgctgggagatttgctgctctcttcagagctggcaggcaggaacatttaagtctgctgaagctgcccctacagctgttccttcccccatgttttctgtcccagagagatgggggttttatgtataagcccctgactggggctgctgcctttctttcagagatgccctgcccagagagaaagaatctagggaagcagtctggcttcagcggcttcgccgcactgtggtgggttccacacccagtttgaacttcccagcgtcttagtttacactatgaggggaaaacc

SEQ ID NO: 477801 - DNA, 689 bp, Homo sapiens
ctcttctctgtaaggggaagtccctggatcctggcaatcagagggctgtttctagtgtgctgtgatggacgtgcttatcttccgctgcagttcatcctgcaacagtaaaactgcaggcagcacacagacaagtttctgccgacaggccagataccagaagtataaacaagagtgatgcctgaaaacaacaacaacaaaaacaaagacaaaaccaaaaccagacaacaacaacaacaacaaagacaaaaccaaaaccagacaacaacaacaacaacaaagacaaaaccaaaaccagacaacaacaacaacaacaaagacaaaaccaaaaccagacagcataaccacctaccccccaaccaaccaaccaaaataaaaaaccaagaaaacagaaacaacaacaactacaacaaaaaaccagccaccatccccccattccttccctcctccctcctgcaatgtaagcagctaactttgttgctgatttctcttacccggaaggtttttgggggcagagggactgttgatagaaatatggatgttaaagtttcaccctgtgtgggggttgtcaaacaccctatacaggagtgttcctactggcatcaggttggtgcccctcgaggtcagagatcccagaggatggagcaggcacccatctttgctattctccagccttcttgagtgacatctct

SEQ ID NO: 477802 - DNA, 610 bp, Homo sapiens
tgcaaaagcaataactggtccctgtgagggcagtcttcattctgcctcttccctctccccagacagcttaaagctgttgcttcatctgaacgtagggtctgggaagagggcacgatgtgtacctgtattttagtggcatcacctgcacacctgctccactctggggatgttgttccagtctcttttctcatgagttcctgtttaagcaagtctcctgaaccctgggtcacagttttcttgcctgtaaaattagaggttggactaaattatcttggaatggatggccctcagaccgtggacaagcggagacttcacatagcttatttcttgggcttcccctcaaatgtctgtttgaagaaaaggttttgtgaaaaaaaaatccactcagaaatcaggtcagtggttgcctgggagcagggagtagaagcacgggcttcaaggagaggcaatagtataaaaatatcatgtacattcattcttccagtctatttgttgacatcttttcatacacacacacgtgcgcgcacacacacagacacacacactcctgaaaacaaagtcttattttgaacttttgtttgtaaatttatgcaatcagtttcagagtata

SEQ ID NO: 477803 - DNA, 1980 bp, Homo sapiens
tgccctagacagcttttggtgcaagaagcatgagagacatgtgaagcagacctgcaccccacttgttgtctggagccaagcccacccaagcccagcccaggtcagccatacttaagcccaaatgcaggtcctgaaagtatccgcactgtacagatgaggaaaactttcgcccaaggactcagtttctcttgaacttcttcttggaaagcagctgcacgtgggttacttacctcttccttgcctggtactgtgaatgcacagcctttcccaaacccaggctggtcatgctagggtgaactctgagcaggatccttgcactatgcgagggcggaagtggacaggactccagctctctttgagctcagccctcatttcacagccagaaaatgccttctgcaaggtcacagagcttggcctagcagccccctctgtggactccaaggtggaaggaactcaaattcagttttgctacatgctgaccaggcccggtcttgtgtccgagtggcatgtggctgtaagctgctgtccctggtgggctcagctgtatggtgactctttcacagactgtaagaaaggccagtggtcctggaatgagggtccacatcactccacgcagacccccccattttcatcccggctgtcccaacctccagtccacacggggctggtggtgtcaccccaccaccctggggctgcacctccaaaagggctcagcttcacatgacactccttcagaggagatgctctgggcttcatctgtggggcagtggatttcccctcagcctccctcccaggggcctagcagaaggggaggctaatccacccctgccagagcgtcccagattgtaactggatctgtgcattggggcccatattgcacaaggacagtgtctgctcaacttgcctcccccagcatccttggctttaatgtcaacagccagtgcctgaagccaaaggggtgctgattctccattggagactgggcgatttcccaggccaagtgtctgcatgagttatacatatgccttgctgatgctgttgttgaagagagaggaagatttttggtagtaaacaaggaaagatgaaatgaagggagggatggcaaggggtggttccctgcccagcctctgagactgcttaaaattcccagggggagagccagagacaaaaggcaatagaacttgtttacacaaggtgttttgagatgctgagcacaagcatccatacttcaaggtccaggcaaagaggtgcagcacagaataggggagcaaggcatcctgttctgctccggcaccttgggaatcagggtttgggcagctctgggaggagggatttacaagagtgtgctcacggagggcactgatattgatggccaaggaccatgacaagggcctgcaatagaacatgggaatatttgtgcctttacatctgtaaaacaccagctgggaacattccaaaatagtgggaggagatgagggaggacctgtgtccctgcatcgccaggtgcagccttggagctgggacaggtatatgatgtgagtatgtcctcatcgtgttcatagtcacgggtgtttggggagggtaatagaaggttaaagatacagtcacaatcatagccatttttggtaaattgcagtggcagtcatgtctgtgtgtatgtggctaaaaagtgaaagacaaaagttgagtgggtgagtgtgtaagactgacatttataccaagtacctgagtcattctgaagcaggtggcctaccacatggccttgttgattaaaaaaaaaagaccactcttccatgacatgtctgctacactgagaatcctgtcatttctgtggctgggatttgaatctcagcaggagaagaggagttgggaatttttaactgaaaagaggccatatggcttcagtgtttcaatatggaagatgtctcctagagacatcctggggacattgtagcagtcctggacctctccagaaggtgg

SEQ ID NO: 477804 - DNA, 829 bp, Homo sapiens
tttgccatcctatggtcacccagaagagaccaagcaaatcatgtcacccctctcagtttggactctcccaaaactaaggacttttcagataaggacttggatacaggacatctccttaaaaatcatatgcttattatcaaaaaccacacagaaaatggaggtgagactcttccaggactttcttcatgcagaaacacccatcccctgtggatgtactttgaaatccaaggaggagttccttatattcacatccacatatctgtgcttctgcctgaacttcggcatgggaggctaccctccagctcctccaggctccaagaacaggggttggaggatccaggctgaccctgcccaccctaactgcagaaagcgctcccttgatgggcgtctgctggctgcatctttggctctggctgtcctcacagttgctatggaaacgatgaagccccagtgtgatggttatagcttaatggctgcagaaagttattttgtacaatgattggatattatataaatatatacatatataaattataaataatatatacatatatgtgtacagcatatatagtatatacatatatagcatatgtgcacgtatgtatatgttacatatattatatataatatatacatatatgtatatctaatatatgtatatattatatatttatatgtatacaatatataatatatgtatatattatatacttatatgtatacaatatataatatatgtatatattatatacttatatgtatacaatatataatatatgtatatattatatacttattcatgtacacacataatatatatgtatatact

SEQ ID NO: 477805 - DNA, 545 bp, Homo sapiens
cggttcagggatatgtctggagatctgctgatggccccatagaatggagggtcatggcggtttgccatcctatggtcacccagaagagaccaagcaaatcatgtcacccctctcagtttggactctcccaaaactaaggacttttcagataaggacttggatacaggagtccatgatgtgggaggaaggagaaagcaagtgctgcaacaataaaataccagggagaataaccatatgggcaacccagacaaaagtaaggggttgtaggaagatgagtactagaagcatgcacagcaaagaaaaaacaggggaagggggaaacaaaagtgaaaaagaaaggcgatcaaagaataaaataatcaaaacaaagcagggaaaagaagaaagaagttgtgattgggccagaagcccagctccttaaagcccttagtggttcactagctcatttatctgctagtctggccagctttctaacaagcaccaggcatgtgggcaggtgctaatttgcaaggctgatttagcaatacattagttgctatggaaac

SEQ ID NO: 477806 - DNA, 617 bp, Homo sapiens
ggtccaggatttctcctttgcaatgcctggaaggatttttttattttattctttactctttctattgagacctttcaaaagagctagagcattagtacccaaccgcaaaggaccccaaactgggaaggaatggatccgtgacccatttgtgaataagccaggggaattgactttgtccgtgacggaagagggtgaactgcttgtgattgcaaatgatggtggccttaaaagtatgtttgagaaaacttcaaatctccatacgttcttgattaaagtcaaggcaaaatatcccgagatggccacaaaagcactgaaaaccttgcttccatttccaacatcctatctttgggaatcaggattttcttcagtgaatgcagacactttgggggtcactgtctccatcacccccagatgggactgtctagttgcaggaaaacaagctcagggctcccgctgattttacattatggtgagttgtataattacttcattatatattacaatgtaataataatagaaataaagtgcacaataaatgtaatgcacttgaatcatcccgaaacctgaaatcatcccctaccccactagtccatggagagattgtcttcctcaaaacc

SEQ ID NO: 477807 - DNA, 626 bp, Homo sapiens
tcacgagaagagtcagcgaccacgccatgtggcaaacctcagcagctgggcctgtgtgctctgtgaatgctttaacttgtcctgacttattaagaccctacacactgccctggcctctttttgacccctcctactgcttctggatcttccaaataagctcccacagtctaagattttatattgctggctacgaatatgcaaacgaacttcccttcatcttttttgccttactaagaaaagaaacacaagtttcaggttacctggggcctgatagtaaggagtttgaatggaacacaatagagggagtaaaatatagcgttgtttcattaacggtggagttggattgcagaagagcaacagatgggaaggagagggcgcggttctctcctatactgcctgctgtggtccgaaaaggacttgatatgggaattcaccaggatcttccctcagacttgccaggcttactccccgatcttccatcatcttcctctcaccactatcatccgaatctcacacatcttctaaggcctggacacttcttgcttcctctgagaatattcctctgacgattttgccttataccaagccctcttatttatacatttctgtagcctttacatttctat

SEQ ID NO: 477808 - DNA, 733 bp, Homo sapiens
aataccatcaccttggggaggcaaactgccaccccaaaatctggagagatgggtaggtacagagaatctgctcacctggagcagaagctgctggagccacaaatggggagaccccacactttcatggatttacatctaagagcccaatcaggttctatacagaagaatgaaggaagatctcctgatggctttagcaggaggaagggaaagaagctcaaaggcaatggggaagcccaaaggcaacaggaaaaacaaaaactaaaatatcagacaaatttgaagcctctgacacctgcagagtggattaaaaaacaaaatccaaataacaatgtctatcagaaaccatctttcaatataaagatccagcacccctgtcaaaaattaattcatcataaaagtatcaatttatttctggactttcaattatattgcattgatctatgtgtctactgttacatccataccacacagtattgattcctggagctttgtaaatagtttcagcaggattggtaccatctcttctttgtacatctgatagaattaagctgtgaatccatctgttgaaggtcttttttggttgactactttaaatgcttaaacgttgggaatttggttcttgtggttttccatatttaagaggtgtttaaaagcaaatgaaacgtggaaagttgaaaaaatgaaaaggtatgtgtaatcgtgagtgctgtaacatatagttagctatgaatac

SEQ ID NO: 477809 - DNA, 3285 bp, Homo sapiens
gccgccctgggcctgctggcggtcgaagtctccgttcctagaaaatcacctctgccctgaagggtgaatcccaaagtctccagggagtgtacttgctgcgaacctaactccctaattgctatattcttgaattgtgggctgacctaagccaggtggaacaatttagctttaatgggaagatgtcaatttgtaactaagtgtttcataacgaaaaatctcctagtatcagtcctggtaaactcacagcaagagcacggactcagcccactaggggacttgaaccagctcaccagatgtctaattaatgcccgctgtcagctgctcagatgtcacttacggagcttctctctttgcagccactgttttaatgataaagattatgcactgatgtcactgtgctcctgggttaatgtcgtggtgggtagaatgaccggcatagaccgagcagccaagcacgttgtgctttccacggacgagatcgtgccctacgaccacctcatcctctgcaccgggcagcagtaccaggtaaggccgggcacagggggcgcaagccacgtgtctggagagctccatgaaagccattcatatgtttactggggcacacacactctgggtaaagagcatccctctgcctggacagctgctgctctaaattcataaaagcacccttcagggcccgcacacataaccagaattatgtccgcaaaccctcccagaaacccattccaagaaaaacattctgctcgaggataaaaatcacagcaagttggagaaatgtcattctttaagctgttgtccaaaagtctaacacatactgctcgccctagcagaatccagacgcaaccaggcatgcatttgtggtaaattaatttatgcctcaagaggctaacatttggctgtggcaatgggctctcgcaaaagtattgcaaacacgtgcaccttctgtcgacccttattttattttgtctctcagttatgaaaataggaaatctgattgattggtttcccagtgtccatgctttccttttagttaaactctccatccacatttgagtaaagcattgctggataacactgaagctgttcaatgtcttagggcagcagattttaatattccactttgtaatatgcatgagtgtttcatgtagtttacagcagtaaggtatttctccagtgacaagaggcttactctaactcaaggatgaagtcttagaccaagtttgtgaaacccatggcccatgggcccaaggtggctttgaatgtggctcaacacaaatttgtaaactttcttaaaacattatgacttttttttttgcagttttttttcttcagcttatcagctatctttagtgtttgtatattttatgtgtggtccaagatgattcttcttgtttcagtgtggctcagggaagccaaaagattagacaccccacttagaccatcttgtgaatagttgtgggattcgatgcgagcctgtgtatgacagttttccttcacgtcgccaagcgcagaggaggcagcgcatgaaggagacagggtctccacctgggtgttgccacagaatgtgctcagcagctctaagcatcacttaccctatattttctgccttggccgcacattgagatgacctgggtgctttgaaaacacatccatgcctaggctccgcccccagaggttgttttaattattctagggtgggacccagtcatcagtatttttcaggtgccccacatgcttctaagctaaagctgagaaccacaagcttgcactttcttgactaagaattcctcatctataccttagaatagcacctctcaaactgctgtgcacatgaatcccctgagcttcttgttaaaatgcagattaggagcaggaggccatgggatggggagcctgagatgctacattttcttttcttttcttttctttccttttcttccttccttcttttttccttccttccttccgtcctttcttccttccttctttctgtccttccttccttccttctttctttccttccttccttcctgtacttttaattccatttattgttggatgagtctattcctgtgccgtaagtttccatttcttcagtttcttctgggctatctttttcttctgcgcagcctcttctggtttaggaacaatttgttccttttcaataaggctcatctcactgtggcaggcagagctcacacatgggttaacctgaccctgagctctgtgagtctggccacacatcttgggtactttgttcacctggctatgctcaatgaccagagaatctacatgtaaacccttacgttcagcatgactctgcatttttaagcatgtgcagcaaacattcagcactctttttgggccactgaccctgtgtccagtcccactgtttggcctggacgcacctaccaactccacctttgtaacgtcagaatggtacacactgtctctgtcaagtgacatctttcagatactgggtggctcttgatatatgcataccctgacggcctgagcagtttcacaggtgttcttcaatgaacacgaagatttgaacctctcgatttgcctgagttcacatttccacagattgtcaggccacttaggggaacaggaagatgttacatttctaacaagctcccgggtgaggccagtgctgccagtgaatgaacaaccctttcagtagcttggatcaacctctgaagaatctctctcctcccctcccctcccctcccctcccctcccctcctctcctctccattcctctccccttccctcctctcccctttcctcccctccactcccctcccctcctctcccctttcctcccctccactcccctcccctcctctcccctttcctcccctccactcccctcccctcccctcttctatcccctcccctcctctccattcttctcccctcccctcccctcccctcccctcctctcctctcctctcctctcctctcaattctcaaagggtataaaaggatatttttatggttaaaggataaatatttactgcagggatacttcgttttgatatttaagtattcctctgacttgttaaaacattaaacccgacagaaatgccatatgcacccccttagcttgtcttcctgtcacctgcctgccaggttccagctgctgccacgactgcgtactttggaaactgagtggaagacccagccagctgcccagagcctcgggcatctgcccatgtgtgcccagctgcccctgcagctttactctgtggcacattaagctcttgccctttttacaac

SEQ ID NO: 477810 - DNA, 1211 bp, Homo sapiens
gtgtgtccttttgtttagacaaaatccccaggaatgtttctaatgttgtttttcttgtccacatccctcctccagggtttagaactagtaaccggcagtgcgaaaaatgggacttacttccgaattcatattaacaagtataaaatggtggaaaccatcacgtgcctttctagggagcccttccccgcctccaactacatccgcttgtttggccagcacgagcaactcctcaacaacctgtgtgctcggtacgatgaaaacctgatcacagatctctataggatgatgtctgtagctgtggttcgtttgttctccctgctgtgtggtattccatcatataatggtcatgattcagtcatggcttttcctgttgactgtatttacactggttccagttcagggccattacaatcggacgttgtgaacactgtggacttttataatcaacttgtcaagatccatgaaaaccccattggatttgataggaaatgcattaaatcttagatcaattaggcaagaattgacatatttgatattgagtccaatatcataacatagtatagctctcaatttaggtattctttaatgtctttcaataaaggtttatcattttatccatgaatggcttgcacaacttttgtttgatatgatccaagatgctttatattattttttctgttttaaatgtcattttttatgaattgatgcttgtgtatacagatgaactaattttaattaagaaagttccttttgattactggttttctaagcattcttaccatgaatggatttttatttttatttttcggaaagagtacttagtccctgaaaccttttatgtgtaaggatgtcttcctaatgctttcaaatataaactacgttttggtaagtgtcaaaatttaaaatcatgagctttccctcctcaaatctttgtaggcttggctccaatacttattttaaataatgaaaactgcaagtatttaaaaaatgaattcatttgctccttcacttatatataggattttcttggtcaaccttacccaaaatatttgagttaagggagaattagctgtttgttacagaaagattttggttggtggggaatgatatgctaagactttccggaaaaaaaatgttttcacatttgaccatattcagggccctacctggtttgtttctccctaaatagaaggtgattctgaaacagactc

SEQ ID NO: 477811 - DNA, 850 bp, Homo sapiens
gccctcacgcctgtgtcaaacatgtgaagggcactgagggtaccatgggtacaattttgtatgtggcttctgttatatttctactggacatcactggtctagatagaaaggtgaagaaagtgagtctgttgaccgcctcctgtgagcatcatttcaaatgcaaggatgaatgtgcagtgggcccagcatccagaggtgctctgacagcaagagatgacggacatgtaaagagaaccacaatacggcgctgcgtacagaggcacggggaggatctactgaagcactggagaaggagtcggtgtttgcaagggaaaccaggcccgggaaagcgtggaggcacaaagcaggcagggcctgctgggaatgacaggtggtttgactgctctaacgtccagtcggatgcaagttacttatcaaagcgaagcagcactgaaaccagcctgcacaaccacagctggcgcttccgcatggattctgactggagagaagagcagtgcctgaaagcaaggggtgaaatcaccttctctaggattgggtagatagctccacttcctcttggggaagatcttgattatgtcataacataaacataactaaaataatgtttctcttacctaaagctgaagtttctctttaaaaaattacttgttcattgtctctttcccataaaaggcaagaagaggacaagggtgggcactatctccactaccatttaatattgtacatgtaattccaggcaattcaataaaataagaaaaataaatagaaagtagaagtattggagaggaaagaaaaaaggtgctgttattgtaactgataatcatctgtcaaagaaattccaagataatct

SEQ ID NO: 477812 - DNA, 2368 bp, Homo sapiens
gcaaacatggtgaaacctcgtctgtactaaaaatacaaaaattagccaggcagtagtgtgtgaggggaggtggtcacactgaggggaggtggtcatagtgtgaggggaggtggtcacactggggaggtggtcacactgtgaggggaggtggtcacactgagaggaggtggtcacactgaggggaagtggtcacactgaggggaggtggtcatagtgtgaggggaggtggtcacactggggaggtggtcacactgtgaggggaggtggtcacactgagaggaggtggtcacactgaggggaagtggtcacactgaggggaggtggtcacactgaggggaggtggtcatagtgtgaggggaggtggtcacactggggaggtggtcacactgtgaggggaggtggtcacactgagaggaggtggtcacactgaggggaagtggtcacactgaggggaggtggtcacactgaggggaggtggtcatagtgtgaggggaggtggtcacactggggaggtggtcacactgtgaggggaggtggtcacactgtgaggggaggtggtcacactgagaggaggtggtcacactgaggggaagtggtcacactgagaggaggtggtcacactgaggggaggtggtcatactgtgagtgaggaggtagtcacactgaggggaagtggtcacactgaggggaggtggtcacactgaggggaggtggtcatactgtgagtgaggaggtagtcacactgaggggagggggtcatactgcgagtggaggtagtcacactgtgaagggtggtagtcacactgagaggaggtggtcacactgaggggaagtggtcacactgaggggaggtggtcatactgtgaggggaagtggtcacactgaggggaggtggtcatagtgtgaggggaggtggtcacactgaggggaggtggtcacagtgtgaggggaggtggtcacactgaggggaggtggtcacagtgtgcggggaggtggtcatactgaggggaggtggtcacactgaggggaggtggtcacactgaggggaggtggtcatactgtgagtgaggaggtagtcacactgaggggagggggtcatactgcgagtggaggtagtcacactgtgaagggtggtagtcacactgagaggaggtggtcacactgaggggaagtggtcacactgaggggaggtggtcatactgtgaggggaagtggtcacactgaggggaggtggtcatagtgtgaggggaggtggtcacactgaggggaggtggtcacagtgtgaggggaggtggtcacactgaggggaggtggtcacagtgtgcggggaggtggtcatactgaggggaggtggtcacagtgtgaggggaggtggtcacagtgtgaggggaggtggtcacactgaggggaggtggtcatagtgtgaggggaggtggtcacactgaggggaggtggtcacactgagggaaggtggtcacactgaggggaggtggtcatagtgtgaggggaggtggtcatagtgtgaggggaggtggtcacagtgtgaggggaggtggtcacactgaggagaggtggtcatagtgtgaggggaggtggtcacactgaggggaggtggtcacactgtgaggggaggtgggcacactgtgaggggtggtagtcacactgagaggaggtggtcacactgaggggaggtggtcacactgaggggaagtggtcacactgaggggaatggtcatactgtgaggggaggtggtcacactgaggggaagtggtcacactgaggggaatggtcatactgtgaggggaggtggtcacactgtgaaagaagatgatcacatgtcagaacagcagcatacaatatgagctcaaaatcttgtataattttagtaaggtaattgtttttgggcctggaggatgggagggtacggagctggtgtttaatggagacagcgtttcagctgacgaagatgagaaagtcctggagatggacagtgagcagttagcccatcaaatagaagatgaggaaatcaacccgactgagaagcccaggcaatacctcaaaagagtttttgaggaatccatctacaaaaccctggtggagagaagcactcttgactacctgcactataaccgctaccacctgcccatgaaagcttacatgacctttggaaaggaggaggctgtatttctgtttcaaattgcagatgaggagcataaagtcacagaaaagttgggtgctcaaggggttcacacataggttttagattagaacgtggtaacgtggtaatgggaagttcatcaaagttcattttctttgatccttagcactgttgctttgcattgaggggggcggggtgaaggggtccct

SEQ ID NO: 477813 - DNA, 537 bp, Homo sapiens
agctaaaggtttgtaaatacaccaatcagcactatgggtctagctcaaggtgttgtaaacgcaccaatcagcaccctgtcaaaatggaccaatcagttctctgtgaaacggaccaatcagctctctgtaaaatggatcaatcagctctctgtaaaacggaccaatcaacaggatgtggaagaaatgactcaggccagtttaccagaggatagaaagcaactccctggctctgtcctcagccatgtcatagaaaccaggattcctcttttcctgaagtgggtcatagaaactagaactcctttcccccaaggcaagccacaaaagctagaaaggacactctctgatacgcctcctctgaaggtaggccataagaccctcttccaagagggatcctgcttggatctaggaggaagaaatgctgtatacacagaggccaataatatgaacaaacattttaaaaatcttaaataactgtaaaaaattaaaagataaaaaataaatgataaatctaagaaaaaaattaaaggccagttgcat

SEQ ID NO: 477814 - DNA, 732 bp, Homo sapiens
agcagacaccaagatggagttaggagtgcagaggatttactgtgtagtagcaccttcgaatgaaaaaggccccggtgaaggtcacacccttgaccactcagggctggccagctgcagtctataacccacctgccctgcgagtcacaggtcagggctgcccccgaagggtagtgaattcccaggcactacttgttcctgtgcctgcaggcaaatactgctccccttcaaatctgagttatccgtgtggacagtttagggcaggtgaaccagaagtcatcaaacttccatgtggtgacaccaagaatggcggggaggaaggctttggtttggttaatcctgaaagcagagcctgcgacaaggacttggatgcaggacgttcatttggaaggagatcccagggagctggagtgagggatagaaagatggaaggcaaaaagccaataaaagatgtgtcatcactgtggacaactaggctcagtctcacctggggccctcaggggaactgtgtggaacatgcctcagagatgcccctctgaaagatgggagactaggatgcttaccgaccagctcccactcccttggcagaagatgtccctggagcattaactctccttcctccctgcctttcctgccctcacttcaggcagtatgggcttccctggcttgggagaaagccccatggcagaaaagtgaagagctgctgtggtggcagaagtgggacactcttggtgt

SEQ ID NO: 477815 - DNA, 802 bp, Homo sapiens
gtaagcattaggagaaagaagagacaatgaagaaaactgagaatgagtgtccacagaagcagaagaagcaggaaaataggggctgtgttcagctggccgcagggctgggccggaaggtccaggcagtttccattcactcctggcccttcaatgctgctgcatgtggctctctttcccatgctgtttcattgtctgtggtcatcctgatcttccttcccatgcggcgggaaacaatagtaacatctgctgaagagttttgcataagggtgaaaatgaggccatctggaagaagcagcagggaactggctaaagcccaggccactgcccaggtcacagcaggcagtttgggtcagaagttcagcaggcctttggaagatgtggatgttccattaccaccagcagttggtgcctgggactgccaagtcagctgctcctgtttatgccttagcatttcacaccagtccatctcacccagaagggcacatcagaagctgctgtctgaggctctcccccctctaattccaatgtcctctggacatgaaggtggattccagaacatgaactgtgctaccactaagctgagaagtggaggatgggactagagtaagttaaaatgccacaatctgttcttatcaagattcagtcatatttttaaatcctcacagggatgctacaagcttttggttagtttccaagttctgaaaaagtcaattctgccaaattttgccaattttttcattgctttcatagaagcctgaactttcagagatccttacctagccattttctctgatgtcaccct

SEQ ID NO: 477816 - DNA, 667 bp, Homo sapiens
gggcagcgcctggcgtttgtttgcttgaaagccctgactgatgggggcgactgcatcgagttttcatcctgtccgccttgttagactacacgcgcggtgggggcatcggatgatgcagcgtggctgctgtcgttttggcaatgctgttgccggggggcaggcccctggcccccagcttggattcgcagaccccacggggccgccttggatgtgcagacacagcagcgcgtgcgcgctcagcgggcagagctttgtgccccgggcctcctgggacgaggctgcaaaccttcagatcccagcacagaccccccggcttccctctgcccgcaaacttctcctaattaagccagtccatctaattacggggtgttccatcaaatatttctccagatgcttccgatgcagcctgcgggcgctggtcaaagctggcgaggcttgtgatcagggctgccggccctgcgagggccgcgcgcgttcccctctctcctggacgtgcctgtctccaatactgcacaatccgccctcactcatttgctccgttgcctgtcgaaagcacagagcgtaattactaaagttaagaaaacatccctgtaattagccaggcaactctaagcacaagaaatggaaattagtcacagtaccataaattagtttgtgcatacattac

SEQ ID NO: 477817 - DNA, 466 bp, Homo sapiens
aatttacccccagccccaagatgatgatccatttcatcaaatgtgtcaggttaactttcctgcgcattacacttgatcaagacatgagcattccagtcttcgtgctgctcttcatttttccagggcaagatcagctgccattgatgctgctaaaatctggggccaatgcaggtgattcctgccatcctggctccatgaggatgtttgaggacaaaatggagctgtgcataagaaagtccacagtcactatgtgccaagccctgtgctgtgatcttcattcaccctcatgggataaggattgccacgtccaggctgcagacaaagctcagatgcccacagctcatacaaggattcaaaccaacctctgtttctccaaaggctttgggcttaaacactactcagtgctattgaggagcaaaaagaggaaggaccatgactgagaccaaaaaactggaatttgggctgt

SEQ ID NO: 477818 - DNA, 1272 bp, Homo sapiens
ctttacccataaaacttcttgagtgaatttgagtcagtcatgatggcagggcaggcaagacccaaattggggcttagcccaggaaggttcttgtctttgctcaggaaagaattcaagagcgagccagtggtagaagaaaacagctgtattgagatggcaattttcatgcgtgtccgtgtgaagagaccaccaaacaggctttgtgtgagcaacatggctgtttatttcacctgggtgcagattacaacatgccccttgatagatcctgataaatctacaggatcaaaatgctataaattagtatcatacaattttcagacgattaacacccatgaaagcaggaggaaaattacttcagagaaaagcacagaaatgaaggaagaaatgaaagttctatatacgttctatgacctcgagcaggagctatttccaaatacagtcacactccgaggtactgggacttgggctttgacctatgaattttgggagaacacaaatcagcctacaacagcagaatgtttacaaactacaaatattctaacccaagacgttcttgctggaagactgacaacgggcttgactacatgaacatcttaagggtgtcctttggtggggacctacactgtccaaaatggtagccaacagctatgtgtggctaccatgttcaatagccaatgtgactgttgaacactgacatgtggtgagaaaccgaattttaactaatttaaacttaaaaactaaagaagggtaaaactatttttctgctgaagacagctttattgggttggtagaaacacatttaattgcaatcattacaaatttagtgtctggatagagatgtgataaaaatgtaaaatacacactggaattcaaagacttagaatgaaaaaagtgaaatatttaataatttgtatattgattatatgttgaaatgaaaatacttttaatgtgttgagctaaattaaatatattaataaactcaatttcaccagtttcttttctttttttaataatgtggctactggataattttaaatgacaggtctggtttgcactatattcctcttgaacaacattgggttagagctttagctcattgctcaccaaaagtgggtcagcaaataccctaaaatatgcattccttttgccaaaaagattaaagttccaggttcttttgtgtcctctgtacaaagattaagataactgaaaccaaccatttattcttggatactaatatattattaaatctcccattacttgccatatttgtaa

SEQ ID NO: 477819 - DNA, 542 bp, Homo sapiens
ctgagccatacatgacagtgcttccagggctgcaaatggacttaggctggcccggtgctgctttttgcctggctttccatcgcctgcttggaaagtttcctcatcctctggattctaatggtcctggttacacattagttgaccaatggccttggactctggtatcactcaaagacctggtttccaatctaagccaaagatcttggatgggaccaaaagaaagaaatcctgaattaaaacagagcttacactcaaggctagaaagattcaaggtggaaggagcacaaacagtgccctgggggaaggcaaagaaattgctttgccgtctgaataaaatagtttgcgcattgattttatctgggagtgaggagatactgacggtgacctctgagcacaagaggtggaagaagcttgagattctcccagaagctcagcagatgctgatgccatgcttcttctacagccagcagaacagagtcaaataaaccttttttctttataaatgacccagccttgaaaccaattcaaagctcaactactgc

SEQ ID NO: 477820 - DNA, 1441 bp, Homo sapiens
gaaaccgcacacttcgaatcacagaagtgtttacatagggcaggctggaggggacgagagagaccttggttgatggtgactcagttcataaacacagcatcaatattgatagactccaaaagatgcatatgcaggacatctctcgggatttgcagggaccgactgttcaggtgaacatcccgtactgttcgttcgagcaggacacggcagatgcttctttcttgttttatggagggtggtggtggattactcttcccatcttgtgcttttgaggatgctccaaaaactttaaaaatttatccatgttccctttcacacagtgggtgtttctttcctcaggcagaaggaaaacttaccaatggtttttgaatatgataggaaagaccacctgcagggagagagtgggacccctgctctctgcctctggggcctgttttccagaatccaaagaagggtataagtacagcatcttgcaagtcatgcagcaaaacagcagtcatgggagatggaattctaagggggcccctgaggttccagccctcttgtgtacacaccgctatgaacccttcccttctgcaaatatgacaggatatcacttttgtgactgggttacttaccagttaactttgaggcctaatggccgggaaccagagcaccgctttgaaggtgagatgagtccctggccagagacctgtgtcctacaaccacagggaaatggattccatcaacaactcgtgagcttggttcttagaacttaggtcagctaactaaaaggcctttcttagtgacttttgtaactttagcagttttaaattatttaattgactttaccttttctcaagagataaataactaattaatactgaaactgagttttagatgcagggatcctcttgatcttaaatggcgtcctctagggaaaatgtggtggttctcagctgcttcagcgcaagctctccaagcccgtctactcagcatgaaaatctaggaggggtgagctgaagaactgtcctcatctccagcaaagtccttatagtggaaggacgcatccttgaatggatgacatctccttaccaaacacagtgccccagtgcatatacatggatgtagcatcaaagtacagacagcaagcaaaaaacacgaagagaaatgtgcacaacacaagtctgccaaatctctctcaatcatacaggttaaggggaacaaaaaaataagtatcctggattggaatatggattgaaaaaatattgctttggaggagaatattgggaaaactggtgaaatgtgaataaagataatattaaatatatttgatattatataatggcattgtatcagtattcaatttcctgaattaaatatttgctctttggtttacagagatggttcttgttcttaggagacacatggtagagaatctgggggtgaagggtcattatat

SEQ ID NO: 477821 - DNA, 727 bp, Homo sapiens
tgtgctgtggtttagaccaatagttgagatgataatggtttccttactgatctttggatcaaagagaaggtggtgtgttcccagagcctctcgattctgtttctctgatggtcccatggttggtggagacatttgggaatgtctggagacttgggtcatcaaaactgagaaaggtgcttttggcattgagtgggtagaggatggggacactgctcagcatcctacggtgcacaggacagcaccgacagcaacgagttacccagcccaaactgtcaatggtgctggtgcttgctgcacagaaagccaattactgagacaacaagtattgccaaggaagaaggctttaattgggtgctgcagccaaggaaatcttagtctcaaatctgtctcgctgaccaactacaattggggcatttatatcataggctcaatcccaaactttaatgtgagtgataacaaacagctcatctcttcggaccactattattttgtgtctctgactagaagtccaatgtcaacctaactgatacagatgggtactagctgaaattatcagaatggtggtcactctaagagttctactgaatgttaagtaatactaagtacatgagatttaatatttccaaatatttaagatcacctattaggctatgcatcactcttcacttttgttatctcatctaatcatgaaacagacttagagagttattaacaaggagctattctt

SEQ ID NO: 477822 - DNA, 784 bp, Homo sapiens
caaccacaggccggctcgctgctgccagtctgagcagcagagaaaatgcccctgggcctgcttccccccagcgatcagttcatggaattgatcatggttattgatagtgatgctgatgggcttgcatgggaagtaatggatggcactggcaaggttgcccttccaggaagacagccccatgctccttggagatgcagaggacgcagtccatccaccacacttcgtgctgcttgtgggctgcaatctgctactggcatgttgcccctgcagcagcagcagcttgacctgctggatctgagccacggccatttgggaatcattgcttgttgcaccgtggaggccacaggagcagaaacatggaatgccagacgctggggatgctggtacaagttgtgggactgcatgctactgtctagagcttgtctcaatggatctagaacttcatcgccctctgatcgccgatcacctctgagacccaccttgctcataaacaaaatgcccatgttggtcctctgccctggacctgtgacactctggactatttctgtgtttatttgtggccgagtggaccaagccaacagaaatcaccagtgtgggatgaagtttgacctgaattggagccacatggagaatgctgcctcagggttgggtgtggatggggaggcactgagtacgatgagggagaagccaatttgatactttgtggaagaggaaaaatcataagattactgcttggtggctccagaggactgggatgacatggtcttgattgtttctctcattt

SEQ ID NO: 477823 - DNA, 785 bp, Homo sapiens
gggtgtccctcggagaggccgcacccgggagaaagcgctgacgcctccgacccagctccgcgcacagcggcgcccccttctggccctcgtcccgccggagctgcgcttgcgtgaacagccctcaaatgcgtgtttgccctgctgcacctttgtcccagacatttgatgtgggcagcgctgtgctggaccctcagttcccccagctcccatccacttcttccttcagcttttccaagtcctgggctgcatgggtgcagctctatggcatatgcacccgttatcttctcagtgttaactgcgtcatcaagttcgatggtggcttgtggctgcaaattctttgcatggccgtttatttcactgaagcgaatgatagcccaaaagtccttgagatatgtgagctgcaaaattctacagctctgcctaaccatttctttgtgttcattcctcctcgtgtctttgactacttcaggctggcattcaaatgccaggtcctgaccatgtttctaaagaatacatttgaatgcaattactaagcctcctttagaagtccagcagccctgtccattataataattgatagtctagaaacttgttagagagaaaggaatttaatcaaaggtagaagtaatttataggggagagtcacgcggagacagctgaagatgctgtcatgattagagtcaggtcagtatttcttctctgtgggagcatcccattggccaggtcatcattccagaatctcagatgcatatctttcaatttcccttccatccctgctgcagtcc

SEQ ID NO: 477824 - DNA, 601 bp, Homo sapiens
tcccacactatctcccagggtttccagctggatgaagctccaatggccccaagaggacgcttgttccttggagatgctgaagcagtagcttcccaacactcccaaagccacatggatgacccatggcagctggaccccaggtcacatgcctcaccatcaggtgtggcatccatggctgcttcatcaagtcaatggctgattaataactgccagaagcagggttcatcaataactgtcatctacttctctttatcagtgtgttctgggaggaaattgctggccagagagaaatctggaaatggtcctgatgcctcctgccccttccgctctgctgtggactcaagtgtggtttctggaaagctgttctctcacatgtgcctcaaatgcctctttggtcagagcaggaagcacaaggaaagcttttgggattcggatggacagacagatagcttggtatgttgtttctttggggttgcccttagcaacccgattaaggaaattgcttgcaggcagttttctggaagaacatggcccggggcaatagaggagaaagattttgaaaagaccatctttggagcttgagggggtttggcaagaccac

SEQ ID NO: 477825 - DNA, 1123 bp, Homo sapiens
gaaagtccagacccttgacatccatctctccctactgctcagaattgtctacaacctaacctctttggtccagaactatctcaaggttctgctaccaacatgttagaagcaaaaggcccaggaaacaacccagtcacttcatgggaattggcagctttaaatagcctcagcttcctcattgtgcgtccactgcaggctgaaaaaagccagacctgcttgtcagtcccgcaaacagatgaaagacctacttgggttcggtggaattccattgtcgtggtatttactcacaacgacaagagaccagagaagagagaagcaggcccctgtgcccctcctgacatgtccctactgtgtgaaagggctgggctgggggacagaatcaccagggaatttcaggttctctctctctttcttacttacagaaaccatagcatcccttttggcaatgctaaatgtgaatcttgttatacagctttccagaaatgggtcagctggataaaagtgtaccaggtcaaaagtttaccaatttgtcatcctcataaaaatgcatagaagcgcctatttcttccaaatggtatgcttgattgaatctacctttgccagtctgacaggtccatatgtatcacttttatttttctttgtatttccttggtagcttcattatagtgaaaatatatctaagctcattggctctttctggttatttgtgaaaggtctatgtttcttgcccatgtcttttgttgggtgttctttttctcttagtaacttaagagttatttgtgtattaggacgattaaatctttgttacatgcattgtaaatatttctctagttttgtagttcatcttaactttatttatggtgttgtcatatagtgtgaaagtttttggctgttagtagaaaaccatacagtttcctccctatatatcttaactcattttctaagagtgttagattttagtttgagtgttttccagcttttggaattaagatatgagaaagtttatgtcaagcatttttgactaatttatctaatattttaatgcccttaaacagtattgagaggtacaacatttaagaggtgattaagtcatgagggttagttatcagaggaggaagttccc

SEQ ID NO: 477826 - DNA, 606 bp, Homo sapiens
actgttttctccttctctgcctctctcctgactcccggactcacttcttagacccgagaggtcctgcaggacgcctaccagagccatgcatcagacagtggcttctgcccagtcacggctgggagggagatggttaaaaggctacccagaaaactcgcggaaacagccagacctggagaaagcagggacagaggagccatcagaaaccaaggctgatactgactttatgagtgttaaccaagataatgcatgtaaacaccttcgtacagtgcctggaacacagtcaggtctcagtggatgccaaatcattaggttcagagaggcagctgttcattttcacatgccccaaagaaaaattccactgcctgcaatcaccacttccactgtgggctgctgcagcatgagcaaaagcatgagcaaacctcatgtcaccagctgcctgcctatggctgctcctaaagaaagcaaatctgccctcccagtagcagggccacagcacagccactgccccactcacctgagcattctacggcaactgggggatttccccaaccatgcctatcacagatagtgcctgcatgtaccactggggagcctgaaagcagg

SEQ ID NO: 477827 - DNA, 1048 bp, Homo sapiens
tccgagcaaaagcatccatgggccacaccagagaacaggaagcagcgttcctccttttccacatcatagcacactgaaaatgattgcatatgtacaatacagcatccaggacattcagggacatttatataacacttggttttttgtgtgctatggtttcacggaattccgtataaaaggcagacccaggtttcgtgggtctaaatcttacatgatttggaggagaggggagactaaatctgaagctgacaatctacaatacccttcagggtcgttccttttgccaaaggggaagcagaagtgccgggactccacatttcacgaagcctttcatcgtaaatacagttctcctccttccttgtcaaggtttcgaggatctaccattcacgttgctgggaacccgtgggatgacacagcccgagtatcagaagtgaaagctgaacgtcattactcctggtatcaaaaatattttgcagactacctgaatgatctattgtaaaagggcttgagttcttgatttgattgcttggtcactgttggtgtatagaagagctactaatctgtgtacattaatattgtatccagaaactttgctgaattcatttatcagttctaggagctttctggaggagtctttaggattttccagatcccccttctcacttttggtgtccatttgcatgagatcccttcttccacacccttactttaagtttatgtgagtccttatgtgttagaacaccaattattcttagctttggtcacttaacataatcccagacttcttaggggctttgttcatattttcttatttttttactttgtctttgttggtttgagttaattcaaagaccttgtcttcaagctctgaatttctttcttctacttattcaattctattgctgagactttccagagcattttgcatttctataagtgtgttcaatgttttctgaagttttgactggtttttctttgtgctatctatttctttgaatattttccccttcacgtgtatcattttttgaatttccttgcactgggcttc

SEQ ID NO: 477828 - DNA, 487 bp, Homo sapiens
ctctggtttgtgaggtaaaggacaaccactgtctttgcccactgtgaggatggactgttttgaaaacaaaagagctgccatatttgcaaaaacatttaagagattgctacgttctaggaaaaggtctgctcaaggaacagatcatctactccacgatgcaaacaggttggtcacggtgagaacgcaggtgcgccagtcagaacgcggccagtggggaatgtcggactgtgcgaggaatcggctgcagaagagcatattcaatcctacacgaatgttggggaattcagaggaccggcttgaagtcagtcccctgcctgccctggagaatcagctgggggccaggggaccaccaccttgcttcctctggaagaagcacactgttagagtgcatcggtcaccaggcatttcatgccacactagggctgtcaggagtccaatatctaaaccaagtgatgcctgatctgaaataagagaacactctgagtgg

SEQ ID NO: 477829 - DNA, 581 bp, Homo sapiens
tcatggagagggaggagttcagagagtggcccacacagttgacatggttttggaaaactacaaacatgattcagctgcaacagtgggaaggaactgccactgctgggtggaagcggccttgctggagagatgctgggaggaggaggaagtcctcaggaggaacggtcgggcccctctccctccagatttgcggcctcactctagcgtccccttgccaggagcatctggccaagcccaactgcagtttgcagagtcccagtgctggcatcacaaggcaggatatagaaaggtgggtttggagccaagagaaaatcatttaataatggcattactcccagcccccgctgggataagtccctatcttattaaagcgataacacaaagcagtagtgaaattaacagcactagacatgccactttctctctggacatcggcatttctgtagggcagtaatttctacgatctaagattgcctccctgctggactcagaaaagaggtaacaaaagtgggttaataaagtccattaatattcctactgtttataagagcttgagagataagccaaatgattgatagtct

SEQ ID NO: 477830 - DNA, 1134 bp, Homo sapiens
tctgagaaatgcattgttaggctattttgctgttgtgtgaacatcatggagtgtacttgcacaaatctagatggtagaacctgctacacccccaggctatgtggcattagcctattgctcctggactacacactggggcagcacgttgctgtaccaaatactgtaggcagttgtaacacaacggtgttctttgaaaaagagtttagcagtcaagtgaatttgagagagggtggtttaattgaagttaaacattactttactgcagggcttttcagagcctttaatctgctaaatgcttgtgacattccaagtggggctgtgagtgaggactgccttcgaaaatttcacacaaggcactgcaagaaatgttggggtttggggggcaaaacaagcttaggcttaagaggcattgcatgctgttactcatttggaacccagccagggccatgggcagttgcctgggctagcctgctggaggatgagaggccctggggagcagagatgagtcaatccagtggccctcccagaaatgtctgtttgggagatggtacagatgaggaaatgaaagcctccggatgtaggttctctggaccagaccgccgcagcagagacctgtgttttctcctggggattcggaaaccccactccccttgccttcagaggcgctgccgctctccattgtggggcagaggtgaagaagcaaagaaagtgtccttttcatcctcgccatagaatgaaaaacaattcatcaccacaattactcaccaaacctgagaggaggacaaaagaaaacatgtttacgttactttttctttcattaaaaagcaacacgtgtttttgcccatcagatagaaaacacagatgcagaaaaagccaggcgttggaagctgttcgcgaaggttcaggttcaggtcacattattgacttttgagctcttgactcagatgtcaaatcctgggaaataaagcatggggttataaacaacattacgataatactggttattatatttgtccatgtatttactttagtggagatatttatattttcatatgcttttctgttactacctactgttttttcatttcaacctgaaagactctctttagcatttgttgtgcaatgggtctagtc

SEQ ID NO: 477831 - DNA, 1686 bp, Homo sapiens
tcagtcactgactgacaatggctgctcaggtcacgaccccccaacacggcagctctacaacggcaaggacgggcatgggtttgggatgcggggttttgacactgtgtgttgtcttcttcacctcctccatggtggtggaagaaacttgtaatcatgagagctgctgggatccatttgcaaccctgcatgatgctgaccacacagaaagaagacgagaaaaacagaatccagaggccttgacattcttactgggccccagactcgtacaaagctgggaatctgacagcaaggaagaggcatggggacattgcccgatgtgtagaaaaccaccatgtctgccacaacatgcaacaccagaagagagaagaagaacccatgtggagagaaacctcatccaaggaactgaagaaaatccccataagaatcagtccttcccagaatcttcccagcagagctcagaatttgccttaagtcactttggccaggactgtgtcacaaatcactacagcccactggtctggcacatcttatctgagatcaaggatctcccctcaaggcctgaataaggttggggttctaaacgtgggtttgggaagttgctatgtcctggaaatcacaaagtatatatttatcttgtaacactgccttcttggtgttgcataaatgctagaagcaccatccctctcatgaagactttcacctttgatgcctactgcctagaatgcttctgactgggtcttcacttggctcattcccaccctccaggtatcggctcaccggccgcccttgcagacttctccaactgtccaatgcgtccctccgtttttcagtaccttatcaccatgtgtattttactttgagcattcatctctaatatatggtttgcaatcactttaattacttatttgtatccatgtttgttgtctgttttcacagagtagaatgtcaactcatgagatgagagatcttgtttcagtgcctggcctacagcattagctcaataaatatttattgaatcattgaatgcatccagactttcagaaatgattcctggttataactcaggattacaaatgactttgcttcttgtaaatgactattaattttgacatttatacctagaatatggtggaattgtggggtctctattataagtctacgtgtacattttaagtacccttttctttatatatttcctgattgtagatattacatgttctagttgtaaaaacaaaacaaggctgcagaaatttataatgtgtaaaataaagaactgtttattgccaactctcccagattaaaatgagattcttttgataaactaattgtaccttgttttcttcaaacttaaaatatgcaatggaactcttttcattttgacattttgtgataaactttattctttttaagaacattgtactgtgtggaatatactatatatttagccatctgtggtgaggctaaattgtaaactgctgctagactataatacgaaattgaggatgtttgtgttatttaaattcatttaaacaatttcatattagtgggcattcatcttgttgccagtgggtttttgggtcagtgtaaaaagttgcagtaaatttacttctacatctgtgtatttttctgtaggaaaaattcagaaaagtacacttttgtgtactgtattagtctgttttcatgctg

SEQ ID NO: 477832 - DNA, 693 bp, Homo sapiens
gaggccacctggggagctgcagatagattctccttgttgctccagggcctttttttaagcaccggcattatgggtccatctgtgatcagtagagtgtgtggtaatatcccaactcagagcccacaaattcagaccaggagtgctctgttcccctggccgatgcttcccttttttgtcctccccacaggagtagtatggacggcccacaagtgtggaggccagttctggagtttatacccatccactgggatgagaaatgagggcttggagctgttttttcagagtatattctcagatccattatcagattttaatctcacaagtctgaccagaaaattcatgggagacctctatgactattcacatgtgggacggacattcagaaaatgcgttgcaaagagcatggaggcaaaggccaccaagaagtcgctggaatcaatggcagcctttgcaaaaactgttgccttgctgagctttggccatcctcaggcagccctgcagcacagcccagaagcactgaggtccccagagtatcacctcatcagctccctggggtctcagacaaacacagccttcctagtcaaggaaataatgtcccccttgtgatgcaaagccccctggagggactgagaggagcttcctggcttcactttgagcgcagctgtcctcagttcctcctgtgaagcagtgggt

SEQ ID NO: 477833 - DNA, 731 bp, Homo sapiens
cacataattcaacccatgataatgattatcgacaaggtggatcaaactgcgcccttgtgtgagtactccctggacagaatgtctggttatcttcggtctgaagcaggctcagaagaccggggcccatttgctcatttgttccttgcacagagtttaggaagcttttatcaacagtgggatgaggagcaggccacctgcactgtgggtgatgcagaattgataggggctggtgtctgcacctcacccttcagcttcaggatgtcatacaaactttatttggtgaagccctggggacctgctctgcccacagcgctggtggatgcagtaaaccaggtccccgctgtccagattacttacgtgtttgtgaccagaacattggtcaaaatatggaaggtaaaggccattctgatgaggactcagatggaactgaggaacaaagtattggaaactgaagtaaaagaaaatccttgttgcaaagtagcaaaagccctggctgaattgtatactggcccgagggttttgtgcaatgcaaaacttaaagagtactaaactaggatatctggcaaaaaaaaaaaaaaaaaaaaaaaaaaaaaatctaagaagtaaagcattcaagcagctgtgtggctacttttaactgcatattgtaagagggaagtgaagaaaacttatttaaaaacagaatttataattaaaaggcaagtaaaatgagaaatatagaaaattttcag

SEQ ID NO: 477834 - DNA, 958 bp, Homo sapiens
gaaacaaataaacaggacaacatgatagaaagtaaagtaaattgcagtgagggtggggccaggggggcaaaaggagaatgcatgtggggctctctgagcccaaggtctctgtgccctcccagccaggcacaatgggagcacagagagagactgccttgtgctggagctaaaatcatggatgaagccatgagaaacaggaagaagaggctggcacatccaggcttctctcctcctcccagcagccaatctccggccagtgcctcccattggctgaatctaccaggaagcgagagcgcaaggcctcccgggaaatgtggggccagcctcctgttgtgtagactcatcaactataccagtcctctgttcctggtctctggagcttcaatttgggaaagtgacccattagcttctgaggaccagggtgagagagggcaaacttgaatgcccttcacaatggagagatgtgtgcagaccggacagacatcagttcctttatcagtgcacaggtagctgcaatgcctgcatgtggagagataaaacccagacaaagaggcagacatgagcagatgagctcccccgaacaggagacaagtgggctgagaggtgaaggaagaggatgagggcagccacgaacgctcaatgagacatgacaagtcaagtgtggagcccaggcccttcacccagaggagctcaaaaaatattagcagccgttaccattggagcctctgcctcctaaacctgcctcaatatctatggagggtgggagcagagtcacttttcctcactggacctcagtttactcctcagaaagacagcagtgatgatgccctctcaagatatcctctaactccagaatccctgtctctattgatcgtgtaggatgaggcagtccaagttaaaacaaacactttgttcttagtatctcatttcattttcataaaagccttagaggacacac

SEQ ID NO: 477835 - DNA, 1267 bp, Homo sapiens
tctgagacatcaagtttcttacccaagattgcctatcaagttcccctgcttctgctggctttatgtctcagaactttggtgtcattggtctcagacaccactttgccatccactatttggtgggtggtggtcttttggatggtttacatggagctgctgctgtccagggcatcaccaatattgaagtcctcgccatcttccagcaggcggcagtaggtggagatctcagcctccagcttgaccttgatgttcagcagggcctcctactcctgggcctggcgctgtccctctgcccggagttggtaatctgggcttgtaggccttttatttcctctttgtggttcttcttcatgaagagcagctcctccttgagagccttgatctgtctccagctgcagccgagtgacattcgtgtcatcaatgaccttgcagagcccatggaggtagctctctacagattggagcatggccagctctgtctcatacttgactctaaagtcatcagcagcaagatgggcattgtcaatctgcagaacgatgtgggcattgtccacagtatttgcaaagatctgagccctcaggtcctctatggtcttgaagtaatgcccccagtctctgacctggggtcccttcttctccaattgctcacagattttgctctccagcctctggttcttggtctccaggctcctcactctgtccaggtaggagatcaggtggtcattcaggctttgcctggtctccttcttgttctggatgccttccattcctgccagactctcagccatccccacagccagagctctggacaccatgccgcccccgaagctggtggagtgggacatggagatcagggaaccagaggccccagcaccttcatagacgctggccttgctgctgaccagccgggcaccatagcttggcatctggacagagcccagggaccagtagttggtggagaaggtggagcgagtggtgaagctcatgctgtccgaggaggagagcgagaggacaggactcaggctttgctgaccatcttgattttacgtttatatggaaaagcaaaagaccgagaatagccaactcaacattgaaagagaagaaagtcagaatacttacactaaccaacttcagggcttactgaaagctacagtaatcaagatggtgaggtattgatgaaagaataaacaaatagttcaaagtaatagaacagagagctaaggtatagacccacattaatatagtcaattactctttgatataggat

SEQ ID NO: 477836 - DNA, 635 bp, Homo sapiens
gtcaaccttaaagaatttagactgtagctcggggtcaatgaaggtccctcagaagcagagcttcaggaggatttctggaaatgtgtttggctagatggcgttgccaggaaaagtcagcaggacaaaagcaagtgggactgcagagggaaggaggataagcaggggaaaatccctgcagggaagcagcagctccaacagcagggagcttgcaagtcgcaccttagaactgctctccagcagcctgaggatggcctctgaccgggatacacaagtgctggccactgcatgtgcgaacacccgagagccgatgtgtatgaaggtgactaggtcctttatgtttttgtcaaatggggatccatcttcaagtgatgttggggcagggttctccaaagaagggcagcgagggaaggaagagggacaggaaggagctgaacaggagcaggttcgagctgcagtctggctttaccctgatccctgggggagctttggaacaaactgcaccacagtctcaccttgcgaggggctggcctttgtaccctgagccagtcactgtttattgggggtgggtggatgggctgtaatctcctaagatgcttccatgatccaatgacaattttccaaaatgggggtagctc

SEQ ID NO: 477837 - DNA, 696 bp, Homo sapiens
tcgatggagacgccatgaggcgtcttactgagcatgtactaggtgcttcaacatcctttcacagcagttgtgattttatcccacactcagagacagaacaagaaagcttggagaactcatgcaacttgcctgaggcagagctggcaagagaagccatcatagaggaggcagaactttctactatggaaagtccccagcagcaaacactaccccagtgctgtgggaggttcagttgtgacggatgccagagcacctgctccctgcctccagcagtgacaccagaaacatctccagatgctgcccagggtcctctagaaggcaaaaccaccctgagggagaactgctttagattatggctgtcgaaagaatgcacatcaggtgaaaatcctaattgcaaaacacattcagtgatttcattaaaataatacaaaaatatactttcatgaataagtgtaggaagatttatgtaaattgtattactggcctatacctcactaacacaatgcctagactcgtgcagtcactcagtcatctttgagatttcaccagccttcagtcatgcaaaggctaagggtttgcaagcatccttgactttgcctttatgaaggtgtataattaaggtaggtgatggaccatactctatgtaatgattagttaccttgatttaatcttttaaacagagagctcacaggatgc

SEQ ID NO: 477838 - DNA, 557 bp, Homo sapiens
tcacttaagtgtggtggtgacttgcatttggtttgaccaaggagaatactgactggttcttgagtcgggtgcactccccctcttgttgtaatggaagactgtgcttgtgggaagcccagagagagtggttcctggaacgggtgtagctttgtggttaagagtttgaactgtggatttaggtttcaacataaacacaggcacgggcagttggaggacagtgaggaagcagctggaggagatgggaaggtgcagggactgtggggcactgatgacaatgtggcccttcatcaccaaggagctggctgggcctcgtcctatggaaaacctggccagcctctggatgaggaactcactggggaaaatgaaagagttttaacgtgtattccaactactgacagtcgaattgtgtacacttggaccatgtctactctgctaaatgtaacaagggaggaaacagtcctgcgggttgaaatgagattccttggtccactgctcatgaacaaagtctccatggatttggaaatgatgccattgtctctggattaccgctgagtcct

SEQ ID NO: 477839 - DNA, 518 bp, Homo sapiens
ctgctgtgacctgtgaccagattctttatgagcaggctcaaagccattcttcaatcacgaggaatgaatgacctccagcccacggttgaaatttctgacaggatggagtcattttatggtttccttctgggcctgtcctggcaagtgggaggcacaaaaaagggcttgaccgaggaaagagatgcaagcaaagtaggctgcaggcacattgagctctctgaagacatgagcctgttcctccaagtgaaccttggtgggtgtggccccggatcccatggaggtgtcagagctaccatccactcccacattggacagggacggctggagccagggctcctgggctcagtaaacaagtcctcctttcttacaggacacttggaggcagcttttaacaactcagaccagatgagtgagcacattctcacacatgtcccatatttcccaagtcagtaaccagccccttgcagaaggctggtgatgctttacaccttggggtccttcagagaaatgggtttgtc

SEQ ID NO: 477840 - DNA, 539 bp, Homo sapiens
ctgtcaggatttccttgctctgcttactcaaatgggaaaagcatgagatggcagcgagctcattggcaaagtgacatcttgaaagtgattatgcaagaatacctggacatccggcctgtcacatcctcatcaccacagcaacaagagctgaactttctcaggcgcctaacatgtgcctcacacgtgccatctcatgcttgctcccccagtccaggtgggcagtggaatccacagtgggacattcacagggacatagcaagagcagctgctctggaggaagtgaagaggccagcgtccctggtccaaggcaagtcaggaatcaaggaaacagaaggaagagggtttctcaggtgtgcaggggaggagctgtccgtgcagctctatgcctgtgaacttgggacagtggtgagcactgggagcagcctcatgggaacgaagatgctacagaaggcagcctcgggtgcatctttctgtggcaagcacagcctgagatggaactgcccgggtacagtgcagggcttggggacctcttgagggga

SEQ ID NO: 477841 - DNA, 906 bp, Homo sapiens
caggtgttggagagcagtgtgggaaccaggttaaagatctggcagggctgggaggggcaataagcatgacttgcttgagcgaaactaaaagaatttcctggaaggtgatttcctagaattttgctgcaacagaagggttggctcatctgagagtcacagcgtggagatggctctgatcctggagagtgagttggatgaaaagagaggctctgatctaagaagctgccattcaagttgggaaggacgtgcacccaagtgtgctcatcgaagtacaaatctggcccctggagagcagaaacagaagctggttttacagcattacttttatgaaacaacattgaatactctaccgcccacaaaagtagtggggtactccatactactagctgcccagcctgcatcaccccagacatcaggagtggctgctcacagaagaccaaggcagattggaataatggaaccccttcatcaagacccctctgcaccgtctcttagtcctagtaccttgagagagtcgtttacgctcttggagtgtccctgcatttttaaaggtgttagcatgaagaacaaggcaatagacatagacaaggaagctgttatgagcacagatctcatgggaaaagcaaaactttctgctgtttttgttcagaaatacagaaattttcaggaagatcttttatgaaggtgataacactagggtccctactcaggacaccagctgaacagacaagatttccctgttacttgtggtttggtctgttaagcacaatcccacctcgatgctgccattaggcagatagtttatgcgtctctccaaacttcccagtggagacctttattttcagacttggaggactgggagtgtggagcacagaggaaaaagaacgtgaagttctgactaattac

SEQ ID NO: 477842 - DNA, 566 bp, Homo sapiens
agaagtcaaaccctgcagctatgaaggacaaagttagactttctactggagcacgtttagggtatggacctaaaaattcctgttgaatacctgctccgctctcccgacaagtccaaaaccaattgtctcacctttcactttcaggctggtgccctgtccagacaggtattgcctgttgggtttcctctgaaactttacacagtaataggtgcctgcatcctcactggagacgttttgcagaagaatgctgaagtcattgttggaggcctgcaccgctgtctccttggggtgggagatgcctccaaagttgtaaatggcctcccggctcagaccagctccctggaaccacctgatgggtccagggggaccgtctccaagcactgtgcagttcagaaagacagtgtctccagtggtccccaacaccaattcctggggctggatgatccacaggtctggttcagggtccccagctcctgaagccaaagaggaggtccttgttgaattccctctcctcttccatcgttcactcatttcctacctggtgttttccctcccttccttctttc

SEQ ID NO: 477843 - DNA, 544 bp, Homo sapiens
caagatttcaaagtcacttcccatttctgagccttttgtttcttcatctgcagcgtaggaacaacggcagttccctcctcagaacagttttggatggcaagttcccctcaggctctgggcatgtccagaggtgccatctgggagccaagaactagaggagtattgccagactaccgccaatgttcctttaaggcccaagggctcttcagtcagcttgtggtgaatgctgcctggcccggaactcacccttcagggcagtgggcttccctctggcccaggataggtctagaaatgctattcaccagcaaagtcctggaactggggaccccaaaaaaccacttaatgctccaccccactgtggctgtgctggtacctaacgtgcaagacaaagacttagaaattggagctagatccctccgtcttgctccttggatctatcttccaccccaggtcctatgtagcccggctccacttggagtgggatttctttcaatcaccctggttgtataccctggtcaaggtcagccttagtcttaggtctttt

SEQ ID NO: 477844 - DNA, 683 bp, Homo sapiens
tattttgggattattgcctctggaagctatgcctttagttttgtctctgcagccctggaggcacagagctctacgaggtgccgtggaggactctctgagaaaggagggctgcctgacaccaagagagaagagaggaaattacaaatggtccctgacttacaatggctcgatttctaagtttttactttctgatggtgtgcaagtgatacattcagcaaaaaccatgcttccagtacccatacaaccattcttttactttcagtggttcaaaggaactgaaacagggcaggaactaatctacagttcaaaaggaggccactttcccaagatagcttgcatttcagacatcacaaagagaaacaatacagacttttccatgtgcatcactagcatcacaagagccaacactggcacctacaactgtgtgaagttctggaaagggggccctgacatggagcttaaatctggaccaggcactgagttgtctgtgcatagtgagtacagtgtgggcctccttcgtcccccagtgtgtgacaataagtcaatagtaacaccttccattcattgagcaacaatcgggtgtggtggtggcacgtggtcttccctctgtgtgcgtctgtaccctcagctcctcctgtagtgaaaacatgggtcacagggtcacattgtgttaaggcctgtcc

SEQ ID NO: 477845 - DNA, 1626 bp, Homo sapiens
cccagagatacatccagacatacacatagacacacaaaggaccttgtgaggacagggaggaataacgaggaaaatggctgcgtgtgctcagacaccttcattcatccagccagacaatattattgagcatctactatgtgccatgtgcctcctccgagctgagaacaggaagctaacaaggacctaccctcaggaagctcacagtctccttcggaagacaataaatacaggaacaaagcaacagctaagagtgactcggaagacaataaatataggaacaaagcaacagctaagagtgactcggaagacagtaaatacaggaacaaagcaacagcgaagagtgactcggaagacagtaaatacaggaacaaagcaacagcgaagagtgactcggaagacaataaatataggaacaaagcaacagctaagagtgactcggaagatagtaaatacaggaacaaagcaacagcgaagagtgactcggaagacaataaatataggaacaaagcaacagctaagagtgactcggaagacaataaatataggaacaaagcaacagctaagagtgactcggaagacaataaatataggaacaaagcaacagctaagagtgactcggaagacaataaatacaggaacaaagcaacagctaagagtgactcggaagacaataaatataggaacaaagcaacagctaagagtgactcggtggaggaaccggttagggtagtcagggaacacttctctgaggagccatcgtgggaccaagaggcaaaaactgcaagaataaatgccacagtcccagagactgcagaacagaaaaatagagcccaaaggctagacaacattgttgggcagctgtgcatagtctggaatgctatctcttgacatcttattatgaaaaattggattggaaatacatatttgtttgagccaaagacattcattactaactgaccaaagccaagtcattttttgtaaaataggacttgtgagagccttgagacacagccttgaagacacagcttgagtatccttgaattccagatactttcataaacaagttctgcccaaagatgttataagaaagcagattgtccaagctttgcatccaccccagcaaagagttgagtgttccctgtgtgagaggggcaccaggagtcatggagcgtcaggctgggagcccaacaaatcccatggcagagtgtcccatgttgctttgaggtttatagaggaagctatgacaatgccaactcaaaagtacattcttgaattcagatactgattgagatgcagcgaaatctatccacagtcttaagctcatctcactcttcttatatcctagtaatcttacttctgagctctcttctgataaaataacccataataagcagagaaaaagccaggaacataattttcatgacagttacatttacaatatcctcctcatcctgccccagccccaccaaaaaaactggacaaatctaaatgtcctataacagaggaaggattttaaaactatctgttcagtggaatattacatgatcataaaaaatgatgtttgcaagtttataatattatagcacaggggaaaagccggctgtagcattatatatattatgtata

SEQ ID NO: 477846 - DNA, 788 bp, Homo sapiens
atacaataaacttgtcctctattgtgatagatgaagcagaaggcttcagtctgtacgattcactgtgtgaccatgggtaagtcactttacctctctgggcctatttccttatccatgaaaatcccacaggatcgaaaacctttttcacaaactggtgaatgtcaactcatctcttgtgctgaaaccaaccacaggtcagagggtgatggtgcttgggtgatagactgcataaagttcagtctcctggaacatagagcagggcagagagaggcacatatggatacaggagaaggaaaagccctgtttcacaggtactcttattcttattttacggatgtggaaataggcgccgagaaattggagaacttgctcaaaattacacaagttcctctaagactcgttgctccagataatcggagggtgtcagctgcagagagtattcttgcccaaggttttaatcttcccatggtggctcgtatccgaagactgactgatataggagcataagggcctggtcatcatggcccaatttgggacaagattgaaggcccattctagcttcagagctgtccatgggtttggccagtgctgttattagacctgcattgtagcttgacttcttcttctgcccaattctattttggtcactctctgccatcaagtgttgatccaagggcctttttaaaataaaagcacttcatgaaggctgaataatctcatctgcacaggtacccagatttggatactctaggagccctggagaggaaggttagcagtgacagcttgga

SEQ ID NO: 477847 - DNA, 1126 bp, Homo sapiens
tacctgtgcaggtttgttacatgcatatattgtgtgatgctaaggtttgggatacagttgagcccatcgtccaggagaacatgcaacagaaacaccctttccatctttgatgaagcccgtagaacatctctagccctgcaacactgtaaaggaagacagaaactgtgttggggaatggtaaacaatttggcagagtggaagaaggttaaccctgccgccttcgaaggggcatctattgaggaacatccaattcaccccagaatgccagaaagcctcaggaattggcagaaccagacattgaggaggtggagggaaagcaggatgctgaaaacacgaggattgactgaaagtctttgtgggggcattttgaccttatgcagccatgcacgtctgtccccagaggccaccggggatttgatctctgggaaatttgaatcaggttccagatttagcagccacaaagagagcattgactctggctgcgatataggggagaggtgggagggggctgaacaacataggggttaactaaaaagctgcctcccgaatgatgacacctccaacctgttcctagcccagcattagaacattacatctaggctcattgggcaatgtcccccatcccctaacaggcaatggactggagcttctttctatgaagaaattgaactgccccagagaatggacctgcaatcgtgacctttggaacttttcagtgaaaaatctggctggacactcaattgcctataaggaaatacatcagttgtgaaaccctctccgtgcttactaagctttccatcagcttttactcgcctccctttgagataaagatcatcagtcccttgaggtggagttaattcctactcttccttccagacttatcttaaatatcagcttttccaggaagtctttcctggcccccaacttctcttctcagtttagttttaattgagcactttatattattctattgtgtctccaatatcatttgaatatttgctaccatcaaatctcattttgaaatgtaatccccaatgttgaaggtggggcctagcgggaggtgattggattatgggggtggatttctcatgaatggtttagcaccattcgccttggtgctgttctc

SEQ ID NO: 477848 - DNA, 548 bp, Homo sapiens
ggcagccagttcaggacaccctgttatcatggcaaagtcacaaccagatcttagggcctcaggccgtctctgtgacacctggacactatgggacacatctgggaagatgacaatccaggaggcagttagctgtcgggagatcgccaaccggccaggccaccacctgtaccctctgccgtcctctggaggagacgtggtgagactgtgggtcccgaggaatcgacctggaagacagaaggcggaagagaagagtgaagctcaggcctctgagaatccgaaccaggctacctgctcaggtcttaacatgggccagaatcccacacccaggggcagggctggactgggcctgcactgtctgctgcagtgcactgtgggggttaagaacgagggctctggagccagaacgggcaactgagtaaacaggagctgcccctcgactgtgggggaatttaagtcctctgttccctggtctcatcacctgtacctgcgtcacaggctattatgaagattaaatgaacgtaaaaccaagaagagtgcctgatcctatt

SEQ ID NO: 477849 - DNA, 2213 bp, Homo sapiens
actgcattcaggagcttgcaaacagcagatagcgggacttgtccgcctccataatcacgtgagccaatccctcgtaataaatcattttctatctatgtctatgtgtagatatccctttgcttctgtttctctggagaacattgatgactacacggctggcgactcacctgcggagcgaggggaatggtggtatatgggtggaggagttattgccatttttcggaagagaactgcgacccagagaggagaagtattgatcaagccctcacagcgaacaaaatctctacaccactgcttcagagctaggggtaaagacagcagcctcttcctcttgcagcaatatccagactttacaagtagtgtgcttgtggtggtggttgtctctggtctgctcagtttgcctctctcagtgcagaacttctcccttatgagcaacatgaaacgagggcaatcagggtcccagtattctcagactgacaagtctcggagctatttgccttttggtctgtccccacaaatgtccttgattcattttggtgcttcggaccgggaactgacctacccaaccggtcctatttatctctgctaccgagaagtctgataatgtagggcttagggtttgaattttgtctctgttactttgcctaaaaaggttgggcacatgctttaacttctctgtacttcagtttttcatctgctcaatagcataacaatactagtcaacattaaatgttataataatagtaacaaacattattgaatgtatactatcaagtcctttcattagagggattcagggcagcagttacctttccttgccccacattcacgatccttccattagagggattcggggcagcagttacctttccttgccccaagttcataatttgtttgtgtgcttgtttggtagcatttggactgtaagctccaggagcattgcttgtttttgataatcattatatctctaatgcctagttagagccttgtacctgacttaaaggcttttaaagggtgagaccctgaatttggcaaactctcttatttctttgcttttcggaggtatatttttctctagtttcttagttgatgctctatttgaaaaattccaacctggtcttaggataccgtacgaaaaggaacctcctccacatttcagggagatcttctccctggaagccatttaggtacaaggttcttgtgttttcttacagagatgttatacacatacaaaatcaaacgtgcacacacatgcatcctccctttttcttttacaaatggtagcataatattcacactctgtttttttgaattcttgtcttggagagcatttgtggcggtattggtagagtgtttgcatggtcatttgtttgtcttgactgcatggtattgcattgcataaggtactgttatttatttacccagttccctattgggaaccatttaggttatttcacttgaaggttttaaggtaacattctgatttatattttagaaaaatctctctggctgctgccaggaggctgctgtgtaggagactgagcatggaagccccagcccagccctgcccagttaggaagcaactattgtattcagcaaaccctgctggctctaacgagaagtatcatcccgagtgcatcaccatcacttctcacctccatggcctctcattatgcactctctgcctctactcttgccttcctggagccgttctccagccgttagccaaatgggtcttttcaaaggtgagtcagctcatgccacttccctgttgaaaacgtcaatgttttcccatcacagctcaggtaatattaaaattatttcctgtggcttccgactaccgcccgacctcactggcgcctctctcccaggttccctgtgctccagcccctcatcacctgggatggggttgtctgcaccgctgtccttgtgcctgatgtccccacacgctcgctcctcctccaccttccggtagtcccagcttgaaagttctgacctcatccccttccccaacacacccctactccctgtcacatcactcgaatctgctgcctacaattggtgggagtgaaaccacttagtttgccaactttgaaggaatcctgtgaaatgctcaggtaactggcaccaatttcccatttgttcccttgacatttcagtgctgcttatggattagtgctttgggcagctgcacagataacccaccttttgat

SEQ ID NO: 477850 - DNA, 596 bp, Homo sapiens
attaccattggcaccaactagcactcattgaggataacagatgccttattctgcctctggtggggagtccctgtccgaggaggaactggcccagatcctggagcaggtggaagaaaaaaagaagctcattgccaccatgcggagcaagccctggcccatggcgaagaagctgacagagctcagggggctgctccagcgaggacagcactcagggagccccatgagagccaaggcggccgtgctgttcgccagcaccacagggcctagagggggagccatggaagactcggaggactcccgacctccaaataccacagacaaaacaacagcccccattgccaaccctggcagcaaaggcaagtggggaagcctggatacccacctttgccaggccaaagcaaggtgccccaatacccctaaccagggtgtgccagaggaggctgagtgggaagcaggaattttcatccccagcaggtagtaatgatccctccttttccccatggtttcggtgaggaccatgtggggagtctagactctcaccatgacttggaagtaaccaggcttgagtggaggcctgaaccccatccctgctcagc

SEQ ID NO: 477851 - DNA, 789 bp, Homo sapiens
attatgatccatcatgtggactctgcagtggtatcttaactggactgtttgctttctttttgccttcccagaatcccctagaatgaaagctccatccactgagagcttgcaccttgcacctggaaaagccagaggcactcaacagaagcccatgagagaagcctcagggcctaaaccctgcaaagccacaggggtggcactgcccaaggctttgagagcccacccctcataccagtgtgccctagatgtgggacatggggtcaaaggagattattttggagctttaagatttaatgactgcccttctgggtttcagacttgcatggggactgtggcccatttcttttgtccaatttctcccttttggaaggggattatttacccaatgcctgtacccccacagtatcttggaaataacacaatcgattttcaacaagggtaccaagacaattcaatggggaaaaaaatagtctgttcaacaaatggtgctgagacaagtgaatagccacatggaaaagaatcaagttggatccctgcctcacatcatatagaaaaattaatttggaattaatcaaagatctaaaatgtaagagccaaaattattaaactcttagaagaaaatgtaagaggtacgtcttcatgactttggattaggcaatagtttcctagttatgacacatagagcacaagcaacaaaagaaaaaaattgataaactggatatcattaaaattttaaagttttgtgtttcaaacaacaatatcaagaatgtgaaaagacaacccacagaa

SEQ ID NO: 477852 - DNA, 640 bp, Homo sapiens
tggtttgctttatgttctgatttgacacatcagatcataaatcatgatcactgagtgcagaggaaggaggcattctgtcaaagcatattctgagacaaggaatccattgcaaggagtttatttgggagctatcattagtgttagcatattttatggttggcccaagacaattcttcttccaatgtggcccaggaaagccaaaaaatcagacacccctgatctacatgttctgcttctaagatgcccagccaaagacagcccttcagtaggacacaatgatggcttgacccagaggaagacacatgaccccaacatagctacagccttctggagcattgatatggactctgggaagaagcagagcatcaaggatgagaagaacctagggccgctggaaggtagcatgagggactgttctgagaatgaagccaacaaacacagcagcaggcaggctcctaatggagggagtgaaataagcccaagtggttgacattgctggagctcttagcttaagctcccctacaagccaaccctatcctagattacacctctttgattatacaggctaatatggaagtcttattttttgattttttattcttaaatattatctgactccttaccatataaacttaatttg

SEQ ID NO: 477853 - DNA, 855 bp, Homo sapiens
gtttaccagttttcagactgcgtcagagggagcacttgacagttaacggaggcaggaaaatggttgtgaaagctgtgtccagcgagggctttacaagctcagatgtgggcccaagagcagaactgggcctgagcgaggactccccccagcccaggacagggcccagcaggattgcaaaaacaccgcagagcagcaattgctgcatctgcacccgctccttcctggctggtcatcattttgacaaattctgtcaacaacagcagtgtcattcctggcatctgtatgggtcacgtctgaacagacacacgccctgcagccctgcaggatggacattcatgagccgtgaagtttccagtaataaatccacagatgcttccagcacctgccttttcgcatcacctccactcccagccacctgccaggcaacaggtaacagagacccagtcacaggagggcagtgtgggggcaggactgcagtctcccaaagcccatgcacaaaaccgacagcgccctggcaggacaaggaggctgacattcagatgtggaggaacaacgcatgacccattcctggtcatgggggccacagctggactcagccttgaggcttggccagacttaacaccgtgtataaaccaggacctttttagaaatgcaactactgtgttcatcaagggaaaactgaacttcgttttccttaaaacttatcaccagctggtcatcattttgacaaattctgtcaacaacagccatgtcattcctggcatctgtattggtcacatctgaacgacacacgccctgcatgcagccctgcaggacagctccaggcctgagttttggtgtggtctgtacctaacc

SEQ ID NO: 477854 - DNA, 3172 bp, Homo sapiens
aacatcggggattaaatttcaacatgaggttcggggacaaacgtccaaactatagcagggatgacaccttcactcaaatcacagcccctctggctgttcgttcctggagccccttgtgctgcgttggcccctgcttggtcctggaagaacaagaggtcgagtggaagactatgctggatgttaaaggtggaattttggtgcatttgtcctggaccactgacgctttcttgttcagcacaagggcgatggcaatggccactggcaatcctgggctccagaggcactggagtattgacacgctaggggtggacatgcccagtgtggatgccctgcagtgctaccctgggaagcagatgatctgggccatctggtggccacactggtactgtgctgctctgtgtttagctgggcatgtgctctgggctgggcatgagacaaaatgaggatagctgctgggctgtggatagttgttcacaggggtgcaggctgttgtaggtgggccaggaggggctgggcagcccatgagggtgaggctgagactccacactgagcccaggtttaggggacctggtgggggtcacagcctcccctgtcccagacttctcctggcctctctcatgtcctatgagaccccctcactgtccaccctcatgtcctgtagagaccccctcactgtccactctcatggcctatagagaccccctcactgtccaccctcatggcctgtagagaccccctcactgtccaccctcatgtcctatagagaccccctcactgtccaccctcatgtcctatagagaccccctcactgtccaccctcatggcctgtagagaccccctcactgtccaccctcatgtcctatgagaccccctcactgtccaccctcgtgtcctatagagaccccctcactgtccaccctcatgtcctatagagaccccctcactgtccaccctcatgtcctatagagaccccctcactgtccaccctcatgtcctgtagagaccccctcactgtccaccctcatgtcctatgagaccccctcactgtccaccctcgtgtcctatagagaccccctcactgtccaccctcatgtcctatagagaccccctcactgtccaccctcatgtcctatgagaccccctcactgtccaccctcatgtcctatagagaccccctcactgtccactctcatgtcctatagagaccccctcactgtccaccctcatggcctatgagaccccctcactgtccactctcatggcctatagagaccccctcactgtccaccctcatggcctatagagaccccctcactgtccaccctcatggcctgtagagaccccctcactgtccaccctcatgtcctatagagaccccctcactgtccaccctcatggcctgtagagaccccctcactgtccaccctcatggcctatgagaccccctcactgtccaccctcatgtcctatgagaccccctcactgtccaccctcatgtcctatagagaccccctcactgtccaccctcgtgtcctatagagaccccctcactgtccaccctcatgtcctatagagaccccctcactgtccgccctcatgtcctatgagaccccctcactgtccaccctcatgtcctatagagaccccctcactgtccaccctcatggcctgtagagaccccctcactgtccgccctcatgtcctatgagaccccctcactgtccaccctcatgtcctgtagagaccccctcactgtccaccctcatgtcctatagagaccccctcactgtccaccctcatgtcctatgagaccccctcactgtccaccctcatgtcctatgagaccccctcactgtccaccctcatgtcctatgagacccctcactgtccaccctcatgtcctatgagaccccctcactgtccaccctcatgtcctatgagaccccctcactgtccactctcatgtcctatgagacccctcactgtccaccctcatgtcctatagagaccccctcactgtccaccctcatggcctgtagagaccccctcactgtcaactctcatgtcctatgagaccccctcactgtccaccctcatgtcctatagagaccccctcactgtccaccctcatgtccaaagagaccccctcactgtccaccctcatggcctgtagagaccccctcactgtccaccctcatggcctgtagagaccccctcactgtccaccctcatggcctatagagaccccctcactgtccaccctcatgtccaaagagaccccctcactgtccaccctcatggcctgtagagaccccctcactgtccaccctcatggcctgtagagaccccctcactgtccaccctcatgtcctatagagaccccctcactgtccaccctcatgtccaaagagaccccctcactgtccaccctcatggcctgtagagaccccctcactgtccacccatatggcctgtagagaccccctcactgtccaccctcatgtcctatagagaccccctcactgtccaccctcatggcctgtagagaccccctcactgtccaccctcatggcctgtagagaccccctcactgtccaccctcatggcctgtagagaccccctcactgtccaccctcatggcctgtagagaccccctcactgtccacccatatggcctgtagagaccccctcactgtccaccctcaggaccctctgcatttgctccttgggttcccggaacttgagcttgggtcttggtccacagcagctttgggaagggccctcggctgctttttgcttcagcagctggggagcagttaactttcagacccggccctcccccaaggcagctcagggaggggctggacactcggttatttatgtatttacttatttttaaatcaaagcacagcaaacatgaccatgtgggggtggcccagtggaccctcacagtgagccctgggccacacagaacatggccctggagcacccctatgaggttttaacagggttttgggggaccttggtgcttcctaaagtttcgggatgagtccccggggtctccagactgcgtctgcctcctcgtgcaccagagggtggcagtaactgttcatgtttgccccatccaggggtttttaccaggggtacctcatcctttctggggagtggggag

SEQ ID NO: 477855 - DNA, 1509 bp, Homo sapiens
gcatcgttagggcccccttgcccatggtgtggcgtcccctgaccgatttagccgttattgagggacatcgaggttgcttggtgtggcggcccctgaccgatttagccgttattgagagacagccaggttgctttcaacgttttctttttcacagacagtggtgccaaaggcgtccttggacatgagtcgtctcccagtgggagcagagacctgggtgtggggagactcgagtgcaggaccctacagggagggctggggaagcaaacacccactcccagttggctccctgcaggccagtcccacccagcagcccggagtcaggcagccgcaggtggccctgcaggtcacagaggtggaaagtggggtgggccagatgctggacagggctgtccatggggagctctatggacctctcaatgtcagcgttttggggcccaggccagggtccgggatccataggaacccctcgaccaccaacagggccttgagcaccctggccagggcggaggtagtccaggacagaggacagttttgccagtggaagcctccggcagctgtgggccccagggctgacctgctgctcgtcctgctgctcgtcctgccccgtgctccaccgtcctggtttgcccagagacccccaggcacccttggctggtgggagagacagcacaaacatgaacggctcacgggccgcacataagatgcccccgctggggaggagggcacaggacaagcattcttcattgtctgtctgacagtgtgttttgaatgcgtgtttgaatattttcatgcttaaaaagtaaacaacaaaagatgatgggagataggatgaggaggcagcgtgctgaaaagggtccatttctaggtggcgaagagagcaattgctgtttactcatttgccaatcagctcattatccagctacctctccttgttcctgccttcccacttcccaaatcctactgcttctagggcgtccctctgcaactgtacccccacccaactgcctggcctgactcctggcaggtgagtgggcatgtacatctacgtgtgaatggtgtctgcatgtacacacatgcacaaaagtatgtatgtgtaaacgtgtgcatatgtgaatgacatgtatatgctcatgcagatacgctaatgtgtatgtacatgcgtgcatgtgtgtatgtgtaagtggtatatgcatgtgtgtacatgtaggtttttgtgaatatacaagtgtatatgtgcacataagcagtgtgtatgtgtgcatgtgtttgcacatgtgaggggtgtgcatatatatatgcatgtatatgcatgtgggcagtgtgttcacatgtgtatatgtgcatgtgtgcatgtgtgtgcacatgtgaggggtgcgtgtatatatgcatgtatatgcatgtgggcagtgtgttcacatgtgtatatgtgcatgcgtgtgcacatgcgaggggtgcatgtatatatgtgcatgtactcacgtgtgtatatgcatgtgggcagtgtgttca

SEQ ID NO: 477856 - DNA, 615 bp, Homo sapiens
gttaagtcgcatcaagactgtcggagatgccagatgatgccggttcggaagcatccagggtaaagaccgggctgtgcgcgggaaacacggaggctggacccaagcaggaaattcccacccgctttgcggagaacaataccagggagggggctgctggctctgctctcctcttcctcacctctccctctccatggagatctctctctgcctgctggctccatcttgtcctgcatcatggacaactatgggcagaggagaacaaacatacaaaacgggccacgggcagagagcagggtaggatgaaacatgtcattagcaatggtgattccgtcctgagctctgtggggaaattggtgttgaagttgggccactgtggggaaagaaatgagtggtccagaagatattcaaccagccaagattaccatgttttcacatctaaggaaagagagctgcagggatgaggggaggcgggcacatctatggtctctatgtttctgggtgtgcaggcttggggagcaggagaaaaaactggagaatctggagaaagtaagacattactgttaagtgcctggggcaactttctaagtgaaagattccaataacttccactctgct

SEQ ID NO: 477857 - DNA, 963 bp, Homo sapiens
gcaggcggcggcgggcggcatggagagcctgctggagaatccggtgcgcgccgtgctctgcctcaaggagctcacggccatcgtgcagaagcagcagagcctcatccacacccagcgagagcgtatcgacgagctggagcggcggctggacgagctgagcactgagaaccgcagcctgtgggagcaccagcagctgctgcaagcccagcctccgcccgggctcgtccccccgtcatcggccccgctgccggccgctccggccaccgctcctgccgccgccgccagggcccaggaacctctccaggaccagggacagcgctcagcagccgcgccgcatcccgcgcccgatcggccgccgcgtcagcaccacggacagctcctggagcagccccagcggggccctggcagcagggctcacacaccccagtcgccccagaagcatctggggacacaaggggccgtgactgacaaggagaaggagcgtcccccgagttgctgcgctgctgccggagccctccttcagcacaaatccccctccgccctcggcaagggcagccgaagaggtgcaagggaacatcccatcaaaccaatggaggactcaggcatggcttgaggactcagtctggttacagctttttcctccaactcaaggagggtttttcatacagggtgtttggccgttgttgaaagggagcaatgacatgggggacagttggcagatggagttggtattcagatgccatgcctgtttaaatctccccgttaaggccagcaactgcaaacccttttttcccggttatctggtgatcactgaaatcttgccttgggtcctgagagaaatgttaacctctcagttcctagaacttcaagctctttcttcactcaggaggtccatgaactaggaatatgggaagaagatatgaaagtgtctgggatgttctctcctctgtactggaaaggctg

SEQ ID NO: 477858 - DNA, 867 bp, Homo sapiens
cccaaggccaagtgaccctctcacccactgtgaatccagcacccctagaaaagctgtgcaccccagcagatacagtaggaggcccagggatggtgtttactgctgggtgagggaaggaaggccctcaaacagggcagcgcatgatgcctcctagttagacaagaaagactgggagctccacagataagagaaagaggggtcagcccctggccaggtacttccaagcacaatggtcatctcccaagtgtgggggttggttcttctctgtggcccccagcttcttgaagccactggggctccaatctcaggaagatgtgttgtacagaggttccagaccagcctggacaacatagggaaactgtgcagcatagaccccatcttaaaaaaaataaaacatgacacagctgtgtatgccttgattcctgtaacctacagcttcaaggacaagaaatttgctcacaatcctgagtgcacctggtcctgcacctgtttaagattttttgaaaggctcaccctccgggggcagcttgatgggtttgatagttctagtgctatagaaagaggatgcaagccggtgagaaggcagatggagagcatgaaatgtaggctggattcagaaggaaagggctgccctccagccgccccatggcagttgcagacaccagcagaaaccacagtctatgggggaggggattttccccctctctaccccacatggggtggactgtgggtctttgctgggagagctgttcagagcatcctgtatgcattacctgctgctgcatcagcagccaccctgaattttcctagctgaaagtcacgtaatgtatggattctcacgactctggagctgtcctcggctcttgc

SEQ ID NO: 477859 - DNA, 697 bp, Homo sapiens
ggtccaggactgcagagccatggttggcctggtccttctggggctggggctggcgctggctgtcattgtgctggctgtggtcctctctcgacaccaggccccatttgacccccaggcctttgcccacgccgctgttgctgctgactccaaggtctgctcaaatattgtaggaagctgggagtggaagagagcctggggctggccccagctgctgctgcgaaacaggggtcactggatgctgggtccctggccgggctggctggaggcctcaggaagaggcctgctacagcatcatcctggccaagattcctccctgcagaggaccctggccacgctgccacagggtctgctggggccaccagaagcccatgttcctgcctccatctctcccctttcaccaggttttactcttgggattctgctacagctggagcccctgggtgcgagttcctaagctttcttgtccctgcccctgccccagcacaggtgacttcatttctgtcctctcagctcagtggacttgctcaacttttgcataagtctccacttggtggtagcagcttgctgatgacttgttttaaaactttcatcctaaataacctttcgatgcttgaatatttttaagttttatacatagtttctaattttttttccccaacagatccagatacctggatccagggaatgaagttcattt

SEQ ID NO: 477860 - DNA, 4701 bp, Homo sapiens
ggactcggaggaccccttcacgcaagatgaagggtgttattaatctggcatcttcttcgtgtggccctggtggtctctggcttggggcatggatggctgtaagcctgagctgccattctgggggctctgctgggagggctagctctcaggagatgagtcttgagtatggtggggacagtgggagcgggagcttaaaaagtcagacagaaaagcactcgggctgcctgagtgaggaaaaatcataccagtgccaaaattccacaggatttcttacttttctaaagctttataacaacacttctattaatttatttgctgttcagggtgtgagaaaatctattgctgggagtatattggagagggttgaggagggtgcagcagcaggtattgggcactacactgtggtcatagaaaggaagaccaaggccctgtgcacagacagccatacaggctccacccgccctctgaaaaatggatctggaaagtttacttgggctgcagtttggaaggagaaacagattcctgtgcactgaggcttggtacaccctggggataaaaaccgaagaatagccatgtaaccatcccatccagtaaggtcatctgctcccttcaatgtgtggacaaatgctgttatttcaaagcattcttatcttactcttcactttgtatgccacatgaaggccacgtgtttgtgagctgaggttttgggttggcctttaggctacttataaatcctggaatcttttttctaatttcccaaggtttgaaaattgttttgtgtgttacgttttatattgatgtaattcaaactttcagaaaaattgcaagaataagaaaaacaacttccattatacactttatccatatttgccaattatttacattttcttccatcggctttatcattctctcttgataaatatataaatataatatataaacattgttttccatttatatattttgtataatatacaaatatgtattttatgtagagatgtaaaaaatgtatttataaatttgcgtacttcatgtatatgatgtgaatatatatttatatttcataaagttttagatgtttattatgtaactatatatgtatttgatctcttatatgtacagccattatatagatgcgtgtgtgtatatgcgtgtgcgtgtgtgcgtgtgcatacatatgtatgcatcttttccctaaatcattggaaagtgatttggaggctttgtatgtatttaccattagtgacttcagaatgtaccttctaaaaataagggaattttctaacataaatgcagtataatgaacaaaatcagaaaatttaatactgtacagttatctcacccacagcccatatgcacatttgccaattgccaggaatagctgtactagtttcctgtggctgctataataaattaccacaaacttagtggcttaaaacaacacttgcttattcagttacagttctgaagatcagaagtctaaaatcaaggtgttggccagactggattccttctgcagctttcaggggagagtccattcctcccggccttccctggctcctggaggctgcccgcattccctggctcctgtcttcacgctcagctcactccagcctcaggcttctgttgtcacactaccttctccacctgtgactctgccacctctctctcataaggaaacctgtgataacatttagacccctccagccccagataatccaggataatatcccattttaagattgacttcatcacatctgcaaaatcccttttgccatgtaaaggaatgtattcacgtattctgggattaggacgctggcatgtttgcacggccattattcagcctccacatcatgttttatagctatttttccttccaggtccagatcacattctagggtcctgtaccacatgtagttggcatgcctctttagtgtcttttcatctggaagtttcttagtctttctttccatcttctgaccttgacattttttaggagtacagaccggttgcttcacaacatgtttctcaatttgttaagcagcatttgagaaaaaaaccatgctaatatgcatatacacctttaaaagagaagacgtagagagttcatgagattttcagatgagttctatatctcccaacctgttaaaatccactggaactgagatagttggattgactcaatattgaatcttaatctgcatatgtgtacatatacataatatgtatatcactggtgtgtgtggcagattataaaatagctacagatgctcctgtgtgccttcctctccttacaaagtgacttagctcctgccatcaaggcacgaaggagtcctttctctctctcttaaatctaggttggccctgtgacctgcattggccaatgggacactagcaaaagtgatgcaagcagggctctgaaaggtgctgcgcactgagacttattatcctgcagcttctggagcccttcgactgctgctgtttgaagaagcccaggctagcttattggatggtgagagggatacggcctggtcacccctatgccctggccctcagcgtgccaggtatgtgagtaagcccaccctgggttattcagccatgagccagccctgccactgaccacaaagatcagccatgccagcttagactggaagaactacctactaattcacagaatcccaagctaaaaaatgattgttctcttaagctgctaaattttggggagatttgttacatagcaaaagctgattgatagaacatatatactttaatattccacgtaatttagattattaccttttttggttagagtgtacataatcttctctctgaggctcctaaagatagaggtacagtctttgaattgtttttagcagctgaagcagtgtttgagtaggccaacaatagcatggtttcttactaaaataaaagcactatgtaatttggttcctttgtatataagaagagtgtatacatctacaagttaatatgtattaaaattacaagttaagggttaaataggagttattgttcctaggtgtccacccataggtgaatgtcagcttctgcaatgctgctaatcagacattatgggtagatgaaggttcatctaattccctttccatttcccaatgcccctccccttcctgtttccccaacactaacttgtcaggatgaggggcttgcttcatgggagctggaggttgagccaagagttcacccttctctctcctggcttggtcatttcttctcagaccctaaatccttatcttcgctttaataatgtttcaatatgcttttggcatccgcagctcattcttgtgaactagagcagggttcaccaacccctgggtcatggactagtaccagtccttggcctgttaggaattgggccacacagcagaaggtaagtggtgggccagtgcgcaaagcttcatctgtatttacagctgctcctcattgcttacattaccacctgagcttcgcctcctgtcagatcagcagcagcattagattctcatgagagcatgaaccctattgtgaactgcacaggggagggatctagattgcatgttccttatgagaatctaatgtctaatgatctgccactctcttccatcacctgcagatgggaccatctagttgcagggaaacaagctgggggctccccttgttctacattatggtgagttgtataattatttcattatatattacaatgtcatgataatagaaataaagtgcacaataaatgtgatgtgcttgaattatgcgctgacctagtgcatgggttgctaaagaatgtgggtattaatatatctagggcttaattagtggtggaatctgggatagcaattcttttggttggcatcttcctcttttccacctcctctttcttcttaaaaatgcatattaaggcccttatttggtggcttcaaaatcattgagactgaattaagaaaaatagtgcctaaatttgtaaatgcttagtattgttacttgctgcaaatatgtagagttttctgttatttgttgcagtatcctgtgttttcatacactgaagtcaaaaaacacccaataaataaatatttaaccccaaaattgatctttccatttatctgtctattcatccatcacctcctccctcaatgctgccacctacccactcatccataaatttctccctcccctttctcctctattttcaccctttctctgcctacttatatattcctccatctcctttcctgattccttctatcccttgctccctgcatccatccctatttccttccttcttccctcacttcttccttcctccttccctctcttgttccattcatgcatatgtattcatccattcatccatccactcatatatccatccatccttttttcccttcatccttccctctttttcttcatccatacatccattcatacatacatacatactttctatctatacatcttgataattatctacctgtactgtctatgaacatataaatacatgaagcatttttatgtgaacatggaaaggaagcacacattagtaaagagcagggcaccagagctgggttgtctggatttaagtcctggcattgctcctcactaccttggtggttttggaaatttctcacccaccttttgcttcagtttccacaattttggatatggagataatattacctactccat

SEQ ID NO: 477861 - DNA, 520 bp, Homo sapiens
tcaagatcagtccaacagatgtgcgagtccatacacacctcaagactttcaacttaagaatgttagcatttccaaactttctgatcatggccttgctctctcatccaggctggagtgcagtgaagacccgtgaaagattccacctgggtcccagcagcagggatggtcccgctgccatgaggcctttcataatcggctctgtcatgaggaggaacaacgctctgcgtgcatttcataaattattcttcagggttgtagctgccgaggtgatttcacaaggcaccctgaatcctgactcctcaaatgtatttgccagcagggaagactgcagagacagccacaccggctcgctctgggagagcggtgggttgcaggtcaccctcacacctgaacaaacatggaattcagtggaatgctcacgtcgctgtttccacttcttggttttccacttgaatcggtgctttatttaccctctgcttctaacttagcctgaggatttcaagtgttattttgagagaga

SEQ ID NO: 477862 - DNA, 828 bp, Homo sapiens
ttattaatctggcatcttcttcgagatgagtcttgagtatggtggggacagtgggagcgggagcttaaaaagtcagacagaaaagcactcgggctgcctgagtgaggaaaaatcataccagtgccaaaattccacaggatttcttacttttctaaagctttataacaacacttctattaatttatttgctgttcagggtgtgagaaaatctattgctgggagtatattggagagggttgaggagggtgcagcagcaggtattgggcactacactgtggtcatagaaaggaagaccaaggccctgtgcacagacagccatacagaacaaaacatacgaagaaactgtcatgatattagatttggcagttatttcttggatatgacacctaaaccaaggcaacaaagaaaaatagataaattggacttattcaaaattaaagacttttgtgcatctaagtacactaccaagaaagcaatataatggcctacagaaggggaaaaaacatttgcaaattacacatgtgataaggagttaatacccagaacacataaaagactcctaaaatccaacaaatgcaaaacaactcaattaaaattgacaaaggccttgaatagacatttcttcaaggaagatgtacagacagccaataagcacatgacaagatgctcagtcaatatctttactcatagagaaatgtgaatcataaccacagtgagataccaatagtacagttactactgaaaaattagaaagtagcaagcattggtgaagatgcggagaaactggaatccttgcaggaatgcttatgggaatgtgaaatggtgctc

SEQ ID NO: 477863 - DNA, 806 bp, Homo sapiens
gcagggatgttagtggacatctgccatgtgccctgtgtgccactgggaggcatgggtggagatcaggttccaggcacacctctgggacataccacagggccaagcttttgcagcctgggctccttcaacgactccattcatggatgtagagaaatgctccctttcatggcagctgcaggtggtatctttgcccctcttcatcccactgcctcacagccctgccctggcctcactgattccagcactgaactttccatcacagttctgtctccggtcagtcttttccctggggcactgtgggctgaccatgtttcaggatcaggctcaggatgaaatcgagtctcccctcaccagtgcccatgagcacatctacacatacatgtctcaggacaagaagaagtctctttcccaacccctgaacctgggcattcccgtggctgcctttgatgaatggacagtgggggacaatgaactgggcaggctcctgagccccagtataggttacagcccccaccttcactcccttgcaacactgagaccacagtgttgtggagagtcctggatcagcgtcctggaagatgagaggctacttgggcacacggagcctgtgtggccatgggcaggatgggctggggaggaggcccttgctgaagtccaggtgatcactgataaaggcctgaactgggatggcggtgggaatggaagaaggggaccacgaaggggatgtgtagagcaagactgctgaggactcggtgactggaaggggaagttgaggagctgccctctgctggcctggcatggctacc

SEQ ID NO: 477864 - DNA, 645 bp, Homo sapiens
catgtacttcccacatggttatatcacaaactggggctcaggacccaggaactggcagcttccattctctgttccttggaccactggctcttggagccctcaactgtcatgtaagaagtctggctacccttctaataagaccacacagagagaccccgagacaacctgaggagggagaggaggccagctgtgtctaccttcctacttccccaccaaagtgccagataaactgggaactctgggacacaaatggcatccaagggttacttcacctgaagcaggaagctgagcccttgtgtcccaggatcagtcaatcttggagccaggaagactctgggggtgtgaggaacagcagggggcatttccaggctcagggtaatgcccaagggcagattcagaagacaccatcctgtgtttggacgttagcatctgctgaatgtgtgaggctcctggggaagctctgctgctttcaggccgtgtaacccaacttctctctgccttgcagggttttgtgcagacttacaggtatcattttgtatgaagccagtacacccacaaaaattaggagatttaagatctcaccaggaacctagctgctattccatgattgacaatacgtttataaagtagattgacattgtttct

SEQ ID NO: 477865 - DNA, 1751 bp, Homo sapiens
gcagccaagctcacagtggaaaaatgcggggtgtcctgactttcctcttcacaaactgctgctctggacacactgcctgtggggtatccctgctctgcaacgagcagtacctctgctgctgccatgcactgctgcttcaataaaagttggtattcctggactggactgaccagctggcatagaccaagctctggtgaccgtttatgtcatcaacaactatttgggcataggctccgcaaggcaaaactgtcatttatggaattacagaatgccttatccaccatcatgatattccacacaacattgcttctaatcaaggaactcacttcacaaccaatgaagtgtggccaaggacccacgctcatggaaattgccatcctgaagcagctatgttatagaaccttgaaatcgtcttttgaagattggttaccatgccagttaggcgggaatacctttcagggctggaacaaggttcttcaagaggctgtatatgctctgaattggcattcaataaaaggtgctgtatcttccatagccaagattcacaggtccaggaattcaggggtgggggtagaagaggtgccattcactattatccctagtgacccaccagcaaaatgtttgcttcctgttcctacgaccttattctctgcaggcccaggtggcttagtgccaaggagaagaatatttccactgggagacacaatggtatttcccctgaactgaaagttaggactacttaactttggggacctcaggcccctgtatcaataggaaatatgatagttactgtactaactgaagtgattgatccttactaccaagaagaaattggtagtagagatcaatcactcctaccaaggagggctgtttaagttatatttttctgttggtattctgttgttcatagttttccattataatcttttttatttctgtaaggtcagtaatgatatcctctctttcattcttgaattaattaatatgtgacttgtctagttaaaacttggtcaaatgtgttgattttgtcaaagcaccaactgttgctttgtttattttctatatttttaattttattgattcatgctctaatccctattgtttccttccttttgtttgctttgtgtttagtttgctcttctttttacagtatcttaaggtgttctttgatttgaattttttcttctttttaatataggaattatacataaatttctctctaagcatggctttagctttttcttgtgaggtctggtatactacatcttcattttcattcatctctaagtattttctaatttaccttttgatatcttctttgacccatttgttgcttagaagtgtgttctttaatttccacatttctaaaaatttacctaattgatttctaatttcattctattgttgttggagactatatgttataatatttcaatcatttaaaactttttggtgttcttttaatgacctagcatgtggtttatccttggaaatgttctttgtgcacttgagaagtataggtattttgctgccatttggtcaaatgtactatatgtgtctatcagttccagttgatttatagtgtttgagtcttccatttccttatcgatcttctaccaggttattctacccattatagaaagaggggtattgacatttacaactattttttattatgcatctatcccttcaattcagaattgttgctttgtgtgtttgggggctctgtttttaggcttatgtgtattcca

SEQ ID NO: 477866 - DNA, 689 bp, Homo sapiens
aaccaatcaaggtgtattgagccagcctgagacttcacccatgtcctgcaaaggacatgaactcattcttttttatggctgcatagtattccgtggtgcatatgtgacccgagatttttatttccctttgcagtgccttcttgctgcatcctctggagagaaggagccctgcgtcctcagggaaggcagaagggcaggcaagccggatactgtgatggtgcctcttccattcacaagggaggagccctcacagccttgtcatcacctcctaaaggccttgccttttaatttgatcacatgggccatgaagtttcaacacctgaattttggcagaaatgcattcaaaccacagcagacccattatcctatttctaaggaacctgggataagacaagtccataggacaggcatggacaagcgtcctgagccctggggccaggggaaatccaagctgtgtgatcttgagcagcttccttgcagctcatccttcatgtcctaaaacagatgatacagcaacatcagcaaggtggcagactaaggaacttcagacactacttactacccccagaaacatttttttaaaaacaattagaggacctttggaaaatagtgaaaaggtacaggagccaagcaactgcccattcaagaaaaagcaacattcaaaatgcaggagattttgtggatttgta

SEQ ID NO: 477867 - DNA, 558 bp, Homo sapiens
agtatctcaaagttagagctaacacaatgcaaagcagaacagagctttacatttttgagagagatccatccactttcaattcctggggtttcttgaggaaagcacgtttttcccagtacagatctatggtgcttcctctgtttttcccaaggagtgccaagctgttagaagttctcttaagtcctctcctatgtgcatcaagagtggcaagacaaaaacagagaaaaataattcaatcaactgagaaaaaagagaaaaaatcctttttccagaaaaacaagattcaagaagagaaaaaaacaaaccataaaagggcttttaaatatagacggcagagaccaagagaaaatactgttacatggttacaagatcaagttcacaaggacataaacaagatggagacctcatcccgtttcttcgtttgtttcagggatctgtaacaaagtttattactgaccagcttgctgggctatcttgaacagcaagcttatggggtcctaagctcatgttctattttaaggtacctctcttcatggcagaatgacacagaaagacaaa

SEQ ID NO: 477868 - DNA, 520 bp, Homo sapiens
aggaaatgctaacatgttcactaaacaaggtgattatggaattccaaaggcccaagtgtgtgtgctgcagaaacagcgagtgggtagggctttcctaagcccggtagcagggctcttgcatcctggaggccatgagaactgtgaggtccacaaagaggctgctgtggccaaatgcattatcatgcgagggaatgggctggataaagggatcattgagagcagtgccagcccaagaccaaggctgggggagtgggatggtgtagactgtcgtcccgagcctctccatgatgccaacattgctaaagttgctcgagggcagggaggacaagtggctcatggtgcaggaggtgttgctgagtctggtggcagctctgctctcattcctgactcccacgacaaacacagacttcacagaagtggcaaacacgctgaccctgcggctccaccattcaagggagcccagcttctctaaggcactgacagctctagtagtctccgctgctcattaccgttgcatgcc

SEQ ID NO: 477869 - DNA, 1432 bp, Homo sapiens
agaccttggccatgtcgttcttcactctcaggtactactatgctgcttcctggaaacatggcccaaatccagaagtccttatggagtgtgcagtaggagatccaggggcctgggcacatgctggctccttgtcctctgtgctcatgaaatggggatgggaggtcccgcaacgtcttcaggaaatggaagagaaggtggctagagcaggcccaacagcagagctggggctcctggtgggtgtggagggaggttttatgtggctgaggctcagagcaggatggacctctacggagagaagccacagcaaggggctcctctccatggggtctgctgctcgccctggggctgacctgctggtctctgcacccactgtctccacaaagaactgccctgctgaaactatgggggtagttctcagcaacaccaacagggataggcagggccgagcctattccatcaccaggtggcagatccacacagaagtgaatctttctggcttgcgtcactacagagggactgcagcagagccagcccagatgtgtggtgtctgcagcagcagctgtggatgtggccagggcatgtgggggtgtgacctagcagtcccagtgtgcatgctcggggccatggactatactgcaggtgatggagaagctcaggccatcaccaggcctggttctgactctctggcatctgtggcctgctttctggctgtgcccctgttgcttgggtggaaagccacctcagagaatctggacccaggagtggttccagctagcaccatgggaacaaagttcagtgttttccaacccggtctgctgatcactcccatcacagcccgtggggacccacccccaaacctactgaattcagaatggctgtggtcgggccatgaggtgagggacggggaccacagcagtagctcagtcttcgagaaaccagctcagagagctccatcccacctgagcgtctcctctcagcacaagctggtggctgtggagcaaggctgtgctctctacacccaggagacctgggcacctgtcgaagtttcctagagggctagtggcaggaagagaatgggccagttcctagccaaggcataaggtggggcttggttacttggaaacctcagggaggtagaagacagagatggcctggagcaagcagcagcccacacctgctggaaaagtttagcttgtgaaaatggattttccacaaacacggaaattggcaatttccccttaggattatatatgagggaagtaatctatttgaataatgctgtgaaataaaagacattcccgtttctcgttgtacccctttcctcctttctaatggaacaaggcaatcttggaaagtgcagagggatgagacgcaggcaacaaaaatgccttcatccatttgccttgatagggaagggctctatgtatgtata

SEQ ID NO: 477870 - DNA, 1916 bp, Homo sapiens
aatacaaatggtggagccgtggtttctgctggtgccctggtgactccccaggctcatggctcgaggcactgcgcaggccctctgcagcccctggagaatctgcctgagggctttcccagcattgtggggtcggcctcacaagcatcccttagctgattacaagtgggaattggagggcgttcagcaaacaccccctggggagagtactactggtggccaggccctgtgtaggacaaacattggtggacgaggcaacaccaccctccttgtggaggcaccaaggcctctgtcctgccccctgacttccctggagcccctcatcactccctggacacaggcggcatggactgagggtgctctgcaacagggcccctgggtttgctgcaccagcatcctcagcaggtgcctctcacctgcctccagctcagatccccaggataacacggttggtcctgaggagactcccaccaagaacctggggaagcagaaagaagaacgttaaaaaggaaagtaaaactgcacatggctcaaaacttcaaagagttctgaacattttcaaataaaaagtgaaagcctttctcttattttctaggctggttcatcacttcttagatgtccttttgagagaggcttctgtgcatatgccaacacaggtattttatagggttagttatttatttgttattctgtttttacactgttctgccttttgttattcccttaaacatatgtcttcgaaatgtttctgtattggtagagagagggtcatttcattctttgtgtatgttaataacttgttactgaagtgtatacataaacacaagtgaacaaattgtagtttttccatctgtagaattgtcataatctaaataatctgtttcttaatgatagattatttgatttttttgttctggtttcattcttgcaacaatatttgtaagtgtttctttttcctggctaacttatgagtacagccaccaggtcaattcctggcaggggtactgctaagtcaaagggtagctgcattttttaactttgatggatatggcccattaactttccagagcagccctctgcaacttacactcctgttgacaatttacaattgcacccttttccctatgctcacagcagccacgagtgccattgcatttttaattttgctactttgaaattatatttctttgttctttttatatgtttctttaattttgagagaaattgagcaagccttttaaaaactgtatttattaaccaatttcatttatatttctgtgggcttgtttttcagtggggtttgtaaatgtttttcttactgactgatgagcactctttgtaaaacgtgttgctcaatgaagcctacaagccttttcccatttgggtttcaaatattttcttcagttaattgttcactttttctttaattgtgggtttttgtgtcctcgatgatgatttttatttctagtcaaatatctcaacatttcccattaaagttttcaaatatatatcttgcttagaaaggcatttcacattcacaactataaataaactcaccttttaaatttcagaatgttttcatttcactcttgtacactcacatctctgatacctctggaacttattttggaacaataaggcagtgggtcagaattctgtgtggttttccaaataccacattgtctctaagccatttattcaatatttcctctcttgccctctgatttaaaatgcttcctatcatacacactcgatttgagtatacatttgtatatatcctggggcctctttctgctccacacaaaccttcgtgtccatctgctttcattcttgaaccttcacggtgcatttgacatttcacaggactactccccaattcccttcttccacctgactcttcctgtttattttcccacatc

SEQ ID NO: 477871 - DNA, 683 bp, Homo sapiens
attttatttcatttggtgctaattgtgggctctgtcctggctgggagcccagacaggccagtttgaaggatccacggcccagcaggctcacacttgtacttgctgaagcattagacaaatgctaggcttcaactgctgtttccaaatcacccccatgccctctgccttttggaggctctgtttccaggtgcgagggttgtctcctgtttccttctgctgctcccacactatctggttgggggctcctgtggctacgttgggagttgagtccgagagcttggacccggagttcaacggagccctgaacaaaaggaacctgggaggctggggcgtggcacgggctggcatgggaaaagcgctgagtcagactgtggaatacgccttagccaacgcccccggtgaggaggcctggagggaggtgcctggagatgctgacttcctgagtccagggaggggtctgacatcctgcatttccaacaagttttcagacaatgtcaatgtttctgggggtcttcgggcaatgcgttaacactggtcaaatgaccaagataaagcaacttcagagaaaatcagtgagaaaacagaaaagaaacaaaggtgaaggctaccctctcttattgatgtcattccccaaatgttgtcctttctctgctcttttcagaaatggagaggctggggttgcc

SEQ ID NO: 477872 - DNA, 1464 bp, Homo sapiens
tttggcaggagaccagaataattgaaaatgccctttaagaagacaaagccagtaaaacactacgtcaaattacatatggcaggtgtttctggctggcgccagtcccgaggtgctctgctgattccgagaagccggcaggcggcagccactgtggtcagggcagcactgccgtcttcatctgggcgtcctcatgcacctgctgtcagcaggccctcctaccctgaccctggaggacaatctgggagcctcggagcctttctgaaagtccagcctgacctcctcgctgtcccttcagcacccaggcacagccatgcctcagggcctttggatgtgcggtttgcctggagcactcttcacccagtcatctgcttggccaatgtccttggcaccttctctttggcacacccaacactgcagagcctcccctctccagcccacactcaggacccatgtatctgactctgctttctttccttcccataacacttacagtcgtgtaacatacaagttgtttactcttctgttctgttgttgtttgtgagttgttgccggttttgctccccaatatcctgagcactcagcagtgtctgcccggctttggctcagatggagcatgatgtgtggatttgggtttgttgcatcttctcagttcaaataaaactgacaaatggcagcattcttcagcagacatccagcatagctttatcaatttcatgtatttctgcttctgtctttattatcttgtgcattctattttcctaaggtttattctgttttaaaagaatatgttttcttaagttcattcattctcagacttcctgcttttctaaaacagccctaatatcatgtaaccactcttagaacctttttgttgtattctacaggttgtgacaggtactcttaatgattattcaatattaggtactgttatttataaattatttagaaatacttggtgagtcattgttacctcctttttcctgttttagaggtcatgacttctgtattctttgatacagcctagcatttacagcctgcattcctcacttatcaaagtctgatgttaactggtgattttatatgtgggcactctcttttccaaatatattttaaaaatcttttaatcattgatttttcacttaattgtattgcgtttagaaaatatggtgtacagtactaagttttgcaatcttttgagacttgctatttagtccaatgcataagcaatatttgtaaatgttgtctgtgatcgtataagaaataaatcccaccaattaatgggtgcgtgttctgcacatacctgtcagttcacatttgttagttgtgtcatttatgtccttgctaaccatttttgtcttcttgacctatcagtgatggtggctttatcaacctcttattgcaatcctgcaaatctttgctttacatatttagaagttattagttgcgcacaagtttagaaacact

SEQ ID NO: 477873 - DNA, 891 bp, Homo sapiens
tcccatttcttgttgggtcaaggtttttcttgattggcggggttgggttttagacacaggaagaaaatgcctgctgccaccttggaacttaatgaggcttctagcagcgagttctctcctgccctccacctatgcctgccacacgtcagggtccctgcaggacttggtgtccacagaggacatggaaggccagggggccttggagaaggtgctcagggaaccagttagccacctgacactcagcagcactgtcttcccatccctggagccttctctgaccaccgaggcctccttgacagccccaaaacctccctccgaagccctggagcccctgcctgtgcatcacgtcacccttcccagctctgcgggtcactaccctgttccctgctgtacccctacaccccacacagtgctgctgcagggcagaggaatggagggcaaatacccttgtgaatgtggcgagtggattttcaatggaatcctttcatcttgtgaactcccacacaggcgtccactacagaaactggggaaaggcatcccaggtttctacaaggaagagcctggaattctctgcctgccctccctgcaggaggcctccagcaacaccagtgagagccactggcctgcagaggcctctgcccttcgacacaggggcgtgcggctcggctgcctctcaggctacctggcaccagaccaggacactttcgagagcagaaacactgccattagtcacagcgctggggcagcaggcacgaacaaggactgtcctgagaagttggtgttgtccgagcctggggctttggaaaagccctctacagcccgaaagctctcccctccttttctgtaggacctttatcatggtgcagaggtgttaatgccataatcagaaac

SEQ ID NO: 477874 - DNA, 800 bp, Homo sapiens
agagatagatttgcaaaggttatttggttgctccctgatcacggcaccatcttgattctaggatctcttgaagggaagtggggacgccatcaaaggatcagagactctatgctgcatcttgaaaagctgacaaattccattatatatacattttatgcacctaaactcaacaatttaaaattcatgttggtcaacattttaaagagaaaggcccagaaaaatagccatgtaaaaagggcagccagtgggacccaaaaacccacccaacaggttcatgtggccagagagcttgagacacacactctgcggttctctgggtcgcgctcagcagccccgtgctttccatggttgtggagaggttttgttgagccgtgtctctcgtgtttgcagattggtaacccatgggccccacggtactggcatcatgcagggcatggcacagggaataaagcagggaaccctgaacagcaggccttcatgagtgactggggatgtctgcatgggtttcagcctccaccctgtaagccaacaggagatcccagctgtaatccggaccaactctgctctgcatgagagcaatgcattcctcagcattgttcacacagctccttgctaaggttccactgccatacttgctgtctcttcatagccctggttgcccttctcagggagagagcttgcactgacctgggggtagtggtcgagagatgatgtacccacagcttgggtgggacaggggatcaccatcttcctccaatccccactcttccagagatgcagctcacaatcacctcagccct

SEQ ID NO: 477875 - DNA, 612 bp, Homo sapiens
gtaccaatcagcactctgtaaaatggaccagtcagcaggatgtgggcagagccaaataagggaataaaagcaggccacccgagccagcagtgtgagaccacgaacccaccggaaggaacaaacaactttggatgctccacttttaagagctataacactcactgcgaaggacgagagtgtggaggaacgggaaagtcccccctctttgtggggcactgtggaaacccaaatcgcaaggtcatctctttgttatttgtgaaagaatggacaattgtcacctctgcagcatccctcatctcatcctgctttgtgccctggaatatggacaagggattcagcgcccagggctgcagggcctccctcgccccttgtggtgggagcgtgtcttttatcctccgtctgaaggtacagagcaaagacaaagcatgagattaagctcatcattccttcacccctccccaagatctctgcttgctccattccctttttcttcaaatgttcaccttatcttatgtaaaatttagatttacttggcattaactcaaatctcacaattatgtaatcatttctctcattgctgtccccctcctttttaaggaaaatgtctatata

SEQ ID NO: 477876 - DNA, 1000 bp, Homo sapiens
ctgtggggctgtgatgacccatgctcagcctgtccctgcatggtcagcggtgcatgacttcagcacagctgtgcaaggaccacaaggggtgactgcactgcccttggaccagccctgttcagggcaatcgccaccgcagctgcagtactgtcactgtgtgaaggctgaccctacagcagggggcccagggtggccattttgttgtgctcatagtttctggcccttggccactgctgctgggaatgagagtggtgcagccactttggaaaagagtttggcagttccccaagaagttaagcccatccagcagtccactcctacatatacatctaagagaattgaaaatgtgcatttgcacaaaaccttgtacatgaacgttcatagcagcattgttcataatatctaagaggtggggacagctcagactcagatgttcatctgatgaataggtcaacagcatgtggaatagccataggaggaaatatccagccataaaatggaacaaagtactaacttatgcaccagcatgaataattcttgatgctaagagaaataagcctgacgcaaaaggctgcgtattgtagaattcctctgatatgcaaatccatggatacagacagtggattgctggtcaccagggctggggacagagaggtggagagtgactgctaatgaggatgggatttctttgatgaaagtgttctcgaattagatagttgtacaaccttgtaaatatactaagaagacccactgaattttatattttgaaagggtgaattccatagtatgtgaattatgtcttaataaaaattgtttcagaaaaaaagtacagacataaattgctcaatgacagatacgttctgagaaatgtgtccttatgtgattttgttatcgtatgaacatggaagtgtacttacacaaacccggatggcagaccctactgcacacctaggctgtatggatatgggactgctatggtttgaatatgttccccaaactt

SEQ ID NO: 477877 - DNA, 901 bp, Homo sapiens
ctggcactttaagtctggacatctgaaacttggtatggcacatggtaactggtaagtcaggacactcagaccagttcccgtacatagacacttggttacagctggtgctagaccccccacagtggctaaaagggcaggcagcagcagtgctagtagcaaagggacagatagccaaggaaggatcccgctccacctgccaagggaaatcaactcccgaagttctgttcaacccaacatcagaagatccattgcaggagatggcaccagtgatcccagtggtgccctccccttaccagagaaagaggctccccactcttgagcccacagtgcttgcacctccacaaaacaaacatatccttaggccacccagagtaaacaagagaggagttgaagcctccggagaaactcctcccttggcagctcatttaagacccaaaactgggatacaaatgctcctgagagagcagcagtatactgggatagatgaggatggtcatgttgtggagaggcatgtttttgcataccagcccttcacctctgccgaccttctcaactggaaaaacaataccccgtcctatactgaaaagccacaagctctaactgatttgctccaaactattatccagacccataaccccacttgggctgattgccaccagctgctcatgttcctctttaacacagatgtaaggtggagagtgctccaagcagcaactaagtggctagaggaacgtgcactggctgattaccaaaatccccaagagtatgtaaggacccagttaccaggaaccgaaccccagtgggacccaaatgaaagagaggatatgcaaaggctaaactgatacagggaagctctcttggaaggattaaagaggggatcccagaaggccacaaatgttaa

SEQ ID NO: 477878 - DNA, 647 bp, Homo sapiens
taggctctgagtctacagcagggaaacaaggagcctgctctcatggagctcacaggctcaaaggatgcagccacatcattggacctttcaaccgggaagaaaaagaggtttaattggacttacagatccacatggctgcggaggcctgagaatcatggcaggaggcgcaaggcacttcttacatggcagcagcaagaaaaaataaggaagatgcaaaagcagaaacccctgataaaaccatcagatctcatgagacttattcactatcacgagaacagtataggggaaaccacccctgtgattcaaattatctcccaccaggtccctcccacaacacatgggaattatggtaatacaattcaagattatgaggtagaaaatttccaaactatagaaagggggatgagaaaggagacaactgaaaagaatatcaaacatgactatagacccctacaaaaagacaggagatataggaagcaggtgagccaggaaagtggttaatctaaataagctgttcttaatgttttaaaagtagatgcaggcactggtgtttttaatttttaagtagtcaaagtggagaactcctagtcttcccacttctctctgatgaagaaccactacattaactcatttaaattcggtatgct

SEQ ID NO: 477879 - DNA, 1092 bp, Homo sapiens
caaccctgaggaggctgtgagagtctctggggtccttgccggcctgcagaaaatcaagctttgagcgggaagcttcgaggagacacagtgtcacaattacaaggttccagcatttggaggcaaacatgaagctccatcctctccaattctggggcaaccgtgtggagatgatcaaaatgcttcaccttcaaaactttcaaaggaagagttaatacagagtatggatcgtgtagatcgagaaattgcaaaagtagaacagcagatccttaaactgaaaaagaaacaacttcaatatatgggtcttctggctctcagtacattcctcctgagccatgatgggccccagttcaatgaaaccttctgtggcagcatcatggtgtccaggggtataatctggagcatgtaccagcgctacccaaagtacctgtattttaatatgctacctcctctccttttcctccaagattttcataattgtggttgtgatgatgatgatgatggtgatggtgaaagtggtgataatgatagtgatagtcatgttgaggatgatggtgaggatagtgatagtgataatgttggtgatggtgaggaaagtgatagtgaaggtggtggtgatgatagtgatagttatgctgaggatgatgatgatgatggggagaatgttgaaggtgagcatggtgatggtgatgataaggatggtgatggtgatgatgaggtgataatgatggtgatgaggatggtgatggtgaaggtggtgatcatgatagtgatagttatgctgaggatgatgatgataatggtgagaatggtgaaggtgagcatggtgatggtgatggtaaggatggtgatggtgaaaatggtggtggtgataatgaagatgatggtgatggtgaggatggtgatggtgaaggtggtgatagatactgatagttatggtgaggatgctgctgctgatgctggtgagaatggtgagggtgagactgatgataatgaggatggtgatggtgagtatggggatggtgatggtgcaccccttgatttggcaattcgacatctaagaattgttcatttcttctaggatgtttgtttttt

SEQ ID NO: 477880 - DNA, 981 bp, Homo sapiens
aatggtagattcactgacagcttgcaccatgagcctggaaaagctgcgggcactcaacatcagcccatgtaaacagccacgagggcaccttgtaagaattatgccaaatctactctacccgtgctctataaatggattcactattgtagatgccactaagaacattcatgattcaccagaggaggtaaaaataacagcattaataggagtttggaagaagttcattccaaccctcataaatgactttgaggggttcaagactttagcagaggaagtaaccacagttgtggtgaagatagcaagagaagtagtattacaagtggagcctgaagatgactttccgagaggctctggaaagttatccaggactgtccacctgaaacatgagcctcgagcatttgcccacctgtcccacactgccatcgatcttggcaagaggaccaccgccctgaatcctgcgcttgagaaggtgcctctctgtctgggcactcaggcccctggccaaatgtgcctgaccctgcatggcctctttcctgggtccatttcaaagtgcaaactgtgtttgtccaaatggtgcccaaggctctgctgtctgaaggggtgagaattgtgtatggagcttgcatgaggcctagggagttccccacacaggggtatgcaaggcttctcaagtaaggaaagggatagctatgacgaaagaaaaaagtttagcctggggttgaggatcagctctccctttactaccacattcccatgcagagcaccaagaaatcagagaattctacactcgactttgaccttgtgggttattatggcagtatatttattgaagtagaagaatagaatgtatttagctattttttagcttcatttataattcatcattatttagacataatgcaaatgtgggctggaattcatgttctgatttttgtggccttgagctaaggaaaagggacccaggaaatgggctttatgtgt

SEQ ID NO: 477881 - DNA, 662 bp, Homo sapiens
tctctgcatccaagatggtatcttgtgcactgtgtcttcaggaggagatgcactgtgtcctcacatggcagaaggtggaagggcaaaacaggggaagcccactccatccagtccttgtagacttgctgaatgactttgacaaaaatgctgatagtgttttgaacaataaggtccaggctgaggtggtctcagatggagatgaggaacttgttgtgaactggagcaaagagcctctctacagagtccttactggggaacttcctagtggagctgtgaggagagggccactctcctccagaccccagaatggtagattcactgacagcttgcaccatgagcctggaaaagctatggacactcaacatcagtccatgaaaacagccacgaggtggactataccctacaaagccacaggggcagaactacacaaggctgtgggagcccacctcttgtatcagcatgaccatgatgtgaaacagggagtcaaaggagatcattttggagctttaaaatttgattaccttgctggattttggacttgcatggggccttcaaaatgtctaatcttttttaatggttaaatggctttttgtgtcccattcacttacattttctactaaaagttttaaagttttgtttctgacattaatttcctccatccc

SEQ ID NO: 477882 - DNA, 488 bp, Homo sapiens
ttctcatctacttccttgggaagaaatgaacaattcttagatgtcgaattgccaaatcaaggggtgcaccatcaccatccccatattcaccatcaccatactcattatcatcatcagtctcaccctcaccattctcaccagcatcagcagcagcatcctcaccttaactatcagtatctatcaccaccttcactatcaccatcctcaccatcaccatcatcttcattatcaccatcaccatcctgaccatcaccatcattaccacctcatcatcaccatccttaccatcactatcaccacgctcaccttcacctttctcaccattctcatcatcatcctcagcataactatcactatcattatcaccaccttcaccatcaccttcctcatcatcaccatcattatcaccttagcatcaccatccttatcatcaccatcaccatgctcaccttcaccattctcaccatcatcatcctcagcataactat

SEQ ID NO: 477883 - DNA, 669 bp, Homo sapiens
cggggagggaaccagggggagagtttcaatttcttcatctgtacaatggaggttaatgcctacgggctatggctgatgtagggataaaagaaccaacaaggatgcatgggcagggcctggtccatagagcagctggcatcaacaaatggaagcccccttcccatcttatatgtgttgctcctggggctctcctgccccacattcagtcagcactgagccagcaggagggatttcacaggtcatatcctgagatcaaccctccaccccttcagccctgtccttacttgagaaaccttgcctacccctgtgtgggggactccctaggccccatgcaagctccatccacaattctcaccccttcagacagcagagccttgggcaccatttggacaagcacagttttcactttgaaatggacccagggaagaggccatgcgggctcagagctctgtgtgggccggggtacagtcagtggagggccagagaggcaccttctcaagctcaggattcagggcgggggtcctcttgccaagatcgatggctacgattccttcgtgcaatgacgactgcgtcaagtcttctcagagcacctttctttcagtctcagccaccgtggggagttccatggaagcacaggcttcccttgtgctgccagcaaactcaagctac

SEQ ID NO: 477884 - DNA, 1135 bp, Homo sapiens
ctatatttattttcaagcaaggttttgtgacctgtatcttgtgctgacctcctatctcatcctgtgactaagaatgcataactgcctgggaatgcagcccaaaaaccaggcttgctacaaacagcagccctcaggaactgagttaacatgttatgatttgctgcaggaacctagaagctcccagatctgtgagcttccttggctcaagttggtcaggggagtcttgaagggtgtccagttctactctcaaaggcctctggggtgggtggtgccctctcctgccagcagagggcagcataagccagttaacagacagtccccgctacgtggccgggttctggccgggccggaacactgggatgagggccaccacttggacctggctcatggggaggcagcaggccactctgaggctcaaatgcagtctttgactttaaggccaattccagccacagaaatttggggctgttcatatctaaggctgctggccaatccaagccagcccatctctcctgggctcttcagcagcttcctaatttgtctcctggagtcccctgcacattgcatctctttgcttgaaacccttcgatgactccccggtgcccctgccctcaagataacttcacgctcttcagcatggcctagttgtccagctcattcattgcacatcttcttttgcgatccaagctcttttctgcctcagaccctttgtataggggaggtttggttctagggcccaaagcaaaagctgcttccaagactcttccctttctggactccactttctataagcttaaacactgtagagcagatattgtaaattgtcagttttataggcccagtcctgctcacagatgtgttttgtatgacttttgccaaggtttaaaaactggctttggttgggcatggtggtgagttgggtagaccctgaagtggactggatttggaatggtcacactcactctggactgttttgtaagactggaaaagctaagagcatgcacccttgactgcctgactagagcacttggggtgttaacccagctctagcttttcttcttggtgtggtcatgttgtactttatgcaaaccctgattaacctaagccactgattagtttgaaggtggccatgtaa

SEQ ID NO: 477885 - DNA, 790 bp, Homo sapiens
tttgattttggctgtagaaaatgaatacatttccacgaggaaatattgtagataattggagtttcctatttgagctaaaacatgagtgggaggaaggaaccagtcacaagaaaatcaggaagaatattgcacgcaaaggaaatagcaagcacaaatgtcctgaagatttgatattgacaaacaacttccaaaaagtctggatttggatttggatttctatgatcaagtatattaagtcttgggccctggaccttgttggctgtcctctccctgctgacctaaatgacaaagggaggggtgtccagtcagagtgtgagggctgtacccgtgggcagctgagggagtgcgagccacaggccaggcactctccttctcccattagctcagccgtggcatcggacttgcagcttcattttgggctgccttagccatgaagctccttttgctgactttgactgtgctgctgctcttatcccagctgactccagacctttcaaatccggagcctacttgttaggactgatactgtctcccttctttctgctttgtgtcaggtggcacccaaagatgctggaatctttatggcaaatgccgttacagatgctccaagaaggaaagagtctatgtttactgcataaataataaaatgtgctgcgtgaagcccaagtaccagccaaaagaaaggtggtggccattttaactgctttgaagcctgaagccatgaaaatgcagatgaagctcccagtggattcccacactctatcaataaacacctctggctgatccctgc

SEQ ID NO: 477886 - DNA, 597 bp, Homo sapiens
tcaacctatagtgttgtcaccctcatagaggcagagcgtacaatggtggttgccacggtgggggaaggggaaaatggggagatatttgtcacagggtaccaagtttcagttatgcaaagaaaggaagaagaaggagaaggagaaggaagaaggaagaagaagaaggagcaagaggggaagggcagggggagggggagaaggagagaagaaggagaagaaggacaggaaggagaggaagaaggagagaaggagaagaaggagagaagaaggagagaagaaggagagaagaaggagagcagaaggagagcagaaggagaagaagaaggagagaaggagagaaggagaagaagaagagagagaagaagaagaagagagagaagaaggagagaagaagaaggagagaagaaggagagaagaaggagaggaggaggagcaggatgaggaggagcaggaggaggaggagcaggaggaggaggagcaggagaaggaggagcaggagaaggaggagggggagaagaagaaggagaagaagaaggaggagaaggaggagaagaagaagaagaagcttcgaacttttcacagaaatgtgctcaaggc

SEQ ID NO: 477887 - DNA, 2150 bp, Homo sapiens
agtgggcaacacctaaagccttttctggtctcagcttcttttattcctttgctcaagagacatttgttctcatgctcagtaaagctcagttctcatttctaatggtggtagaaaacacaagtggcaagtctcagaggcccacccaaggccctcaacatagtacttgggtatctctgctggttattcagcacccaagggctcttcagttagcaggcagtgaatcgttccaggactgggttttttccttcaaagcagtgggttcccttgtggcccagggtgtgtcaagaaatgtcatcctggagctagggccagaaaaaggggcctcacggctctcactggcaccctatcctgctgtggctgagctgatatccaagatgcaagacaaagttctccccacttttccctcatctctcctcaaggagaaagaatgtgtctctttcagagccacaagctgtgcagcttggggttcaggggtacatgtgcagatttgtcatctaggtgagtttcgtgtcatgggagtttggtgtacagattgtttcattacccagatctctggcctgaagtggaagtggaggaaagatggaggaccatcagcacatgcccatcgacatccagaccagcaagctgctcgattggcttgtggacagaagtggatgaaggaatggcaggagattatagccctgtatgagaaggacaacacctacttagtggaactctctagcctcctggtttggaatgtcaactatgagatcccctcactgaagaagcagattgccaagtgccagcagctgcagcaagaatacagctgcaaggaggaggagtgccaggcaggggctgctgagatgggggagcagttctaccactcctgcaagcagtatggcatcatgggcgaaaatacccgaggagaactgctggccctggtgaaggacctgccaagtcagctggctgagactggggcagcggcgcagcagtccctgggggaagccatcgaagtgtaccaggcctctgtggggtttgtgtgtgatagccccacagagcaggtgttgccaatgctgtggttcgtgcagaagcggggaaactcaacggtgtacgagtggaggacagggacagagccctctgtcgtggagcgaccccacctcgaggagcttcctgagcaggtggcagaagacgcgattgactggggcgactttggggtagaggcaggagacgatgctgttgctttgcagatcacagtggtggaagcaggaatccaggctccagaaggtgttgccaggggcccagatgctctgacacttcttgaatacactgagacccagaatcagttccttgatgagctcatggaacttgagatcttcttagcccagagagcagtggagttgagtgagaaggcagatgtcctgtctgtgagccagttccagctggctccagtcatcctgcagggccagaccaaagagaagatggttatcatggtgtcagtgttggaagatctgattggcaaacttaccagtcttcaactgcaacacctgtttatgaacctggcctcaccaaggtatgtggaccgagtgactgaattcctccagcaaaacctgaagcagtcccagctgctggctttgaagaaagagctgatggtgcagaagcagcaggaggcacttgaggagcaggaggctctggagcctaagctggacctgctgctggagaagaccaaggagctgcagaagctgattgaagctgacatctccaagaggaggatgggtgtcccttgtcatgctccattacagatactcctgcaccaaaccctctgggctccacaccggctgaagttctgcctctaccacttctctaagcagctctccttgccagcacaagtgtctgtggtggttgaggggtctcctgctgggattccagaggcctgtggcgagaggctccttgcctatcggtccctgtggatacaggctcaaggcctacccagtgacaggtcagctcctgcagccccagactccaggactgtcccaggtttcagaccaaccctgagcaagattggcccacacactcccaggctttgggcccatcctggtgctggactggaaaccctggcctcaggcaccagaccagtaaacatggacactgtcctcaggcctgccgagtgacag

SEQ ID NO: 477888 - DNA, 700 bp, Homo sapiens
ctctggccgcccacggactgtttggcacagtctcagctcactggaacccccaccacccgggctctggggagctcacactttggttctctatgtccttgagccagtataccggttgtgttggaccatctgttccctggggtgtgggatgttgtgtggtctcagatgctggcagtgtggttgtgccactgggcttagccagcactatgatgctgcagccctttgagtgggtgtgggtggatattgggaaattgtggctgcatgaatccctcttgacactgaacctgtcttgtggcttgcttgtagtgctggtggcactggtgtttgatgagtggcacccatggagtggccatgttgctgaggcctgcagcacagtgatggtggcttctttcccaaagcagttcagcagtagtgcttcttggaggaaggagggttgtgcagctgcatctctcaaaggttccccagtgggaatgactattgttaacctttgtggcaaatgatgctgttgtcttcttcagagtaggccactgggaccatagtggtttacactgcataactgacactctgcctttcttctttgtttctaactgtctcctatagtctcagatatgctgacctcactagcaatcctttctttgtggatgttctccattttgtttgtttgtttttggtccactgtgttgctacagatttttaaatgttt

SEQ ID NO: 477889 - DNA, 706 bp, Homo sapiens
agcagtaaacagctggagagagtcataattgctgtcttcaagtatctgaaaggcatgttctctgtaggcccacagggcagaactaataggcctgagtggaaactgcaagggcacaagttttgaaactcatcagaaagacctctgaagatgggaaccatctggaaaatggcagctttgctgggtagtattcttggagtgaagtggtgccttacccccagggacccagagctcaaggagctggccctaaggatggcacactaccaggtgggcatggtgcagtggcggctgaacctcagggatggagggatgcaaatgctactcactcccagagtaggaagcactctagcagtggttctagcttcaagatggcacaaggagtttgttcctttcaagtccattccattacagtccattccattcgattccatcccatttgaatccatacccctcggttgtattcctttcaagtccattccattcgaatctattctgttcgagtccattccactcgaatacattccatttcaggccattctactcgagtccatttcattccagtgtatagcattcaattccattccattcgagtccattccattccattccatttaattgaattccattccattcgtttcaattccattccacaaggttcaattccattcgattcaattctattcgattccattccattcgagtcttttca

SEQ ID NO: 477890 - DNA, 597 bp, Homo sapiens
tgtgggtgtttacaggggacagcgatgctgcttaatggaggaatttcaggcacagagaggagtgtgtggagtaatgataggaactgcccccggggctatggtgaggatgaagagggggtggaatcactatgcgatgcctgccctccatggaagctggatattgctgtcattaccgtagttacaagaaatgaccctcattttacagatgagaaaactgaggcctgcagtcacagagacttccccatagtcattcaccaaatgttgcctgacttccctgagcagcagatgaatgagtcctcacagctaacaaacggctgtcggaaaggtgggagaatgaagctgcattctgggaagcttgcctttgcatgtgccgtgaccatccggtctgtggaccaggttgcagcattgttagcagaactgcctggtgattggctctgccaaaggagaattgttctcgaacaggccaaatgggaaaacgagactttgtgaaaatgtcaacatgacatttttcctgggtcacaggccaagtctcccccactcccccaccacaatgtagacctctgctgtgcagaatttgtgtgtttggagaaagcccct

SEQ ID NO: 477891 - DNA, 2034 bp, Homo sapiens
agagaatcctgatgatcagagaatggtccccgaggtcaccggggatgcacggtctgcatttcggcccctgcgggacaatggaggcctctctctccctttgtgcccgggcccgggcctctgcagacagacctccatacccagagacctcctggacgagctcctgcaccaaacgaaatgccatctccagctcctgcagctccacgggaggcttgccggggctaaagcggaggaggggaccagcctcatcccacagccagctgaccctcagttcctcaaagacagtgggtgaggacaggcttcaggctgtctcttcgggtcacacccagtgtgaaaaggcagcagatatagcaccagggcagacactcaccctcaggaatgactcctccatatccgaggcctctaggcccagtatacacaagtttcccctgctgccatgcaggcgaggggagcctttgatgctgccacctcccttagagctggggtaccgggtcactgttgaagacctggaccgggagaaggaggcagcattccagcgcatcaatagtgcactgcaggttgaggacaaggccatctcggactgcagactctcacggccttcccacactttgtcctcacttgcaacagggacttctggtctgcctgccgtttctaaagcacccagtatggatgcacagcaggagagacacaagtcccaagactgcctgggcctactggcccccctagcacctgctgcagaggtcccctctacagctcccatgtctgggaagaagcacagaccaccaggccccctgttctcctcctcagatccccttcctgccacctcttcccactcccaggactcagcccaggtcacctcgctgattcctgcccccttcccagctgcaagcatggatgcgggcatgagaagaacaagccctggcacttctgctcctgcagccgcagcagcccctcccccctccacattgaaccccacgttggggtcactactagagtggatagaggcccttcacatttctgggcctcagccacagctgcagcaggtgcccagaggtcagaaccagagatcccagacctcccggaccagctcgtgccccaaacgaaaggccatctccagctcctacagctctacgggaggcctcccggaacgaaagcggaggagggggccagcctcatcccactgccagctgaccctcagttcctcaaacacactgggtgagctactgaagccaaggcgggaggcagctgacaacacccacggcccatgtggaggtggtggaaaggctggactcagcagcaacaccaaatcccggaccaggcagaaaccacccaagactgaggggctcatgccagagcggtggccacaggccttcgcctgcattgcagaaggagagccgggtccccctcctggagaacgctgcgttccccagccccacaccggctttgccaccacacaggcttttgaggcaggaggtggagacttcagaacccactcctgagaacagcggagccaggcgcttagaggaagacaaaatgttattaattattaataacaaaatgttattaattattaatattaatatttaacattaaacagtaatatttaatgttaaatattaatattgatatttaatattaactattaatgttgatatttaatattaatattaaatatcgatatttaatattaatattaatatttaacattaatatttaatattaatatttaatattaatatttaatatttaacattaatatttaatattaatatttaatattaattattaatattaaaggagaaattaatgtaattaaaaataatcactatgcattgttctgaaatggcactcgtgaattatttacacgggaaatgctgccccctgctggccaccttaggacactaacaccgtgctttacctttttccattttctctctttggttggcatttttcttctttaaaaaatttacgttgatagacatttgctcatctctagcaggtaccgttgggaatgaattctgtgctgttgttgccaat

SEQ ID NO: 477892 - DNA, 1306 bp, Homo sapiens
tagagctcaggccatggcttcagaaggtgcaagccttcaaccttgccagcttccatgtggtgttgagcctacccgtgcacagaagtcaataactgggtttgggaacctccacctagatttcagaggatgtatggaaatgcctggatgcccaagcagaaggttgctgcagggtcagcatctcatggtgaatgcagtgcagaagggaaatatggtgtcagaacccccacacagagtccttactggtgcaccacctagtgaggctgtgagaagagggccaccatcttccagaccccagaatgatagatccacttacagtttgcaccatgtgcttggaaaagccacagacactcaacaccagcccgtgaatgcagctgggagggaggctgtaccctgcaaagccacaggcatggagctgcccaatatgatgggaacccacctcttgtgtcagcatgacctggatgtcagacatggagtcaaaggatatcattttggagctttaagatttgactgccttgctggattttggacttgcatggggcctgaagcacaagaggagaggaagggtagcaggagaggaagggcggcagaagaggaaagtgaagcattgccctggcttccttcatgcctgctaaggcttaacaatggctgcacttccctaaagccacaactgctgagaagcagcctgcttccagaactacaaccagctcttctgttcctggcttttccaggcccagggctgacagtggccccccacagtgtagcctggaagtgctttatcactcttggttctccttgacctctacatggcccctccattaagctttctttcatttatttcctgtatgatgacataacaaggttagctggggaataagcaaatatcctatagtgtcaagtgtacaatgagggcaagaaaggattaatcagtcctaactggggggtggggggggtcaggaagacttcctgcgctttttcttcttctaaacatgctttggaaattttcatttttactattatgtttttaattttcatgaactattttctattccctaaatcttctcttatttttaattataagataataatattcttatatacatataatctcatatttaactataagaaaagcacaatttttcctcatctttcttaagatattaattttgtgtttttttcacattatcttttccatgcataaatctctctttcatatagattattttcttcttgtggtttctttattttggcctttgtctttcatattggagggtttgctcaaaatgtggtgactttcggctgtcatctc

SEQ ID NO: 477893 - DNA, 665 bp, Homo sapiens
gatttagcctttctgccagaaccgccatcttccagtaattcaccaaaatgacgaacacaaagggaaagaggagaggcacccgatatatgttctccaggccttttagaaaacatggagttgttcctttggccacgtatatgcaaatctataagaaaggtgatattgtagacatcaagggaatgggtactgttcgaaaaggaatgccccgcaagtgttaccatggcaaaactggaggagtctacagtgttacccagcatgctgttggcattgttagccgagatagcttcctgaaacgcatgaaggaaaatgatcagaaaaagaaggaagccaaagagaaaggtacctgggttcaactaaagcaccagcctgctccacccagagaagcacactttgtgagaaccaatgggaaggagcctgagctgctggaacctactccctatgaattcatgccataataggtgtttaaaaaaaataataataaaggacctctgggctgtaaaaaaaaaagatgtaagttaaaagtataattaatataaattatagatatgtggaaatttaaacattaaagggacatttgatggtatttaaaaattactactttaatttgtaaaattttaggtgagataatggttttgtggttattttcaaatgtttttatgtttcag

SEQ ID NO: 477894 - DNA, 1351 bp, Homo sapiens
tcaaagaccaattaagattttccagacctacactatgaacaagggaggatcactcgatattgagtgtggcagtgaaaattccttaactttggaggcagtgaaacgactaatagcagaaggtaataaagaagaactacgaaaatgttttggggcccgaatggagtttgggacagctggcctccgagctgctatgggacctggaatttctcgtatgaatgacttgaccatcatccagactacacagagcatgcaaagtgcacgtatgtggctaagtctgtctgctgagctgcgtaaatttcttcattttgggctgactgccctgcttctggttgatacaaccttcagagatatgttaacattatcaattaagactttgtcttttgctttggctgacaaaaccaaggccagaattgttttagctaacgacccggatgctgatagacttgctgtggcagaaaagcaagacaggtatggctaccatattactaaagcttcctattttatctgccatgatcaagaaaccattaagaaattatttgaaaacctcagaaactacgatggaaaaaataattatccaaaagcttgtggcaaatttgaaatttctgccattagggaccttacaactggctatgatgatagccaacctgataaaaaagctgttcttcccactagtaaaagcagccaaatgatcaccttcacctttgctaatggaggcgtggccaccatgcgcaccagtgggacagagcccaaaatcaagtactatgcagagctgtgtgccccacctgggaacagtgatcctgagcagctgaagaaggaactgaatgaactgtgccgaaatccattcttagggttcctgtttttgctttcagtttttgaataatttctaaatacttcttttattctttcaatttgttctataacctaaagttcttgaaatgttatttctgcagtttggtgtgcgtattgactgcccctcagagtcagttattttctagtgtttgtgagcgttcttgtttttaatctttggcaagtttttttatttgtttgtttaacttgtgagagcttttcgtgccctacattgcaggaatgatattacaaagcaattttgtgtttgcttctgcaaggtcccaggcgtttttctagtttgtttctcttgtcactgttattgttttgtttgcttttttaaaactttttgttttgttttgtggtctttttaaaactgttaaaattgctttatacacctacaataacaattattaattataagatactatttacatgtggttgtaaagaacacacttaaataacttacatatgtgaatttaaattataaatttatatttagcaacat

SEQ ID NO: 477895 - DNA, 2199 bp, Homo sapiens
accagggcaggcaagcgcagaaggaagcaggtcggtggagactagggtagaggagtgtaggagaggagcaaactgaggagggcggctcttcgagtcaatctggtccttctcaccactcttgaggctccgtccaggcttggaggagggttctcaagcctaggaaatcccgcgtgctcccctgtgtgatcgggaactgtgagatgggggagtaggcctgagctgggagctcccaccagcatggttgattccccggagttctgaaagagtttttatggagactgggggaaggggcgcttgaagggtgggccaagtctttggcagaaagcagccccactgggctgacccactgtgtggaggaggaggccccgtagggccctcccgggttggaggttgcagaggagggcggaggaggattgctgccccgggcgggagcgcttcctggcggccgaacccgccctcagtctcggcatcctggcgggcctcgagtgtgggctcctgtaggtctttcgctagcagccgcctgatcccgctcttgggacgctagggacgaggccggtcgggagagaatagggggccgccgattgtaaaagatcctcgacaggcccagcccggatcacctcgagggctccggaccgagcgctgggggtggggcgccgtcgccgctacggcccctggtgtcggtggagcgagcagggaggtagagggcgggggatcgaggaggagctgagctcggacacgcagcagctgctgtctatccgtctggcttgctggcagttggcagggcccgaggctaggtcttcccgccccctttccctaggcgggaagggcggttgtcatgggtgggcggattcccgtctgaatagcaggggaagatgcatttccgtggcgcggctcccgggttattacccctcccaaatggggaaatggatggagacccgcggcgggggaggagccaaccccactctccgcgtccccgcccaaggtggccggaggccagcggcaggaccaggagcgaccgccagggccaaatccacccccaggcagtcccagagtgtggagtgggcatggggacctggcgggaaatagtgtcgattagcacccccaggcccggatgccagggcccagtcgtggcgaggtgggctcggcgcggtctctgcggtgacgagagttggggaaagatgctcccaagtgtagtccccggtctccgcgggggggccacaggctctggcaggagtgagggaacgaggaggcccacgacaggtgctgtctgtccgctgctctgacaggcccgggcgggaatgcggcccggcccagtactgctctccccacccactcagctggacgcggactctgacacttgttagtgtgagcaatcgactaattttatccggctggggctcagcaggaaaccaatgccgaggcgcgggtagttcttccgggcgactctcgcccccgggaggatagtcgtggggagaggaagaggggttgggggtgggattcctgccgcctccatttcactgggggcgtggtggctcctgatctgcctcagagaggaccgaattttggcgctaagtatgtggccatttggagatggattttttttgtacctcttgagttgctgggggtggagggacagtaggtgaaaccaggtctccaagccaagattgcatggtctggagtgactgggagacagaataccaaaagtatgtgtcagttgcgggtgagagtaatcatgaagacatgggtgcccttctgggaaaatggagggagaaaaccaggagtgctgaaagatggcaagtcaacacttttcctgctgaagctcaaatgcaatgggggccatgatggtgatgaagaagccatcgcaaaggcccaggaaaagacagacgacgataaggcccccgaagtcccggcacaggggaatcatcatggacatcaggcccaggagcaggaaggaaaggacctggagaaacaagggcctgaggcccaaggattttccagtagttcacacaagcaagccaacttagccaagaacacatggaaggagtgggggtcaaggttatttggtgccctaaagattttctatgttgttgctggcagtgagttttttaggttgatcagttgatttttggagaggataatgccatctgaggacatctttttgttgggagactttgaactttgcccaggcagttttgaggt

SEQ ID NO: 477896 - DNA, 1278 bp, Homo sapiens
ggatgctgccgggacccaggaggccacaggtcttttgaagagctgtcccctctttagcaggcctgaggaaggtgctgctggccaagactgactgtccgtgctggctgagctctggggcggattggccagtcctgctggtgtttccaggcctgatggatgaacagggcctccagagtcatgggtgactacagcaccggctccttgtcaggcccaaacgaaaaccactgctgctgtggcctagcgaccttagagaggagacacaccttgcctttgccacttgtttctggcctgggctctgcactcctctccatcggctactctgactcatcgggagtagacaaagggacagaagtttccaggaaaagggaaagagactgcaggcaggtcctgtggctgtggaagtgggtctggggagccttgacaaggccccccgctccagaggcccacatggccagcagcagccaggccataagcagtcagcagctgccatcattgcctatcagactatctgtttccaaggaagaggctccaggaagccacaacacagacgcctttattctccctgctgagatgccagccagggactaaagggcaggagagaggcctccgaggtatgggtttgcctcccagaatgtgcagccggaaatgaccttgaccttctcccatccccattgtgcacatgggaaaggaaggcccagggaagcggccgatccaaaatgtgtcgttgccagggcaacccggccgcagcgcttgcaagcctgggaaaaagttgttgttcatcacgggggtggacgtttgtcttgttttgatttttcaaaagcctgaaccaactcagctttttaacatgctgctccaggacacggtgctacttgcagacagcctgaggagcagatgcaggcagagctgatggtgttcagacaccctcgccgattccaaaacatccctgctcggctcctgcctcacttctcggcagacagccctgtcctgtctatacccaagacccaagggtcaggccgattcctgtccatttccctcaatcagcaactttggtgtaggaatgaagttaaaagatccgagttcactgtccgcaatatgatgcagttgccctattttctcttccctgaaaagttaggaaactttgacattaaggaagtcgtttgtcatgatttctcattgtcacacaagtttaaccactgtcacatcagaccaaaaggcagcgctgatccagctgtgtgtggcatgactccagacttcttggtgaggaatggagatccttac

SEQ ID NO: 477897 - DNA, 698 bp, Homo sapiens
acagagcccatttgtgggtgtctgtttcaaagcttttggttcataggccatgctgcccgctttgctggaggaaagttccgagacccacaccaggctactccttgacaggaagcttttgttcctagcaacggttttgtggttccggcaccgacaccgtccctttcacacggtactgagccgcgggctgcttcggggcggccctccccgccccctgccttgccgggatggcagagcggatcagaagctgcgcgcgctctgcctgcgcgctttgcctgcgcgctttgccgccgcaacccgcgcagcagccaatccgctggagcgaggcgggccggggcgctccgcgggccggggcggggctggggcgggcggcgcgcagctcctgggccgaggcatccgcgagccgcgggtagatcgctcgcgtctgatcgccgcccgggagctcccgcggagccggctgccaggactcgttccagctccagtgcggggctgcccgggcgtccagaggcggcggacggcgtgccggcaagtttccccggcacctgccagtgcccgcgaacccacctcggaagccagacccggggaggcagaggcagaggccggctggctccagccgtggtaccgcacggctgccaccctcggacttccgtcttgagtctcctgaggctgagaagcagcagatgccgaacctgccccctgac

SEQ ID NO: 477898 - DNA, 643 bp, Homo sapiens
ccaacatcaaagaccaaaggtagataaatccataaagatgtggataagccagcaaaaaaagtttgaaaattccaaaaatcagaatgccgcttatcctacaaaggatcgcaactcctcaccagcaagggaacaaaactggacagagaataagtttgatgaattgacagaagtaggcttcagaaggcgggtaataacaaactcctctgagctaaaggagcatgttctaacccaatgcaaggaagctaagaaccttgaaaaaaggttagatgaattgctgactagaataaccagtgtagagaagaacataaatgacctgatggagctgaaaaatacagtacgagaacttcctgaagcattcacaagtttcaatagccaaattgatcaagtggaagaaaggatatccgtgattaaagatcaacttaatgaaataaagagagcaggcaagattagagaaaaaaagaataaaaaggaacaaacaaagcctccaagaaatatgggactatgtgaaaagaccaaatctatgtttgatgggagacccatctaacatgcaaagacacacataggctcaaaataaagggatggaggaatatttaccaaacaaatggaaagcaaaaaaaaaaaaaaaaaaaaaaaaaaaaaaaaa

SEQ ID NO: 477899 - DNA, 792 bp, Homo sapiens
tcatcagttaaggcaggaaccggccatctggatgtgtatatgcaggtcacagaattccttctccccaccagccattccccatccatgcctggggcttatcatccttcaaaacttttctcaaagtcctttcaactggcatctttcattactactctagcagtggtttctatctatgtcctgatgtactctggaccttttctagagccctcatcagaatcaataggcccatacaatcagtcagtcttcctggtggtcagccatgaattccaaatgctggctcgttcactcaacagttacttcctcgacaccaaccctgtgccacaaaacattggtgaaaacaaccattctaggtctattcttacttccaaaaatcttatttgcacccctgaccccatgaaaagtcttgaagtcttcaagctttgttttgtgtttctcttcatgacaccaatcttaagacctgacctagaaatttcagctgcagacttcgtaactcacaagagcatgaacatagcaggcaaaggagctcagaaagctttcttgggacaagttctgctctgctgtgaggtgggagagagaaccgctagttaaaaacagtagttagtaaaggcaagcagatttctcccaagaaagcctggccaaaaatataaaaaaataaaaaagaggaaagcaaaagaagtatgtgtggatgtatatataaaaggtgagtgaaaccatatttttaagttcctgttacgtgtggaggactttatctcatttattgattttatctttaaagcaaccacacaaggtcgg

SEQ ID NO: 477900 - DNA, 1322 bp, Homo sapiens
agccagacctggtcacctgtctggagcaaaggaaaaagccatggagtatgaagcacccaggtcttactatacctgagagaattcatactaaagagagaccctacaagtgtgaagaatgtgacaaatcctttaaacaatcttcaagactgaataaacataagaaaatttatactggagatacaacctacaagtgtgaagaaaagaaaccctataaatgtgaagaatgtggcaaagctttttactattcctcaggccttactcaacataacatagttcatactggagacaaaccctacaaatgtaaagattgtggcaaaatttttaagtggtcttcgaaccttactatacatcagagaattcatagtggagagaaaccctacaaatgtgaagaatgtggcaaagcctttaagcaatcttcaaaactgaatgaacatatgagagctcatactggagagaaattctacaaatgtgaagaatgtggcaaagcttttaagcacccttcaggccttactctacataagagaattcatactggagagaacccttacaaattcgaagaatgtgataaagccttttattgggttttaagctttactaaacatatgataattcataggggagagaaaccctacaaatatcaagaatgtggcaaagcttttaagtggtcttcaaaccttactatacacaagagaattcatacgggagagaaaccctgcaaatgtgaagaatgtggcaaagcttgtaagcagtctttggggcttactattcaaaagagaattcatactgaagagaaaccctacaaatgtgaagaatgtggtaaagccttttactggtccttaagctttactaaacatgatagttcatactggagagaagcactacaggacatggatgaaattggaaatcatcattctcggtaaactatcgcaagaacaaaaaaccaaacaccgcatattctcactcataggtgggaattgaacaatgagatcacatggacacaggaaggggaacatcacactctggggactgttgtggggtggggggaggggggagggatatcattgggagatatacctaatgctagatgacaagttagtgggtgcagcgcaccagcatggcacatgtatacatatgtaactaacctgcacaatgtgcacatgtaccctaaaacttaaagtataataataaaagaaaaaaaaagaaaaatatacctgctttcatgacaaatcattttatgatcacattaattttcaatttagccatgttttatagtagacttcagtaaaagtcagctgtggtccaaatgtaaatactgacatatt

SEQ ID NO: 477901 - DNA, 5124 bp, Homo sapiens
cctgcaggactcctggaaacaccatgagacacttttgggtgtcccttctgaagacagacaccgaaagcattgaagagaaaaacagctctcaggataaacattcagaccctcgtagcagtgttccggaatcctatgtgagggacaaaaactcagaacccagcagcagtgttctggaattctgtgtgagcgacaaacattcagaacttcgtagcagtgttctggaattctatgtgagggacaaacactcaaaacccagcagcagtgttctggaatccaatgtgaggtacaaacactcagaacccagcagcagtgttctggaatcctatgtgagggaaaaacagtctgaactcagcagcagaagcagtgttctggaaccttatgtgagggacaaacactcagaacccagcagcagtgttctggaatcctatgtgatggacaaacacccagaacccatccactgtcttctggaatcctatctgagggacaaacattcagacactcgtagaagtgttctggaatcctatgtgaggaacaaacactcagcaaccaggagcagtgctctgaaatcctttcagtgttctggaatcctatgtgtgggacattcagaccctcatagcagtgttctggaaaccaatgtgagtgccaaacactcagaacccagcagcagtgttctggaatacttggtaaggaacaaacattcagacaatctaccgagcggcagtgttctggaatcctatgtgagggacaaacactcagaacaaagcagcagtgttctggaatcctctgtgaaagacaaacactcagatcccagcagcagtgttctgataccctatgtgagggacaaacactcagaacccagccactgtgctctgaaatcctatctgaaggacaaacattcggagcctcgtagaattgttctggaatcctatgtgagggacaaacactcagaaacttatagcagtgttctgggatcctttgtgatggacaaacaaacagagcccagcagcagtgttctggaatcctatttgacagacaaacactcagaactcagaagcagtgttctggaatcctttgtgagggacaaacattcagaacctagtagcagtgttctggaattgtatgtgagggacaaacactcagaacccagcagcagtgttctggaatcctatggacaaacattcagaccatcgaagcagtgttctggaatcctgtgtgagggacaaacactcagatccagcagcagtgttctaaaatcctttgtgatggacaaaaattcagaccgtcgtagccgttttctggaatccaaagtgagggacaaacactcagaacccagcagcagtgttctggaatcctatgtgagggacaaacattcagaacccagcagcagtgttctggaatactctgtgagggaaaaacattcagaccctcgtagcaatgttctggaatcctatatgaggggcacacactcagaaccccgcaacagtgttctggagtcctttgtgagggaaaaacattcagaccctcgaagcagtgttctggaatcctatgtgagggacaaacactcagaacccagcagcagtgttctggaatcctgtgtgagtgtcaaacattcagaacccagcagcattgttctggaatcctatttgagcgacaaacattcagaacttcgtacctgtgttctggaatgctatgtgagagacaaacacagaaccgagcagcagtgttctggaatcctatgtgagggagaaacactcggaacccagcagcagtgttctggaatcctatggacaaacattcagacactcagcagtgttctggaatcctatgtgaggggaaaacattcagatcgtcgtagcattgttgtggaattctatatatgggacaaacactcagaacccagcagcagtgctctggaatcctatgtgagggaaaaacacccagaacccagcaggattgttctggaatgctatgtgtgggacaaacactcagaacccagcagcagaggtctggaatcctatgtgagctacactcagaacacagcagctgtgttctggaatccttatgagaaacactcagaaccctgcagcagttttgtagattccactgtgagatacaaacattcagaccctcgtagaagtgttctggaatcctatgtgagggaaaaactctcagaaacctgcagcagtgcactggagtcccttgtgagggacaaacaaacacaactgagcagcagtgttctggaatcctttgagaggcaaaaatattcagaccctcgtagcagtgttctggaatcctatgtgagggacaaacactcagaacccagcagcagtattctggaatcctatgtgggggacaaacacaacccagccgcagacagcagtgttctggaatcctatgtgtgggacaaacactcagaacccagcagcagtgttctggaatcctttgtgagggtcaaacactcagactctcagagcagtgttctggaatcctatgtgagggacaagcattcagaccctcatagcaccattctggaatgctctgtgaggaacaaatattcagaccctcatagcagtgttctggaatcatatgtgagggacaaacattcagacaatcacagcagtgttctggaaaccaatgtgaggaccaaacactcagaacccagcagcagtgttctggaatatttggtaagggacgaacattcagacaatcttagcagtgttctggaatccaaagtgacggagaaacactcagaaacgagctgcagtgttctagaattctatgtgagggacaaacactcagaacccagcagcagtgttctggaatccttagtgaatgacaaacgctcagaacccagaagtagtgttttagactggtttgtgagatacaaacattcagaccctcaaagcagtgttgtggaatcctatttgagggacaaacactcatcacacagccactgtgttctggaatcctatctaaaggacaaatattcggagcctcttagaagtgttctggaatcctatgtcagggacaaacattcagaaaccagcagcagtgctctggaatcctttgtgagggacaaacaaacagagcccagcagctgtgttctggaatccgatttgatggacaaacactcagaacccagcagcagtgttctggaatcctttcattcagatcccgatagccctgttctgcaatgctctgtgagggtcaaacattcagaacctcatagcagtgttctgaaatactatgtgaggtacaaagcctcagaactcagcagtagtgttctggaatcctatgtgagtgacaaacactcagaaaccagcagcaatgttctagaatcctttgtgagggacaaacatttagactctcgaagcagtgttctgttatcctatgtgagggacactcagatccagcagcattgttctagaatcttttgtgatggacaaacattaaggtcctccagcagtgctctggaatcctttgtgagggacaaacaaacagaaaccagcagcagtgttctggaagtctttgtgagggaagaacattcagaccctcgtagcagtgttctggaatcctacgtgcgggacaatcactcagaagccagcagcactgttctggaatcctatgtgaaggacaaatattcagaacccagaatcaatggattcctaaagtctcatagcagtactctggaatcctatatgaggtacaaacacgaaaaacccagcagcagtgttctggaatcctatgtgagggacaaacactcagaacctagcaacagtgatctggaatcctatatgagggacaaacattcagaccctcgtagcagtgttttggaatcctttgtgagggacaaacaatcaggaaccagcagctttgttctggaatcctatgggatagatgaacactcagaacccagcatcagtgttctggaatcctttgtgagggacaagcaatcaggacacagcagctctgttctggaatcctatgtgagggacaaacgttcagaccctcgtattagtgttctggaatcctatgggagggacttacaaacagaacccagtgacagtgttctacaatcctttgttagggaaaaacattcagaccctcaacccagcagcagtgttctggaatcctttgggagggataaacattcagacccccttagcagtgttctggaatcctatgtgagggacaaacactcagaacccagcagcagtgttctggaatcctatctgaaggaaaacattcggaacctcttagaagttttctggaatcctatggacaaacactcagaccctcatagcagtgttccggaatcgtatgtgagggacaaactttcagaacccagcagcagtgttctggaatccttggtgaggaagaaactttcagaccctctgagcagtgttttggaatcctatgtttgggacaaacactcagaacctagcagctgtgttctgcaatcctatgtgagggacaaacactcagaacccacaagcggtgctctggactctttggacaatccctcagatcccagcagcagttttctggaaacctatgtgaggaacaaacactcagaacccagcagcagtgttctggaatccaatgtgagggacaaacactcagaaaccagcagcagtgttctggaatcctatctgtgttctggaatcctatatgtggaacaaacactcagagcccagaagcagtggtctggaatcctgtgtgagggacaaacactcagaccctcgaagcagtgttctggaatcctgtgtgagggacaaacattcagatccagcagcattgttctggaatcctttgttatggacaaaccttcagatgctcatagcagttttctggaatcccttgtgagggacaaacactcagaacccagcagcagtgttctggaatcctctgtgagtgacaaacactcagaaaccagcagcagtgttccagcatcctttgtgagggacaaacactcagaccctcgaagcagtgttctggaatcctatgtgagggaccaacactcagaacccagccactgtgtactggaatcctatctgagggacaaatattcaaaccaccgcagaagtgttctggaatcctatgtgcagaacaaacactaagaaa

SEQ ID NO: 477902 - DNA, 785 bp, Homo sapiens
agaagatagcagctgagcctgaagatctgagtaaaataaatcataatggtaaatactctctacggccatatcatcctgaacatgcacaatctcattaacgatggcaaatactttcttccagatgctgatgtggaaaacctaatgataatgctgacatcattgcttaaagttctgaatgtgactgagaataatcatttcacagaaaatatccccaacggagctgcaggagaggtgggctgtgtgggaaaggggcacatcctacctcacttgtacattgacactggagcagtcaaatgtcactgctcttggggcatcaccgttctgcagttttctgaggcattccctccacagcaaacatcctgccactcagcctctgctccatgtgcatatcaacatgcagcccccgacttggacttgcttagtcctacctggtggccacctttagttgggttcatagtgaaggatctgccttttcttctatgtactcccgagcctatatcctgccagaattgtaagttctattcagacacctgaatagattgacactggtttctatctcctggaccccagggacccacactcagttctccaaagcatcctctcactgtggtccccaaagcattctctgacatcatccttctaccaggggtgggttaggaggtagaaagcatccacttctttccacctcctgttaggcagacaactatcttcacggaaaacagtacttacaaattcagcaaatctagcagacgatattctagtacttctgtataaaatatatgcat

SEQ ID NO: 477903 - DNA, 710 bp, Homo sapiens
agaagatagcagctgagcctgaagatctgagtaaaataaatcaagtaaaagccaggtctaacaatgacacctcataattgtccatcttatctcctgacctcatttcttacctctctccttctctatctcttttccttataccctggaatccttgaacttgatccagactcaggacctctgcctggaacattctactctctgatagctctagaactagaatataaggaatcaatttgtgtagccatgatggtgacttcagctgatgccactattgagcactggctgtactgtttaaatgatatactaaaatggacaaatgggcagaagcttcttcacacagagcaaatctatctctggaggagcccaaagtgtccaagtggcattcttaacttacaatttaatgaaatcattgttgtgtctcctggtagcagcattcctccctctgaaattaagagatctaggccagcagaatgtaatgtcatggtaacaggaagcaaaaaatttgctagtggaccactaggggtgatggcaagtgatgccacttccacatccaccccttgattcctggacccatgaattctggctatgagagaaatagtaccatatgttggatgctgattcagagcatacacagccttctggagaactttgcctcagccctgcaaagtatggtcatctagttggcattgtaattgtgacttcaaaaggcc

SEQ ID NO: 477904 - DNA, 1480 bp, Homo sapiens
agtacgagaggagtcagagaaagtgatgttgcaaatttcttttaaatatgagaatttcagcagtaagattataactgaaaagtcaattggatttaacttacaagttcttcagtgtctttttggcaaaccgactactgaaaattcacagtctacaaaagttgaggaagactttaatcgtactaccaaggaggcagcaacaaagacagtaactggacaacgagaacgtgatattggcattattgaacgagctccacaagatcaaacaagtaatgacaattttattttttataccaaaataatagaagtggctacatatcaaaaagaaataaagacaacaaatggcaaaatagaagattcaactaccctatcaaaaatcttggatgcagttccttcttgtgaaagaggaagggaacttaaaaaagatcactgtgaacaaattacagcaaaaatggaacaaacaaaaaataagttttgtgtactacaaaaggaactgtcagaagcaaaagaaataaaatcacagttagagaaccaaaaagctaaatgggaacaagagctctgcagtgtttctcacactcatgaaagtgaaaatgatctctttcatgaaaattgcatgttgaaaaaggaaattgccatgctaaaactggaagtagccacactgaaacgtcaacaccaggtgaaggaaaataaatactttgaggacattaagattttacaagaaaagaatgctgaacttcaaatgaccctaaaactgaaacagaaaacattaacaaaaagggcatctcagtatagagagcagcttaaagttctgacagcagagaacacgatgctgacttctaaattgaaggaaaaacaagacaaagaaatactggagacagaaattgaatcacaccatcctagactggcttctgctttacaagaccatgatcaaagtgtcacatcaagaaaaaaccaagaacttgctttccacagtgcaggagatgctcatttgcaaggaataatgaatgttgatgtgagtaatacaatatataacaatgaggtgctccatcaaccactttatgaagctcaaaggaaatccaaaagcccaaaaattaatctcaattatgcaggagatgatctaagagaaaatgcattggtttcggaacatgcacaaagagaccgatgtgaaacacagtgtcaaatgaagaaagctgaacacatgtatcaaaatgaacaagataatgtggacaaacacactgaacagcaggagtctctggagcagaaattatttaaactagaaagcaaaaataggtggcttcgacagcaattagtttatgcacataagaaagttaacaaaagcaaggtaacaattaatattcagtttcctgagacgaaaatgcaacgtcatctaaaagagaaaaatgaggagaatgtatagatcaatatgaaaaagagaaagcagaaagagaaacttcagtaagttgtgaagaactacagattcatt

SEQ ID NO: 477905 - DNA, 885 bp, Homo sapiens
gccaggtggctcccaccagcagcgatggaaaccccgctgaccttgcccgcagccaacagcagtgaggattccactgctggatcccttgccagggcgggaacctgccgctcagcctattctgggcagctgcacagggcccagcgcctgaaaccccgagctctgggctcgggccaaggaagagaccaaccctgccggcccctactgagaactcagctacagctgccacctgtacaacggcgccgcagcagcagagcaaccgggcactttgcctgcaccaccaagagccaggacaccagggacaacgccgcctcagcgcctaattcaggcagtcagccccgcagctgcagcagggcagaaacctttgccctcggcccagtccccttggcggcacagttcccagtgcccgcgacccggaactctgggagcaggcaaaggaagagcggactccaggctgggacagtggtccactccatgaccctgaggctgtctgggaaacccttgcctgcacatggcgcacgcagcagccttggaggcaaccccagaccgtgctcctacaccagccaggcggatcccagggccagacctcgcccagcggctaattcaggtggtcaggccccagctgcaggagggcgggaacaggccgctcagccatttcctggctgctgccctgtacccagcgcctgcacaccccgctatggatattataggctacttgttactgacaagtatggcaggaactgcaggtcaagctgtgataggcaaatagatcttgctgaagaggaagaatgattggctaagataatgccccaggacagctggcatacctttagacacagctaaattgaatgctttctgaggaggagtgtattagtctgtctcacactg

SEQ ID NO: 477906 - DNA, 493 bp, Homo sapiens
cgggttactatttgagtagcccagacaggagagcagcggtctgcttcagccatgagaccacctcaggcgaaaatagacttgtgtagcacaaagaaggaccccaggacatggggtgcagaagggagcacagagagggtgggtgctactggggtgcacaggcagcttgaggaggatgcagatggcaaacttccctttgtcacgccaggtgcatgtttagggccggaggaccaccagatccccaaagcctccggtgcttctgaggcagaggagaggcaaggccagtggctaccggtgtccagggacctggcagccaccactgaggcctatctgcttgtccctcagcccactggcggccacactccaggtctctgggctctgcctaggacgtgtgtttgggcttctctcccgagcagaaatcatctgcgtaccctctgcatcccatggatttgctttgtttctgagggaataattaaggaatgttagtatgacatcc

SEQ ID NO: 477907 - DNA, 694 bp, Homo sapiens
cctggagtttgataatctcactttggatagaagatggccgaataggaacagctccgatctgcagctcccagtgagaccaacacagaaaacaggtgatttctgcatttccaaatgaggtacctggttcatcatcattggcactggttggacagtgggtgcagcccacagagggatcgcagctcctcaccagcaacagaacaaaactggacagagaatgactttgatgaattgacagaagtaggcttcagaaggtcggtaataacaaacttctctgagctaaaggagcatgttctaacccactggaaggaagctaaaactcttgaaaacagaccaaatctacatttgattggtgtacctgaaagtgacagggagaatggaaccaagttagaaaatattcttcaggatattatccaggagaatttccccaacctggcaaggcaggccaacatgcaaattcaggaaatacagagaatacaacaaagatactccacgagaagagcaactccaagacacataattgtcagattcaccaaggttgaaatgaaggaaaaaatgttaagggcagccagagagaaaggtcgggttacccacaaagagaaaaccatcagactaacagcggatgtctcagcagaaaccctacaggccagaagagtgggggccaatatccaacattcttaaagaaaagaattttcaa

SEQ ID NO: 477908 - DNA, 1187 bp, Homo sapiens
gggctccgtgctgcatcttctcccctgagctgctgtcccaccagccgggaagctgccatggaagccttggaattgctgggatctacctatgtggataagaaacgagatctgcttggggcccttaaacactggaggcgggccatggagctgcgtcaccaggggggtgagtacctgcccaaactggagcccccacagctggtcctggcctatgactattccagggaggtcaacaccaccgaggagctggaggcgctgatcaccgacgccgatgagatgcgtatgcaggccttgttgatccgggagcgcatcctcagtccctcgcaccccgacacttcctattgtatccgttacaggggcgcagtgtacgccgactcggggaatatcgagtgctacatccgcttgtggaagtacgccctggacatgcaacagagcaacctggagcctctgagccccatgagcgccagcagcttcctctccttcgccgaactcttctcctacgtgctgcaggacccggctgccaaaggcagcctgggcacccagatcggctttgcagacctcatgggggtcctcaccaaaggggtccgggaagtggaatgggccctgcagctgctcagggagcctagagactcggcccagttcaacaaggcgctggccatcatcctccacctgctctacctgctggagaaagtggagtgcacccccagccaggagcacctgaagcaccagaccatctatcgcctgctcaagtgcgcacccaggggcaagaacggcttcacgcctctgcacatggctgtggacaaggacaccacaaacgtgggccgctaccccgtgggcagattcccctcgttgcacgtggtcaaagtgctgttcgactgcggggccgaccgggacagcagggattttgacaacaacaccccgctacacatagcagcccagaacaactgcccggccatcgtgaatgccctgactgaagcaggggcccacatggacgccaccaacgccttcaagaagacggcctacgagctgctggaagagaagctgctggccaggggtaccatgcagcccttcaactacgtgacgctgcagtgccttgcagcccaggccctggataagaacaagatcccttacaagggcttcatcccggaagatctggaggcattcatcgaactgcactgacctgcccagaa

SEQ ID NO: 477909 - DNA, 818 bp, Homo sapiens
ttccactttctccagcatcctaatcccacgagtctcctgcagtcacaagaaagaactatggaacgatgtgtttgcagcagggcaggaagccccgttaagtaaaatcccacggggctccagggtccctcagcatccacagggggcactcgagtccatgacaaagatgccttcagttctgtccacactacgcaagaacaggctgcttcaccctcttgcactggagggctgccctcttcctggtgcgtgtgcctcatattcaaggtaccagacaaatatgccgatcaaggcctgtgttctttctcctcgccaaactggcttcagacctgtgtggaatttaggcaatggtgcccttccaatggcaacaataggaaatttggtgttagcaggtgcacttcccttcattgataaaaatcctttggaattaggctttccaatggatgaaaacaacttgcaatgtggtcttattcttgcttgttttggatatcactccaggtctcttgcccttctcagctcctcctttccactgcactttcctgccagtgccaccacactttctcctgttgtgtagggagaacacaggtcacctccctaacatgaaaaggtgctcaataaagatgtgttgaatatatgaatgagtgttcttagaggacacccttgtacctggactggtccttacatgggtgagttttttttctaggctttgattgttttaaataaaatcagaatttgttaaagttcagttaacactcagctgtgaaccctaaggtactggggtctttttcaatgggagatctttaagcattattccaaactattct

SEQ ID NO: 477910 - DNA, 613 bp, Homo sapiens
attgccctgctgccttcagggatcctgatgtcttcttttatatgattgacctgaaggaacttataaaatgtatgtattacctgttactaatttattgcttattaattcaccagttggcccaacattcccaagctgagcttccagcagcaattataccttccttgcggggcctagaggcaatagaactgctctacctaactctcctcctactttctcaggcaggagaacttagacatctacagtctttaccactagggtcccttaaagtccttccaggcactaagcctagtggagtcacccctgtaccgccttatgcacccagggcccaaactgtagccaagcttgccatttcttggatacttgttgctacacctggcttcacagtctgggatactgctgaaccccgcaatgccaagatctggagtgactactacacagtactccttgttcataagacactcagactaagaccctgtctccactgctgctccaagtacctgcatctagaatccagttgctgtggcagctgcttataggaaatgtcagaactgacatcaagaggggtcgtcttgtcaaagtctccctcttgtggtgaatatgagaatagaaggat

SEQ ID NO: 477911 - DNA, 856 bp, Homo sapiens
ttctccctgatgtgcgtattctaaaggctgcctgcgtttcctggtttgtggcccccttgcatcttcatagccatcaatgcctagctgacacattctcatgatgccatacggattatttgtcttacttttatttttctggcatgcttgggagaagccaggagtagaagtctcctatgatcacatggggctgaacaagagacagaacaaagataattcagtaccacaaattttcctgctacctttgatgctgctggttttgaatcacctggggaaaaaactgaagcgggatagagaagagaaaaataagaacaaagatattttgatccacagggaaaagaccctggagaatgcattactcccagaagatggttccttttttaggccagaggaatttcatctgggatatcacattacatggttctcgttgcatcaccgtaagctcctcttggatgtgacagctttgggagagctcccaagatggtggtgggctgcttccaagatggtggcaagcctcgtgttctctgacctggggttcttggcctcacggattccaaggaatagaatcttgggccatgcggacgaaccggggcacttagccgtgcaggaacaatggcaagcctttagcctgatcaggagcggcaatgggttcctcgctggttcaatttccatgtagttgtgtggttttgattaaattggttaatccctttattaagccctctcttgcttatatatcttttattaatatttggaccctgtatactcaatactataatttgaattgctttttctcacctagaagtaatcaaactccaaatggtgctgcaaactgaactacgcatggacacgccattcttcc

SEQ ID NO: 477912 - DNA, 652 bp, Homo sapiens
tatatccaagcttcagggtccaacagtgttgcccaatgcctgcagtgcaaggtgcttgtggtcgaataacttctacgaaacacatcatgttagacttaaggtccagactaacggaccaaacactttacttctgccgtagagtccagcataaaagcaggaatggaaagagcagactggctgagtcttctgacctccatctttctcccgtgctggatgcttcctgccctcaaacactggactccaagttcttcagcttttggactcttggatctacaccagtggttcgcccggggcgctcaggctttcagccacagactgaagcctgcactgtgggttttcctacttttgaggttttggaactcagactgacttccttgctcctcagtttgcagatggcctactgtgggacttcacgttctgatatagaagaggcagagaaacggagaaacaagtgtatggagagggatggaaatcaaatagtgagcatctcatattacgtgcatgtgaaaaatctatgaaataggtaagaatcttcacttcaaagaaatggtaactaaagttcatgaagattaacccattcatctaatattcaaatgtaacattagaaatagtatttaacttcatatttgaccccattgacactaatcaacta

SEQ ID NO: 477913 - DNA, 1574 bp, Homo sapiens
gaaatgtggtgctggtttctcccactggctccctgcagcacgcagcaccggctgcacctcctccactgctgccagcgtcatggcagcagctactcaaggtgggtcgtcactgccatcagaactagaatctatgcaatcagctctctgggtcccaggtcttctaactgcaccacaggctttcctgggtcttcaggacttgatgccctgtgtcccagccactccagctgtgactaaaaggggccaaggtacagttttggctgctggttcagaggatggaagccacaagccttggcagcttccacatgatgttgagcctacagagaagcaaatgctgagaaaattaattgccaccagacctgccttacaagagctcctgaaagaagcactaaatatggagaggaaagaccattaccagccactacaaaaaacacacttaagtacacagaccagtgacactataaagcaagcacacaaacaagttggcatgacaaacacctaacaaaacaatgacagaatgaaatttacacatatcaatactaaccttaaatgtgataagtgatttgactatttctttaccttctgctttagcctaatttgtattttagtgagccctctttactacctgattggttgggagcgagcagacttacaagccctgtgtttaaagaagggactggttgatttaatagaagctactataccaggacccagaaaatgaatttttaattgtagggcaataattttttttttctgaaacattcaataatcgttgatatccttgtgtttcttccctattcttaatctataattctgtgacacgcttggaaagttatcctatttctccaagtattctattttgaggttgacactatttattgaaaaccttagtaataattggccaaaatatcctgaacttgcagtgttttaatctcattttgtttgaaccctataggcataacataatacagatatgacagcattttttttatttctccattaacttatgttgttaagtccaacggcttcaaggtgaagcagttgctataatatttatgaaagtcatattgttgcagagtccattacaagaaaggaagcagctggatcacaggttttagatataacttttactgcccaaggctgttatttaaactccaggactgactaaagtggtgtgatcaccatttttcaaaacatacttaccattttcacttgattttagccaaaaggctgagaagcaataacttaccattttctattagtattttctatgaagccagaaccaaaacatatgaggacaactgcatttatacatatatccatattatatttagcattccatttttttggtcataaacaacactgagaggtcttaatagtgttcattttgtgatttgataagaaacatattcaaaattctgatgagcagatgttttctgcgttttttttttagctatcatcaacaatagagctcctttaagagaatatcatgaaaatcatttagctcttatgtgtagtataaaatgtgatagtttagatagcattgcaaatgaatgctgactatagaaaaaaatgtt

SEQ ID NO: 477914 - DNA, 1488 bp, Homo sapiens
gtttcttgataggattgtgacgtgcgacaaaaagtggattttatataacaaccggcaatgactagctcagtggttgggccgagaagaagttccaaagcacttcccaaagccgaacttgcaccagaaaaaggtcatggtcactgttgggtgggaaaatgcttccacaaccagcaggatgcagaaaatgctttccaagagttcatcaaatcccaaagcacggatttttacgctacaggaataaacaaacttatttctcattggcaaaaatgggtcgattgcaaggagtttagtgactctctacacaataattttgaccaagtatggaaaaacaaggaacataatgaagctggttggttactcctaagttcaggagacaaagtgatgaaagaaaatgatcaactcagggattctgtctccgggcttcagaagcagatactgagcctcaaatctcctaagattgccctgagtgagagtcttatcttctgtagagaaatagctgaaattgtggaaaaagagacacaagcgcttaccacgcgagtggctgacctgcaacaaaaggtgcacacacagcctcgccaagtgtctactgttaaagtgaggacattgattgaaaaagaacgggaccctgcaacttggaatgggaacacgtgggaggaccctgatgaaactagggacactgagtttgtaaactctgatgaaccttttttgccagaaggaacagcttccccatccccagtagtggcaacatcccctccccaacccatggtaccatcaccctttccacctttgtctgaggaggagtcagccccaatgcccctgtttgcttctagacctataactagactaaagtccctatgggcccctagaggagacttttgggcttttaccagggtaactgtgcactggagaaagggaaatgatcagacatttccaggactattggacactggctgtaagctgacattgattccaagggatccaaaacatcactgtggccctccaactaaactaggagcttatggaggtcaagtaattaatggagttttagctcagggccacttacagtgggtccagtgggtccccagactcatcctgtggtcatttccccagtgctagaatggataattggcataggcatacttagcagctggcagggcccccacattggctccttgactgataggaattctgttttttaactactgaaactataaaagcctgaacacgaaaaacaattgtgttgtcaaatatacatctttgaggtctttccacttctttctattgtaatatcctaaatggtagcctggaagaccgagagtccacacatattacaaattcaaaaatggttaaacaagtttaacacctccagagtagtcattaaaaaatcgaatataatttatatgaaatagtgtgaagtgccaagtaagtagtaaacgatttaatcttatgacaaaatactacatattaatggaccaagtcatcaaagtg

SEQ ID NO: 477915 - DNA, 581 bp, Homo sapiens
tataatttcaaccattttccgttttggaaaagttaaacctgtggagacagtgaaaagattagtgactgtcagggcttgagatggtacgtactgttaaatgcaaaccattttggatgtcagtaaaaagaaaccttactcaaaatgattgtttcaataaaggattgaggactatggtaatagagcagaaggacttctgcaataggaacaggggattgttgcaatatgaagacccttcagtaggagataatctacaactgtatcacatggcgttgaaaaggggcttcctttttcagggagtggtaaataaggctagaaataacctggtgtcaaagagttggatacgtggtagtacgaaagggccgttgattaggagatattttttcctgaggatgggaaagcagataaatagaaaaaggataaagaaaataaatgcaatggtagaattccttacctgatatcagtaaaccatgaaacttaatcccttcaccaaaatcgtgttttaattcatatttcagttattcctgcaaactcagaaatgggcttatttgaagtaccatattagcctgaatataaaatgctat

SEQ ID NO: 477916 - DNA, 627 bp, Homo sapiens
atcaatccgaggaaagcatgccacacgggagtacacgttttcaatccagtctgaggagatcatcctgggccattctaatggcaaggactgtgtccggaatttattccttctggtgggttcttggtctcactgactttaagaatgaagccccagaccctcgcgaatttgttaagaggctccaaactgccgttaggaatcagagttggagagacagtgatttctatgtgtatctgaatgttactgtgttctggctgttatgcaaaaaagaaaagggcataaatagtcaagcagcaataggaagcttactggagcaacagttaatgttacaacttggtgacaggaacccaaatgagactgaggaaaacacagggccgcccgtgcactgtggggctttaagaaagaaccagagaacttctcctctagtgtcatctcagcagaaggcgaaagagacatcttacatcatagcaggcaagagagagaatgacagccgagtaaaagagaaaaccccttgtaaaaccattggatctctttagacttattcactaccacatgaacagtgtggaggaagctgccccaatgattcaattatctcccactgggtccctctgacaacatgtgagaattatg

SEQ ID NO: 477917 - DNA, 1150 bp, Homo sapiens
gtcgcaccaccctgcttttcctcactctgtggttcgcaccaactgcctggtcaatcccaacagcatgagcttcaccactcgctccaccttctccaccatctacgcaggcaccgagtctctggttcccggatcttggtgtcctgctccaccagcttccgggtcggtttggggtccggggtcctggctgcctgaatggccggggttctggctggaatgggaggcatccagaatgcggagacgatgcaaagcctgaacaactggctggcctcctacctggacagagtgaggagcctggagacggagaactggaagctggagagcaaaatccgggagcccctggagaagaagggaccccaggtcagagactgggaccattacttcaagaccatcgaggacctgagtgctcatatcttcgcaaatactgtggatagttcctgcatcgttctgcagatcgacaatgcccgtattgctgctaatgactttagagtcacgtatgagtcagagctggccatgcaccagtctgtggagagcaacatccatgggctccacaagatcgctgatgacaccaatgtcactcaactgcagctggagacagagatggaagctctcaaggaggagctgctcttcatgaagaagaaccacgaagtggaagtaaaaggcctacaagcccagattgccagctctgggttgacccttggagaacagcctgaaggaggtggaggcccgctatgccctgcaaatggagcagcccaaggggaccctgatgcacctggagtccgagttgccacagacctgggcagaggggcagcaccaggcccaggagtaggaggcgctgctgaacataaggtcaagctggaggctgagatcgccacctaccaccccctgctggaagatggtgaggacttcaatcttgcttttgaaggatttgaaaagagaaggtacaccatcagcagtgcatatgagagagatgaccctgcagattagtggatgatgggtttgaggatgcattctaaaaggagggacaatgggtcccagtagttgattgacagatgatgagaagcctttaaagcagtatcattagcattagagattagtgtactgatttttttttaatgaggcaagatatgtctgtctttgtgattaagttgta

SEQ ID NO: 477918 - DNA, 487 bp, Homo sapiens
catcaaagaccgaaggtagataaatccacgatgatgaggaaaaacctgcacaaaaaggctgaaaattccgaaaaccagaacaccttatctcctccaaaggatcacaactcctcgccagcaagggaacaaaactggacagagaatgagtttgatgaattgacacaagtaggcttcagaagaaaaacccatttagagaagaacataaatgacatgatggagctgaaaaacacagcacgagaacttcgtgaagcatacatgaatatcaatagccaaatcgatcaagcggaagaaaggatatcacagattgaagagcaacttaatgaaataaagcatgaagacaatgatagagaaaaaagaatgaaaaggaatgaacaaagcctccaagaaatatgggactacatgaaaagatcaaccttatgtttgattggtgtacctgaaagtgagggggagaatggaaccaagtaggaaaacactgttaggatattat

SEQ ID NO: 477919 - DNA, 733 bp, Homo sapiens
ggccaaggtagagctcgggccatggcttcaaagggtggaagccccaagccttggcagtttccacatagtgttgagtctgtgggtgcacagaaatcaagaattgatgtttgggaacctccacctagatttgagaggatgtatggaaatgtctggatgtccaggcagaagtctgctgcagaggcagggtcttcattgagaacctctgctaaggcagtgcaaaaggaaaatgtggggttggagccctcccacagagtccctactgggcactacctaatggagctgcggcaagtgaatcagtttgggaaccagaagttcttgatttatgtcccagcactttctgctgaagatatgacccatggtgaaaggagtacagcacagtttattaagcgtgggcggctttgtaagcagtggaaatacattcaaattaaactatcgcaagaacaaaaaaccaaacaccgcatattctcactcataggtggaaattgaacaatgagatcacatggacacaggaaggggaacatcacactctggggactgttgtggggtggggggaggggggagggatagcattgggagatatacctaatgctagatgatgagttagtgggtgcagcgcaccagcatggcacatgtatacatatgtaactaacctgcacaatgtgcacatgtaccctaaaacttaaagtataataataaaaaaaagaaacatacacaaaaatgggaagattagcct

SEQ ID NO: 477920 - DNA, 2814 bp, Homo sapiens
ccgctgtttgtgtcacagacactggacactgtaagctgcctttgaaagatctggctctgctgacactgaagacacataggagggcaccatttcttgatatctcaagtttatgaataaaggctcgagcaatatttctgatcactcaaatccagcacagcactggatcacaccccaggcctgtggcaagtactgcctggctaccactgatattcactcaaggtccaagagtgatcttgtggtgaatgacgtcaggcctggatctttcaatttaatgcagcagcctccgctctggcccaaggtggatccagaaatgctgatgaggggccaaggcctgaaattggtgtccctaggagagcccactcgttgctccatcactctatcatcaagcttgtactcaagctgttttgtcctgatgcagttgtgttccatgcctccttcactttctcctaattacaatttctgggcgctagcaaccaaatgtcgattaagcctgctccagcccccacctttactgctacacaatctacagagagtcaatgtggacaaccttcactaaagacacattacgtgtctgattaaaacaggtgaaaaaatgtatacaggtaaatggaaaaataattaattgttaattatggatatagctgtatctatttttgtaaaagaagaaactgcaaaataactaaataaattttatcagaggtgaaaaagagtttccaatgcatgtagacatgactagagttaatcatataccaatcgccaataaataagttggttacaaatttaaataaataattgaattcactatatttcagatttagtgtgtttttcagttaatgcaaataaaagctggaagaaatgaagtaaaaattcataaccactacattataaaataactgttcatttttaaggtagtttaaaacatctttagtaaaactgtgttctacagacttctactcagagatggaacagttcaaaatcaagatgattgtgaaagtacagaattgagatacttgcatagcccttctaacatttcataaaaccataagatgcagaattacaatactggtggtataacagatacatttttccttcaagtttacattgttttactaaacatcttccttcatacaaataaaatataaatatatcatttaattcagaatcataaatatcgtatgttctagtaaagtaagagattgcatttccttattgatattcattaacttaatataaattaaaagttacagtattactaagtcatgtagatatcatttttaccactaccattagtgttggtttgtaaaactctagctttattactctactaaaatcttttatgcagtattatataatatgaaacactccagttttccctgtggtatataatctttcacacttttaggttttcataacctcactgactaaaacactctcaaagttactgactttttaatacaaaattttaagtctcaatagcaaatacatttgataaaataaccaggctttttaacaggctattatagatacaatgtattgcatcaatttcaaaccacaattctcaaaacttaagatcaaaatggaattccttataacattcacaggtaaatcaatccctcaagcatctgcacatctgagaagattgctcctctccagttcatagccctaagactgccaactctagtactaagaaaagtacattcaaagtacagccctgccattttcccataatttaatcccatgcataattagttcatccgcctgagcttcagtttgctcgtttataaaatgggcttgaaaatgtcacacccaaagggttgttgtagaattatatgacataattcatgctaactattttgggtagtacatgttacacagtatgaacttaaaacataaatattttctattactcattttttggttgttacttacaagattatgtctccctatccccggatgtgtgaaaatttaatcccaagcatgctcatttttaaagcaacgttgaatcgcccacacaagagcttttgttacccaaattctaaggctttgttcctgctgtcacttctattttttttccctttttcaaactctcgatgttatagaatgacacctttaaggtttagataaaattccttctttagtcaagcccactttggatacatacatacctcccattataatatattcttaaatactataattaattgtctcccaacttcccctttcctggttttctaccatcaatcagcattatagagtgcaaatgatgtacatacagcacccttgtggatatgcctttataaatcaaacaaataaagaaaataagcaacttgtcatactaccacagctaataaatagaaacactggtatttaaatcaatgcatgtttgattttaagcctgtgctttacctagtcgtgaagtgaaagaaaatatccctaaaggttcatagaaagaaatatcagcagttgtccatgaattcagttgaaatggttcagtaacagcattggtcaccagagactaccaatttggggaatgaataacaaaatcatttacttctatggttagatggtaatgggtttagatgacaattttagccaatgcatcaatagcctattttgggcaaggtttttgatagaccaagggatacggttttgtgattccgattggtttttactcgttaaaactattttactctcttatacttaacttttcttcatctttgtgtttaatgtgactcctttacgtaatgtaatagagtgactttcataatcaatagaaagttttatggtttatgctgacttacttgtgctacttgt

SEQ ID NO: 477921 - DNA, 827 bp, Homo sapiens
gtgatatatgaagtctggatatgaagccagctgaagacactttgtttcatgtgctttcagaaatttatgaggcagcgcatccagagttgttcactcctcctggtgggttcgtggtctctctgatatcaggactgaatctgctgaggttcacagtgagtgttacagctcataaaggccactcggacccaaagagtcagcagcagcaggatttattgcgaagagcaaaacaaggaggcttccacagcatggaggcagaccccaccaggttgccactgctggcttgggtggcccccttttattcccttatttggccccacccacattctgctgattggtccattttacagagcactgattggtccgttttacagagagccgattgtatcctctcgtctccttctggagctggggctcttcaagctgtacctgagctctatgagcttctctgacaacctaaattgctttgagaacaaagactatttaaaataaaatcatgctaagactgattggacacaggcatgtgaatgtgagagggacatcaataggaattggtagctgtactgagaaattaggtctcacattcaaaataacacaagtcattgagaacagcctcattcgatagaactttctcagaatcataactataccacacatgtccacaagtacatagggactggataaatcttcagtgttgggtatagctatttatctttttttctgctttgggaattcaagtgaagcctttgctaaaacactgttaaccatggtactccaaatgctgttatgctagttatatatttggttgaagaggttgttgtaatcaaatc

SEQ ID NO: 477922 - DNA, 894 bp, Homo sapiens
aaagtcaaagaggtaacaggaccatttctgcccttctgctctcctaccacatgagggtacagcaagaaggccttctgcagacactaaatgccagggccttgatcttggacctcccagactctagaaccgtttgtgatctgatcaaaatcctattgaagacatctttgactgctgtgggcattagggagtggcaagagtggaagcagatagacttgcactactgcatggccccttgtagcaatcagccagaaatcagaagctcctctatgtgttcattcatgaagggcttaaatggaaagaagtacaggtttacacaatcattgctggaacaaagaggagcaaagtcatcactcatgttttcagtctgcaacaacaacatggttgctctcgtggttctcagaaattattccattcatatctcacactacatcatttctatcaccagcttcctcttccagtcaagatagagtaacagagaccatatttctgattctacttgaaacgaaccaagaaaaaaatggacagaatatgaagcaacagcaggcaatgaagggcagtgatccatgggagtgagatgaggactggatcctggtgccttatttagttcatttggtgacgtcatgttttcctggatggtcttgatgtttgtagctcttcactgatgtctgggcattgaaaagttaggtatttattgtagccttgcagtctgggcttctttgtacctgtccttcttgggaagtctttccaggtattcaaagggacttggttgttacgatataagctatatctttttaagggcaccccaagtcttctgctgcagtttttgcagacttgtagaggtactgctgtggtggtcttggataagatctgaaataattatctggattataatgt

SEQ ID NO: 477923 - DNA, 2104 bp, Homo sapiens
acccccgccacagtgggtccagaaggtgggactgcagacccatggcacacgaacacccaaggcagaagcaacttgtagtatgcctggtccagccgcagcctcacgcagcgccggcacctgtgtggccacctggagctccccgccctgcagcagcagccagtgctgacacatccctcgccactccgcacctggctcgcctttggtgggtgtgagatccaggccggggcgcaagccatgctcagcggactgggctgagtgggcaggatatctccagaggcaatcccggagccaacagaggccttgggcaggggcatttccagccgcagagagagtgagagatgactaaggaagaaataatcggggaattcgactttgctggcttagaagatggagggaagggccgggagccaaggaatactgatagaaaaaacctgaaactggtgatcagcagcttccagataagatctcaggaactgggcaagtgggttcacatatgcacacgaagaggcaaaatggcgatgtttaaccggtatatgactttccagcgagtttccctttccaccagtaaagggaagaacgcctcaagtgagcatgtgtacaactccggtgaacacactgtgcatactcccctcccaagtgctagcaggccgtcatgcgtgcagacaacccaccccgagggaagaaccaggggagaaggcaggcaagaccctggaagcaggccaacatataaaaaccccaagtcaaaaggacaaaccccgcgcttgccaacgggtaagacagaaccggagtggaaaggaagcaagaaaactgatactggtgagaatttctatgcagaagaccttgccctgaacacaatcaaagaaaaatgactccgtcatatgaacattggaggttttattttaaaaattgtatactcattccactgacatttgtctttttgtccataaaacacatgctttaaaagtaaatggttattcatgtcagtatgaattgggggaatactaatatcataaaaagattttaagcatcacctatgaataaatactgccataaccttttataattacctaaatattgttaccattatataataaattgatgaatgtaaagtttatcatattatggcagattcatagaataattttatcaaagatataaacctattcttaatgattctacatgatatattagacaaatttttttaacctcaggacaacacgtatttatattactttttctgtgtttcactcaatttttattctgctatgccaacagcaaataatgttatttgctacttgtatttatgttttcacttttattatgcctatttcaaaataattcaaaggttaatgcattgaattattatgtactaaaatgaatctaaactactagactgctgtgaatgaaaaataattctgtgtaatatatatttaaatcatcaaggcagactgattttaggcttatttgtcatataaatttaatggggaatgcatatgtgtgtcacagaatctttctataatttttttaagcaagggcataaagcatatttagtataatttgataatgtacagattctaatacctaaaaatttaatatctatttcatacaaataaaataattctcacattatttttaaacagagaattaaaagtacattgtcatagaaacaaaggtctaggaaatgtaagctaagtttttaattactgtcttaataaccatatagccttgcataattttatctattatttccataggatttggggaacaggtggtatttggttccatgaaaaaatatgatccagggatatgtgattctttatcatgtccttagcaagagattatgctttgaagtgactaattactttacaatttttcaaaatgccttgaaaagaattgctggttaactgcagaattatttccatctccaacaacaagaaattatataagaaaacaagtattcaggcaaagggcattgcaaaggatatcattgtcttcttaagagacataaaaaacagtgtaatggacctggttaaagtcaaccacacaatattaatagttaaaaaggtacatgacatttcatcaaaggatccacaagcctttgcaa

SEQ ID NO: 477924 - DNA, 756 bp, Homo sapiens
acctcacaattatggcagaagtcaaggaggagcaagtcacatcttacatgtatggtggcaggcaaaacaaaagagcttgtgcaggggaactcctctttgtaaagccatcagatctcatagaaattctagagataaatgatacaatgactgaactaaaaaagccaacagaaaccttcagcagcagacttggtcaagtagaagaaagaatgagtgggccagaagacaaaatgtttgaaattatccattcagatgagcaaaaaaaaattttaaaaaggaaaaggataacttacataatgagagttccacaattagaagaaaggaccacattaggatcagtgatcagtgacagtaatgaaaatatgagacatgattcttcagagaaatctgaccatctagctaaagatgttcagacgtgtccggagtttcttccttctgatgcgttcatcgtctcactgacttcagaagtgaagctgcagaccttcacgctgacttcaggagtgaagctgcagacctttgcagtgactgttacagctctcaaaggcaagaagttgttccgatccccccagtgggttcatggtcctgctggcttcagaagtgaagctgcagacctttacagagggaagaagacccaaggaattgccgctactggctcaggcagcctgcttttattcccttatctggccccacccatatcctgctgattggtccattttacagagatctgattggtccattttacagagatctgattggtcc

SEQ ID NO: 477925 - DNA, 5608 bp, Homo sapiens
tactacacgtgtttaaacaaccagacctgatgagaactcactcaccattgtgaggacagcaccaagctatgcaggtttggaaggtgactggaattgacaaaacagatatccccatatgcttccttgaactggtcacctgggtccaaggaatgggtagatatgaggataccgcagcagtgaagagcaacagaaacagagaccgccgatggctagggagcatattctctgttgggaaggctcagaacgtagctgaaagtagtactgctgagcctgaactgtcgcagcagagaatcagtgatgtctcagtcaatcccctagataaaactgttctaggtggccattctgtcagtgaagggggcctacaacacttcaagaggctacattgccacaggcagatttttgtaccatttgggttgcaaaaaatgttaccaagaatgggcttgctgcctaatacttggaagcccatactatggtgagtcatgtcatatacttttatttgatttgtgaaattaaaaacaattgcatacttatactatgtttatataaataatataacaaatattaaaacaaatgccaaaatgagagttaattttgccattttcctacctccaacactcatatttgcttatccatacagtgatgttattacaaatttaagagtagccaaaacacaatggcaaatatttgccaaggtaacttgtctggttttctcataaaggtacattactattaagtctttacattacaaccatactgccactgaatatagcatttaaagcgaaatgtataaaaagagattaccattctaatttcagtaaatttgatatataacaaataaatataatagaagcttttgaacaaagctgaataaatacaatagaagattttgaagaaagctgtttctgatgtaataaatataaaattaactatgaaatcatttcataaacatatctcataatagcagccatgtggcttcttaattagaatataaaacattaacatattaataattgaaaaaatcattagctttctaattgaaaaaactgtaaataaagattggcacttttatgtttcacattgtttttaaaacgctgataaacatattttcatagaaaggtctatatacaaaatatcttaaaacatgcaaagtttgtatattgaaataacttttcaggaaataaattttctatttaaatcatgaatgccttctgtggccttaatgtcaatatctttaagcatttcttgagttgatttacatttttaacacaaatttattctgaaacatatataatacctgtaaaaaattttgaacaactgacttgaaaacactcttgttgtatcacttatttcctgttgttatcaaaataagtaatgaactggaaattgcatctgccagtataataaatgtattataccaaaaaggttaacttgtttgaataaaaaattactattataaaatatgttggtgcacaattctggacctatttaaatttatacatacaaatattaataatagtaatgattttaagtgcaaaaagacaaagctcataacagaagttgatgaaggacataagacatttcaggtaatgattttcataataaagtcttatttttacactggtttactaatttatcatacaaacttggaaaaaccttatcatgtactgtgcacataagtgtcattatttattgaaaaagagtgaatgaataaacaaataaaaactgatgaagaaaatttaattagggtaatgacatattgacacctattctaaattctcacacattgattattaaatcttaaagaaattcctgtttttaaattatgaaataaagtgttttttgctaatatttgataatgctttattttccttacttattcaatgttgtgtttcctcagaagataatttaagaatgtaaaattcaacacattgagtaacagggaattgtttggtttactctacactgtaagctgcatgtgtaccagatagttatataaaattacagcttttgaggtggaggaatcaaaatatcttattttttaatacttaaaacacataattggtctctatataagaaacactagatcaataaataataaattagtgttttcttgtttttggaaaacaataaggaaataaggttaaacatttttaatcattgcccaaacattttcatttcatttgatacatagtatagtgttaaactcatttgttaacacataatgatttttttcctctaattcaaaaatgatttttcgtatatatagaagtaatgactggttttaaaatttatattactaaatataataatgtagtgttgaaatatcagtatatgtaatatacaatggaatttcaaaacctgagacatatttcagtcctcatattttcttgtcaatttataggacaccttttcagctatataattattaatataagatccatctaattataacataataacttctttgctatagcttatacatatatatcaaagcatatttataaggtaaacaaactaaaacaagcatataaatatgtaataatattttataaaacacttcaaagagaggtaaagaacatcacacaccggggcttgttgtggggtggggaggtggggagggatagcatgaggagatatacctaatgttaaatgacgagttaatggatgcagcacaccaacatggcacatgtatacatatgtaacaaacctgcacgttgtgcacatgtaccctaaaacttaaagtataattaaaaaaacacataagattaatgtggtgataaaatattacactgatgataaaggacttttttgagagatcaataattgtccaatgagaatcaagaattgaagtatgtcatcaatgtttttttctaaaaatatactttctgaaaacttatttgccatacattacgttaactgctaagcagcaactaaaaaatatattatctgctcctcaagagcataaaaacaaggaactaagtatttgcaggcatacacaagcattttgaaagggccatactacataccaaaagcatcataaatgcattttgttgaagaattatgaaagtaatgctattgtgattgaaaacataatctaatgtttaaaccacaatttgatttagcaaaaaataaataaataaaataaagtaatgggagattcattatctagaaacatgtacagtattttttcaataatttaagcatatttttcattttgttgaaaggtaatttacatagcatcaatgtattaaatcaatttgaagaaatattaaacagaacattttatttttctatcatactaaattagaaaattagatttgtagcttatatttctaatattcttaattaaatatacctggtttagatattaaacatactggattagaaaaaagtgtgcaataaaatactgccaaaattttactacaatgattaaaatagttcaatgatctacacattccaaattttttttcaatttaactgagagaattgtctcttatcctctctgaagaggttttatttaaactatcgcaagaacaaaaaaccaaacaccgcatattctcactcatagatgggaattgaacaatgagatcacatggacacaggaaggggaatatcacactctggggactgtggtggggtcgggggaggggggagggatagcattgggagatatacctaatgctagatgacacattagtaggtgcagcgcaccagcatggcacatgtatacatatgtaactaacctgcacaatgtgcacatgtaccctaaaacttagagtataataaaaaaaaaaaaaaaaaaaaataagatagctgcctaggtaaccagagactgaggggccaagttgctgatgagtaggaagcttcggagtaaagaattgattttattgggctcattttctcttgaatcttctccaaacttggtggaaaaaccactgaacatccacccaaagattgcacacaggagggagctgcttttacaatattaaagagctagaaagacaaattgaagatcagacctgtaaagcaacgaggacttgagtaggcaagatattggaagaaacaatgaactgaaaacttacaagtgattgggacattgcagagcaatgggaaggttaacttctttaatgccaatgcaaatgggaactgaaattgttaaaattcagtatctggaacaaataattttaaataataaaaattaaccattatagcatataaattaaatcaatgtataagcatcaaaattgctttgtttaaatatttctgcaattatgcctgaggtttaaaatcctgtatataaaataaacaaccaagaaacattcataattcagttttaaagacacaatgtgtttgtatattttaatattataacagcatgtttttggactgtcctgactttttctgcttgaaattattttaaaaacttttaaagagtatcgtaacttgctatttgatatagtttggctgtatccccacccaaacatcatctttaatttcagttacaatagtgtccacgtgttgtgggagggacccagtgaaagggaattaaatcacgggggcagttaccctcatgctgttcttgtgatactgaatgacttctcaagtgaattgatggttttgtaaggagcttttcccccttttctcagtactcattttttctcctgccaccctgtaaagaggtgccttccaccatgattctcttgcaagcaacaagagttgcaatgaccagactaaatctatgctggaccatatagaaatgagaatttagagaacgtacccagtttcattcttcagcagtgaagcaacagtaaaaagtcatcatttatatttaatcttttaaatctatttaacttccaaagacaatagcaatatcatgattccataaagcataagggaattattgcttacacaacaatgacagacatactaatcctctcttcaaaacagtaaaacatcccacatagttcatcttggtaatgaactataaatgatgttcattgttttagctggcatataattctcttttaaaaattaatattttgaaattaaatattgagatataggattaactactattagcattattttatttaacatgttttatttttggcagttaaaaagggagccaattcaaaggcatcagttaatatttacaaataatataaaactgttcagatgttcatggtaggtatgtataaattcttttttttttacgactgcacaatccatatctgcttttttctcagcaagcatgtcaaataattgtgatttctcacctttattcctggagaatttgtgttattaacaatcatgcttttaatatattcttgaattttctattaattttaccacaagctttagagtagtaagaagtaaccttgattatattctgagttttaagtgtatttctccctgcctacattgtgtattgacaactcattttttcttgatagtaataattcattgtctcagtcgactagggaaatggacaagaaaaaggaaaaagaccttatcttcctaaaataaatccttactatggatcagagggggaaatctttaagttcattactatttgaaatgtaaacatgtggccccagggaaggaaaaa

SEQ ID NO: 477926 - DNA, 723 bp, Homo sapiens
ggaggcacagcctgcatggcttggtgctgtctttgcaatagcgaaaactccgggatacagaaagccctctgtccttgcgataaggcagggagcctaactgagctgcctagcacaagctgcctacagaaggctaaaatgaaacagcatattgtaacacacggccactgggacttcagctgtaaacgttccacccctagacactgctgtggggtcagagccccacaacctgcccatctgcatgctcccgctaggagcttgagcagcagggcactgaagaagcagcaagccacactcccattgcatgccctgcgaagggaacaagggaacttttccagtttcactattgccctaggttgtctgtttactctgttgactgtttcttttcctgtgcagaagctctttaattttaataagtttcatttgtcatttttgtttttgctgcatttgcttttgagattttagtcataaattctttgcctaagctgatgtccacaagttttccctaggcttccttccagaatttttatagtttaaggtcttatatttaactattttaatccatcttgagttaattttttagtagaacacttcacaaagccttttcaagtgaattaaattatgtaaacttatgaggtataatttatataataactgtgataactaatctggactccatgggctatgttgagtgttggattttgttttactcatttaaatagtgtt

SEQ ID NO: 477927 - DNA, 7291 bp, Homo sapiens
aggtagtaacactcatccctctacactcaagttacagtggcctgacagtactcagatgctttttattttcttcttttttctcacattcagttttattgctttctatggattcatcttcaagttcatgattattttctcagctgtgagagaagaaaacctaggcaataccattcagaacataggcatgagcaaagacttcatgactaaaacaacaaaagcaatggcaacaaaagccaacattgacaaatgggatctaatcaaactaaaaagcttctgcatatcaaaagaaactattatcagagtgaacaggcaacctacagagtgggagaacatttttgcaatctatccatctgacaaaggagaaatacctaatgtagacaacggattggtgggtgcagcaaaccaacatggcacgggtgtacctacaaaacaaacctgcacatcctgcacgtgtatcctagaacttaaagtattataataataataataagcagggtttaatttgaactggttaatgcatgtgttttaattacttgtgttcctccaatcaaatgtttgctgctttaaaatttttcatattttaattacctggtcaatgatgaatacaatatctgaatatatttttgtctgtttttactttaacatcaataacgtcataacttaaatttgttgtttcatacttagtaatatataagccaaaattcgggagttaggctttaaaactaaagctttaatattaatgttgtacggtaagaaaaagagccgatgctaggtatttctatgttttatctggactgtgatataaattagctttaccattttaagtgattttcatgttgtattcagggaagcaatgccattaaatgatcagaatagattaaaacactttcatgttttcaaagtataaacctagtaaagagcatcttctgtttttctatatactcataattgtataaagccaccagtttaagctattaaaagtatccatgccattctacaaaacaagacaaatacatttatcttgaacatgctaaatattgtctgcacacaatttctacactcaaacattttagataaaatatgttactatttcctatttatcaatgaataagaacatattggtttgagctatcagcaacaagtatattaaacatgtattaacttccaaaagaaataagaatatgatgtagtggagatattaaattatatttccaaagaactatatgacaatttgttgtcttataagacttcaattactttggatggggttatatatccctctagacatttttttttgatagaatgaacatatggttcttaattcagctaaacaaacacacataaaagaaattttaaaatatatgttttgtttcattttatctcaatggccataactttcttattctttggaagaatcagctaaattaagcatgggctatttgaatgattttcttgcaacaagagctaaaagactgaactgtctttctgaagccattgagaagacactatttcttagaattttaaagtctctggttcaattagtgaaatagtaggaaagttcagctctagggtgaagaagatgtttcaaaacctgctaggggaaagttacaagtctgcattcacatgctctaagtttttgtcagaaatgggatttggggggttatttgactgtccttatcaggttaaatattactgagacctgatgttagaattactgttataataaatgagaaaatataaaataaagccagagagagggagagaaagagagagagagagaatgaataaggccaaaggaatgtgttgcttttcccacctctcaaacagtttagccttctgaaacctacatttcctggtattacaaagtgaattatacagtgtgtaagaaaaaattccttccctgaagcattatggcaaacctgaaacaatttcaggtctgacatctcccgcagctgaatctgatgagaaacagatcaaagtcaaggtgaatgtttttccttatttcccccctgagagtggaagctggattgtgtaacaattggtacaaaaacctgctaccagcaacagtagaagcggtaattcaaaacaatccaagtttataaagaaaagcattaacaatgttgcctttttaattttagtcttaccactgtgcaattttgctttccaacaaagaaattagatgacactagagaattacatgacatatgtattcaattttgggtaacttccattttacataagttgtttttaatataaaaattatgttttaatggatggatatagatttccctggagaaaatcttatgacttcgtaggaataggagagtgaaatcaagaaagtaataattatcagatttttgcagtaaagttgctgtgatgaagcctgatgcaattgtaatactaaagtctaaaaaaattagatttatggtaagattttgtaaagttattcatagccatttaatagtgtaagacatttttaagcatcttctaaaggatgacaaacattccaaaggatgaccatttagttctatttttgcatattttaaagaaatattagacacatctttacacttgatattgtattggaagggaattagatacaatgaaacatataacctaaaagaatctcattaatctaggaaaaaataatggaaaaaatctaggaaaaaataatctaggaaaaacaatggtatgtttaggaaaatagcctgttgcatggtatgttatatatcaagaaggtatgtttaggaaaatagcctgttgcatggcaagagagatgccaccttgaagtaaaactgccatgaggacaaatgtttggctctcatgtacaaagatgttctgcaataggccttgaaacaatgcctctaacatagataatttatcataaatgtggttgtgtaacctccccagtggtcatgagtcttggcaagaaagtctgaagacatggcgagctgcacctgttttaccctgaaagtttcctttataaaaaatatgttttggagtgtagatatgggaatccactctcttgtggccactcaagacattacttctgtttttaagtcccctttaatttttttctttccctgaaaaactggattcatcagcctcttctgtggcctctcttgtccttcaggctttggggatgggtttgcatttatttgctcaccattaaacagtatgcatgtgtgttcttcgtaactatttacctatttgtgtgtgtgtacttcttttttaagaaaataagtttatatttctggaaactaacgatgttattcactttataaattgtaaaaaaaaacagattttttaaatgacatgtttattttctgaattatttgtattgatctttattatgtacgagaactcagagaaatggtttttaatatattgttagaatacattaaattaaatttaacagagttcatttgagcaaaaagtgaatcatgaataaagcagtactcaaaagaggttcagagagctaaattcagcaaattggcagcgggtttttatagacagaaccaggtcaaattaaatatttttgaatattatattgttaagagaacttttacggtcttgagaaagaaagtagaaaaatacaatgtaaaggataagatgtaatacaagagaattggaattatattaactcaatttgaatgtcactaagagtttacaaatcactttcaaaatgagctgttcattttgctaaatgttatatatcaagaaaaaaagactagaatgacaaggcaactaagaaattaaataaaatctttgaaataaatattttcttaactttttatctaatataatttcacagtcaggctacagacctataaatgtagcccctaatttaaaataacctatagttttaacaatatatacatatgtaataaactttgaaaaaccatagattttatatattatatataaatgtatatatatttaatggaatgaaattatgcttgatttaattggcctaaataattacatattttgtatactgatgttttgaaattaagtcaatatattcagatcaaataaatattccaaagcctctaagtaggcacagattttcatctaatgccaatgaaagtgtaaactatttaatcatattttctgttactcatttaatttttagtcagtgatttacaatgtttttttaacaatattcacaataaaacaaaatgtcagtagtcttcattataaagactttgctacatgcttacttggctaagataaactatacttctcataatttccttttatttgcatatttccatacatgtgggctacaagattttcctggagaggcagaggcacaagagacactacaaccattttgtacaactcaattgttgctgatctgctgagtcaactcattcaaataaagcagcagctgtacctttattttctttcttactcctggatttccttcagtttctgtgactcatgggacatatgtgtgacttcaattccatctgaaagagcataggattctgcaggataccttagtcaccaagatcagagggagatcttaattgcatatgacaaacttattgtaagaatgaatggtgattatgtgttctgacaaaaacacaatcgtttattaagcatttagtacatgccaatctgctagacattttacttgtaaataagtaaatattcaaaaatgaaaataccccaaattaagatacatatatttaagagatataaataattgagagattcatttgctctccaaatttgcaaataactaccaatcctcaatggcttcatcttcataataaaagatgttaaaatatatataagattatttacaaccttaaatttgggagagttaatgaaaaggtaatatgaattaccatttctatcttatttttaataactttataacagatattcaacaaatgtcctatattgacctaaatttagattcctgtgtttagcaaagagtgctaaattaaacattcatttaaagcaaagcttcctcacattttagccctagatttttctatttttcatttgaatatatttgcaataaagtgatatactttaaatacgcatatatgaaatatgcacatataatataaaacttttgttttttagcataagtgtttgcaatgatggaagtttatatatatacacatatatacttgtacatatatatgtacatacatacatgcatatatgtttagttatttaaatgattataaaatattatattatcgcagaaaaacacataaagcctgtttcttctacatctcagtgctaagagatattaccactaattttaaattttgtcaatcataaagatttaaacttttaatcttaaatttttccactgcagaataactgttattgttttttatacctataatatttgtaataatagcttgtttacttatgaatagatgttgaactttcagaggtattttctagaaatattacacacatttcaaaatttaatctttccgtaagtgagtcactactgcattcctgaaatatgacttcatgggacataccacattatgtaagatacacttctgtatttcactgccaaatattattctaattattttacaattttttaaactttcaagttcagggatataaatgcaggtttattacacagataaacttgtgtcatgggggcttgttgttatacagagtattaagcctgggacttattacttttcctgatcctctctctcctcccaccctctaccctctgaaggccttagtgtgggttgtttccctctgtgtctatgtgttctcatcgtttagctcccaaatcttatttataattgaaactgcatgtgaattatcttttttagtatgccgtttatcagattttattattgtttcataaaaaatactcaacctccctttttttatgtttaaaacaatatttgtaattactaatgatcatacttgctaaaattgtttggttcaaatgtttgtaataatgggactagttgcaatctagttttaatgagcaaggcaatgttatatccaagacacacccaatggtacctcttaaacttagctcaggagatttctatcaagattcagatggcgataaaataagtatacaaatctgttcacaaacattaataaatatctgaaagttgattgcaaaacaaaatgaaaaccttaatgtaagcacatattttatcaaatggttccatcatttcattgagaataaaagcattgttctttcaaagtttatagaatgttcaaataattcatgtatgctatatgaatttataatattttagacgtatataatatcaggttaaattcaacacatttttattctgtaggggcatgacactaaatttttgcttatagaataatttccagtgatgagtaattattttctgttctaccaaaattctatcaatattttaaacaatcttgcaattagtttattttaaagtttatatagccctcagacatgaattaacatgatgctgatatcagacatgatgctagattattatttatcttttcaatgttttttaccatactaaaagcataatgcattattttaaatttgttatttatgttttgtcagaaaataatgaatgtttctaagttttcagatttgttcacatatatttatagcattctcttaaaattttaatgtgtctgtattgtgcgtataacaatattttttctccctgatttccttagctgaattataagaattttttaaaaacttttaaataaaaaccttctagatttatcaattctactagtttttgctttacattttactaatttctatgccatatttaatactgcagtatttctaatttgttgttttctctttactagcttatgttattaattatcacagtctatctttcaggattacgttatttcaattagagtataagaacttttcaaggaactctaattttatttattgtgggccacttgaagttataccactgacattttctttatttgttaaaaattatatttcccatattttattttgaataatttctattgatattttgagggtaattatttttcaactgcaatttctaaactgttgttaattttattttctgtattatagttttcatctctaaaagtttaatttttcatttttaatgttttccaagttgctagatttaggcatttgcaatacagttataacaacagttttaatgtttgtttttattgtctgctaattctaacatttctgtcatttctggataacctttgattgattgatacacctcaccattatggaacagaaaatatttttctgtttctttgc

SEQ ID NO: 477928 - DNA, 481 bp, Homo sapiens
aaggatttgagtacaagggagaggccatttcctgatgatccacagctattaacattagtgttaaatgaatgcagactccaaggagaagaaactgcctgggtttgcacacaccaaatggcacacaaaaaaatggcaaagtatgacgttctggattcacttcaccagaaaaagggaaaaaagcctcagatgggcatgtgtaccccttcctaaacacactgtgtgtgctcaattcccaagggtaaggagagcaccatgcaagtggaaagcccactcaaagggaagaatcatggggaaagagaagatagcagaagacgcaaagctcgtggatcggagaaaaggactgcgctgttcacaattacagaatggacgcacaaagaacaaatctatgtatatacttaagcaaaaggcacatgtatataaaatgctgacatttggaatatttgctttcatgtagtgctcaagaaggtgttcattttggcag

SEQ ID NO: 477929 - DNA, 882 bp, Homo sapiens
gataatgtacacctttgtctaagctttatgctgatcaaaagtggcttgtcatattgtttgactcaggacatcatatctgaaatcctacttgccatattctcatcagaccttatttgttgtacttgctcatttgcagatgggaatgggcatgggaataccaaaagttgttctgaaaacgtggatgaagctggaaaccatcattctcagcgaactagcacaggaacagaaaaccaaacactgcctattctcactctctcgttgaatggctttgatcaaaatgctgataatgatatggacaataaaatccaggttgaggtggtctcagatggatataaggaacttgttgggaactggaaggagaaattcaagctggctgaagaaatttacgtaagtaacaaggagccaaatgttaatcaccaggacaatggtggaaacatcctgggaacccatcccttgtatcagtgtgacctggatataagacatggagtcaaagaagattattttggaactttaagatttgactgccctgctggattttggactttcatgggacctgtatctccttcattttggccaatttctctcatttggaatggctgtatttacccaatgcctgtaccccagttgtatctaggaaccatggagataaagaaaactaacactgtttgcaaacctgcttaccctagagaaaagtgtgatgtcaaactcttcaacatgaatgaaaatcaatatcaatattgatctttgcttatttgctaatctcatatatactccttctcccttcattccatgaaatctattgggtagttagacttaattagtttagtatatttgaccatacacttttctatcacttaatgatatacatgtcattctctctac

SEQ ID NO: 477930 - DNA, 2066 bp, Homo sapiens
gttcattctagatttcttttgtttgcaacgattgagcaataccctttttgaacattggtaccggagaagtgggccattgctatgaagatacctgaaaatgtggaagcaactttggaactgggtaatgggctgagtctggaacagtttggagggatcagaagaagacaggaagatgagggaaagtttgcaacttctagagacttgttgaatggctgtgaccaaattgctgatagcgatacgaacagtgaagtccaggctgaggtggtctcatatggaaacaagaaacttattgggaactggaagtttgtatggaaatacctgaatgtcaaagcagaagtctgctacaggagaaaagccatcatgaagaatctctacctgggcagtaaaaaggggaaatatgggaccgtagcccccacacagagtcccactagggcactgcctagtggagctgtgcaaagaggaccaccatactgtagactccagaatggtagatccactgacagcttgcaccatactcctggaaaaaccacagacactcaatgccagcctctgagagctgccatggtggctgtaccctacagagccgctggggcagggctgcccaaggtcttgggagcccacctcttccatccttccatcatcgtggcctgcatcatcaacatgagtttttctaaccacagatttctagatacatacctgataccctgaacttcacaagaaatcggcaatcattaatgatccagctaaatttgattttaactgcagacgttctccatggggtaggaaatgcatctaccaacaagattataattttgtatcccataccttctgacattgctagtaagagtattatgtactcaaactcaagtcaaaatgccatgacagacacatattgacccagactgaggtgtgtacatatatatatacatatatatatacacacatatataatataaatatatatttataattatataaatatataacatatttataattatatgaatatataacatatttataattataggaatatataacatatttataattatagaaatatatagcatatttataattatagaaatatataacatatttataattatagaaatatatagcatatttataattatagaaatatataacatatttataattatagaaatatataacatatttataattatagaaatatatagcatatttataattatagaaatatataacatatttataattatagaaatatatagcatatttataattatagaaatatataacatatttataattatagaaatatataacatatttataattatagaaatatataacatatttataattatagaaatatataatatatttataattatagaaatatatctaatatatatttataattatagaaatatatctaatatatatttataattatatgaatatatcatatatatttataattatatgaatatatctaatatatatttataattatagaaatatatctaatatatatttataattatatgaatatatcatatatatttataattatatgaatatatctaatatatatttataattatatgaatatatctaatatatatttataattatatgaatatatctaatatatatttatagttatatgaatatatctaatatatatttatagttatatgaatatatctaatatatatttatagttatatgaatatatctaatatatatttgataaaacaaaaaggacaatttatatcttgaattgccctcaaaataatcttaatctgagaagtaaaatgattaaatgtttaaagaaaaacaaaaagtattatacagaatatttaatctgacttgataaacactatgaagaacattcatatacttcaataaacagggtacacttgccagcagttttgccacgagagtacaccaaacaaaggagacagggtcgtttataacctgacacgtcaaccctactgctgtatccagtttccattggctggaacgggacctcacattctgtatttgtcctgattggctagcaacttagaactttt

SEQ ID NO: 477931 - DNA, 2460 bp, Homo sapiens
gagggtgatacttaagattgtggtaagcagcgacccatatttttgggggaaaaacaacacaagttctggacagtaaagatttaagacgtgctatcatgctaagaagacaatgggaaaatggccataaaggcactgtggagcttacaagtgtgaccgctcccatcacaggcccagagtgtcaaggcctgactgaaggaaatatgtcaaaggagaggtttcagtgctctcaggaacttggaacttactgtccagggccaactcaagtctcagttccctacattctagtgcagggctcgtcagctgccccagccacatctcaggactgccaggatcagctacacgcagctgagaatcaatcccacccacttctccagaaggaagaagaagatgaagaagaagaagaagaggaagaagaggaggaggaggagggggaggagcaggaggaggaggaggaagaggaagaagaagaaaaaggggaagaagaaaaagaagaagaaggagaagacgaaaaaaagaagaggaagaagaaaagaaggagaagaagaagaggaggaagaagaagaagaaaaagaggaagaagaagaagaaggagaagaagaagaatttagaagttattggatagaataaatgtagtctttatgctaatactgcatgagttttaggggtcagaggcagaaagctatgatttcaatgttgtccccttcaaaactaatcttgaagtttgtcattgtagcagttttaagaagtgggacctttaagacacgattaggccataagggctccaacttacgggtggcattgctgctgtcatataaggacaagtctgtccctctgttgtccttccacattccaccactacatactacagcaagaaggccattagacaatgtcagctcctcagttttggaattttcaacctccagaattatgagctaataaacttactatcattcaaaaattacatagtctgtggtattttattatagcagcacaaaatggactctgacactacactattgtcatagagtcatgataaacgccgtttttgtgcaagctgcataacatggagagattttaatattagtcaatcagattcaatataaaatattgattctaactgaaatgactctatatgtttcaaagaagaattaaaatatttctccatcagtccatgtatgacttattattctgttgcattgtacaaataaagtgttatagaaacgagaagttcaatattttggaggctagaaggctaagatttactacactgttctatgacctttaatgctagcatttataaaataaattcactaattccttgtatgtttatcatttcatggaggatttgaaaaaaatgatattcagttaaatgcattgaatttaaaaacattttatgatgaacaaataaatgtatacattatgtttaaatataaaacacatattaattaaatataggcaacattttattaaaaagtttaagtgcttagttacttcaaaatattgaaatccaaaaactgctttgctttcacctttttttttaaattaaatttcccctttctgttggtttatgttagttcctgtacgtcttcaaattgactcttagaattctttttactggaaaaaaattaataaaaatgttgcatgcaataaagaagaatattattaggaaaaattaatcttgactttcttcaccttttcaatattaattttaactttcatattgaattttaattatttggtaccattattaaaattttctagtgtacttaccttaaaattgtacagaaagcacttactttattacaaatgtaaaataattacaataagcagtatttgtttatgttgaatttctacctttttactctttcaaactgtctatggtttatcgactgctacttttactaaagaaaagtgactctttttaatgatatcattagtgatatatatatataaaatacaaatcacctgttaatttagcaatgtaaaatgtggcttctaaggaattgcattttagtaatgaccttcttgcaaatttttttaatgttagaagtatttgtagataaaaatactttctaaataaattgaatgttggtctctgtctggaataaaacactgaatcaaaaggatctacactgccatcttctgtcatgtatggtatcagataaatatctccaagtaaaatgactgaaaaaattttattaaatacattaacttccctcaaactatttcttagtgatttgttatatatgtttacccttgatttatacaaattcatgtaacgtttagctactaatgatgagtttataaccatgtaagtttataaccataaagccctgtaagacctttcccatattaacaataaagcaagctgtacttctttaaataaatgaatatttttaaaaaggataaacagactgtattttatagggcattctgcctttaaacccttccagtccatta

SEQ ID NO: 477932 - DNA, 601 bp, Homo sapiens
cgaattgaaggatggtaaatgcaggggactttattgccgatgaaaaccctagcaggcagacacaagtggctggacatcgtgaagaacacatcagcgaaagaagacacaagtggctggtcaacgagagcacgccagcagaagagcatgctgacaggcaccagcaggtcaacgagagcatgccagcagaagagcatgctgacaggcgccagcaggccagcaggccaccgactggtggaacaatgtggagatgtagaaagacagacagaagacagaaaaccgtcaaagttaaaatcatgaacttctggcagcgttgctgtggtatcaggtctcactcttcttgtgaacagattgttccaccagacagctttgccaatttggtagcaaattggagctttgctcctttggagaagcaaaatctataacaactagtgtgataaataagtgaaggaagttgtaaaaaaaaaattaaaaaaaaaaaggatttaggacgtatgacaccagaaagtaatatgatgtttaggtgaaaatataaattacttgtgttttctcattatcatttagtagaaaaattgcaaactgtcagtcaccaatgaactgtgct

SEQ ID NO: 477933 - DNA, 759 bp, Homo sapiens
tggcacataagagaaattcaactactgctatcggggaaagaaatgggggtcaactttgactgtagcaaagatagctggagacttatagctaaagaggagagtgagaagggcaggccaaagacacagaaaacaaagatgggagatgagaaacctgatcagatatggagagtcatccggtatcagaggtcagggattctttctaaactaaggagaactcttgctaagactggactatgcacatcaggcaaggatgggcggctaaggtcaaggcctactctgttcgtggtgttgctggcttcaggagtgaagctgcagaccttcgtggggagtgctacagctcataaaggtagcgcagacccaaatactgagcagcagcaagacttattgcgaagagggaaagaacaaaacttccacagcgtggaaggacccatttgtggtatccacgtccttagacacaagccatttgagaaggttgtaaaggatgttgggcacaagaacctgcgtgacacacgtgtggataaattgtcaaagtagcatcaatcacattgcattaataatttgtcttgatttactactttcaaatatttagatagcaatatcagaaaaaaaatttcttcatttatgatattatttgaagtgaaattatcttttctactcatagacatgctctttaggaaattaaccagccactgccattaccttctccctgtaccttgatggctcaacatacttcatcccagaaccagctcttactatttc

SEQ ID NO: 477934 - DNA, 1667 bp, Homo sapiens
aggcctccaggcctgtgataagagaggctgctgcagcaaatttctgcagctggcttgaattccttcccacaaaatgggtttgtttttttctactgcatggtcaggctgcaaattttccaaacttttatgctgtgcttcccttttaaatacaagttccagtttcaggtcattttgctcatgcataagaaaagtgacctttgctacagtttccaacacgttcctcatctccaagccctcctcaaccaggacttcattgtccatatcactagcagcattttcatcacaacaatttaacaagcctctaggaagttccaagttttccctcatctccctgtcttcttctgatccctccaaactcttccaacctctgcccattaaccaggtccaaagctgcttccgcattttcagtccagagagcattacaataggtcactatattgatgacacgatgttaattaaaccagataagccagagctttttgtggagtttcagatgcaggaactgaaggaagcatctggtaaacagccagagagacaccagagctcttggtatcacaaccttcaaaaccttgaactttctcaacaaccacatgagctcagaagaggaccccaaggccttagatgagactacatttccagccaacagaccaattatagtctcaatagagcagacatctatgtcatggccagacacctaactcccagtaaaataataaatgcatgttttaagctgttaaatttgtgcaaatactgtcactaagtgacagattgttaatacagcagaagatgaacactcaaaagatctagtgacccaacatattgaacttatactctaaaaagaaagatagagtaaacaaataaaaataatttcaggtacggatacattttatgcatggaataaagtgagccaatctgtgcagtcaaaatcattgtccctcctaagaggtggtaaatgtgttcctgttgtgtaaataaaccagggatggtgagcctaacccatatgaggtgcaatacctttctgctgagtgaacattacataaaatagtttaattcctattttataattactgtaaaaaaaagaaaattgaaaacttctgctattacattgacaatattcctcttctaccttgagatttgatggatataaaacacaaatacccagtgctattatgttctgatcatttatacacttattttatctttatatccatataatgtaggtactgttaccatctccattctaccaatgaggaatggagactcagaatggctttgtatactgcccaagttcatttattcactaagcaatggggtcaagatttaattttggcagacttgttctagaattcgtgaagattcttgttggacagtcaactttacaattctgccagtctggaattattctgttgccttcagtcagagctggaaatttgttgggttattactttttcagttattcaatttaaaaaattattaacatagtttaggaagtaattgtttatttttattaataaaatattgttatagtcaataattatgttttaaaaatattaatgcacttcttcataaccataaattttaatttccaccttaacatacaatatatggtttaaatgttaagtataaactattattgaaaatgatggaactgaaacacagccttgaaa

SEQ ID NO: 477935 - DNA, 1944 bp, Homo sapiens
gagcatggccagagtggacaccgaggccgaggagacgcggagagccagcgagggctgctattgtcacctctcatttccatcaggcctgctgactgaaacacactaacaaagacaaacgtaaacaaagaacgggcaccaaagcaagactaaatgacacaaacaaatggaaacacatcccatgctcagggatcatcgcattttcacaatctgtattgtgaaaatgaccatactgccaaaggcaatctacaaattcagtgcaattcccatccaaataccaaaatcattgttcaaagaactagaaaaaacaatcctaaaattcatatgaaaccattaaagagcctgcatagccaaagcaagactagcaaagagagcaaatctggaggcgttgcattacctgatttcaaactctactgtaaggccatagtcatcaaagcagcatggtactggtacaaaaataggcatatggaccaatggaacagaatagagaacccagaaggtgctgaagactgtacaggaagcatggcagcctgtgctcctggagaggacatagggagctgttactcatggtgaaagagctttaaaaagggaaattataggctagttacacttccagttggatgagtctacccacctgggcaggatagcaactagtccatattgtgtgattctttgggatttaattttagagaaaaagagagctagtttcactaagctttctcccatcatattgtggcacagatattagagtgtacttaggcatacctgagctttcagccaagttgatggctggggtggcagggaaagaaagtaatatgactccgtggaaaatttccctatatgagaaatattacctgtacatttttattatgacatgtatcataatgtttgggatataataataccaacataattattactaactacctcaaaaaaacgaatattttaattactgtttagaaacaatgcaacaccggaagccctttctttctatatccccattccagtcacacaaaagttaacattgtcctgaattatatgttaagcatgttcttctctttcttacattttaaacatgaatgtttgtgttgttaaaatatatattatatatgtttgttttaggactgtatataaatggaaacatatagtatttatttttttgactcgatacgtttgttcattattatctacagagaaaaatccatgttcaattatactttcattttctgagctatatagtattccattccaacataacagatccaatcgttctgctatgaataaacataatacattagttcatagtgcttagagttcttgaatgaatatgctaaggagaaacatttctgaatgtaggataatggcatgtttaccattaataacattttggtttccatggttttctctttgtattttacgaagtgattgagagtgtctgttactgcattacctcactatcatgtggtagcgttagacctgtaatttttttcacttttgtagattatgtaatggaatttcactgactttacttgaatttctctattactgatttaagttgagcttatatttatttgattatatcagatgtaaaagtgcctattcatactatttatacttttttaaaatgtgagtagtctttttttatttgtaggatattttattttattctcaatgtcaattatcttttggtcatattttatgcaactatcttcttcctgatatagcttgaaattttattttcttttattttctttgatacatatactcttaatttaaatgcataattacaaatatataaaattactatgtttatatgaccatgtttgtacatattataaatatagccagttttcacaacttgtggcttcagtattgtgaattcacttattaaaacttatttgtaaccctaaaattaaatgtttcttcattgtcatttgcagacatttt

SEQ ID NO: 477936 - DNA, 597 bp, Homo sapiens
gctttacagctgacattacaacagcaacaagaaaagtttcagcaatgcaccaagattgtcttgtgctcagacaaccaagcagtctcttgttgtctgacgtaatacctggagttctttgtcctacctccaagaacattaaggagagcagagacaaaagtgagtcgtccccagtgtatgttgttgacatctttgcatccatgagtaccaaatgtttatctcctacttctaaaacacctacaccttatttgtttggagtagtagtgttcagcaatatttattttcaagattggactcacagttccacatggctggtgaagcctcacagtcatagcagaaggcaaaggaggagcaaaggcatgttttacatggtggcagacaagagagcatgtgcaggggaactgccttttataaaaccatcagatctcatgagacttattcactatcatgagaacagcacaggaaaaacacacccccatgattcaactacctcccaccaggtccctcccatgaaacgtggggcttatgggagctacaattcaacatgagatttgggtggggacacagccagaccatatcagtctttaatgctgcctctgc

SEQ ID NO: 477937 - DNA, 895 bp, Homo sapiens
ttttggtggataagctttttgatatgctgctggatttggccccagcgtatgctgttcctgctcatgtgttctcatcatgcaactcccagttgtagaggctggaagagtatggagggctcagaagaagacaggaagaagagggaaaatttggaacttcctagagagttgttaaatttttgtgaccaaaatgccaatagtgataccaacaatgaagtccaggctgaggacgtctcaaatgggaatgaggaacttattgggaactggagcaaaggacacatttgttacaccttggcaaagaccttggttggattgttcccctgccctagggatctgtggaactttgaccttgagagtgatgatttaggaaaagctgcctttattcatgactctaaacattttaatctgcattttctgtctacagcatccagccaagatcctgctaaagtgtccaatgacatctctatcgctaaaccaagggaaatttttctctgagagcaattatggtcaatgaatttattttctccataataaagaacaagatcatattagtacttgagaattcaatcggcataataggcctttcagtcaatgtattccttctcaagttgccttctatattaagatctcctttatacttatcacaatagaaaaaaatatacatggcatttcattttaaagcaactttcatctgcaaagtcatctgctatgaaaatcctattgaaacaacacagcatattcctattactctacactcagtgcatactgtttacttttgtgagtcttgctatattattattaaagtctatggtgatatatgttggctcatttagtttagtatcttaaagatcaatgtatctaactcagtaattttcccagtagcacaggtattgacgaa

SEQ ID NO: 477938 - DNA, 1010 bp, Homo sapiens
cagagaaaagttaatgcagaggcaatgaaatatgaagatgctatcattattttcagaaatccttgcagtttccatggtaaggcaatatgtcatattattaggttcattgaatatctagtaatggactgccctggatccattgaaggtttaacatatcctctattcttgactaataaacagaataaaatattcatcaaccacaaagttggtgctgatgatcatggcaccagaaataacaacaggacaaagcaccatcaacacttaatgaagggaataactgtgagaagtgaaagaataagtgataatgatgatgatgatgatgatgataataataaaaataataatgatgatgcttatgcaggaatagaaattcttaaacttatcaaacagaaagaggtctggagctcagtagcccagtggtttccaaccctggatgcagaaaagccacagattataatccagtctgtgaaagataatctagcaaaaaacaaaacaagaacaagaattcagagctttacacattaaaggtgtaagcaacattgtaacttccatatcaagtgtaataaagttctcatttcaggacacatttccacatttctaaagaaagtgacaataaaacatcaacagttcttggatgttgaaacatagccaaaagtgagaccatcaggagaagggcctaagaagaactagattaacaggaagaaggtgaaaaagtgataataaatcttttaatcctgccacctacacaggcgattctccacctaccagaggtgagagcatatcttactaggtcactaacagcagcaaagtctctgaagaaggttttccagttaatatgtggaccaaaaaagcacaactggaccaatatataaaataaacacactcctttactacaacaattcgggaaactaaattttcaatgatggaaggaatggttatatggttaaaaccaaatgctaatgttggatacttttattaattcaataaatgaatattcatttatttattta

SEQ ID NO: 477939 - DNA, 3125 bp, Homo sapiens
tgggaaactgctattcgatgggtattaagtttcagttatgcaaaatgactgagttgtatgggaaatctcaaggaaactatagcaaacgactatttctggaaatccatagaaacaaaaaagagttgctggccagatttactaaaggttctatatgtctttatcagctttctttattttactgctcactcttgtccacaggcattcataaagctttatctagacaaattcacaaagacagcaacaataatgatgctgccgtggaaaaggccaaaggtaaagaagaggttgccctagttattgcagtgaaggccatcccagagcagcatcagccaggtggtcacaagacatgtgagtggtcccagccaagatcaagggagctgaagagtcacctggctagtcagaggcactgggtcaagatccagtcaaaaaatacagaaaccatgctggatgtttcaaaaagaagggatttaatacgggatatcagtaaaatagatgctggaaggctagaggcataagaggaaaaggtaattgtcaactttttctttctcaagctgtgtgttgtaactttataggtagaagtgtgtgtgtgtgtgtacgtgtgtgtatgtgcacgtgtgtgcatggcagggtggacggtttggagtcatacagtatagaggacaaaacttgaagccagacaactcgagtttaagtcccagatctggctcttttatctttggcacctaaagcaaataaattcacctttttgtgccttaaacctctcataagtaaaatgttagtacttaacgatgttgtattcaattagttgatgcatatgtaaagttatttagaactgtatctgccgccatgtagaattaacactatgtaaatgctacctgttatttgtcttgtgaattttgtcatagttttaatttttttctacaatttaatttttcctgtacatttttttcatgtttagttttccataagataacatgatatgtgaaattaccaaatattccattctatggcttaatatatttcatttattcatccattcactcattctaatctaagtttcccagcagcagcttagaatcactcaattgtaaataatcccatatgaagtggaaataaaagcacaatattcacaccagttcaaatacctgactgaatatgtccatcattctctctgaagactgcaccaaaagatgtactgtttctctccaacatcgtactcaaatccttaatcatgtaactaaaacctcttcctgagaatctatatattagaatgattgtaaaagtggcattatctctttctcactgagaatatgcttctcagaagaggaaaattggctccaaatagagcttatattttacttccctcttttataacccttagatgtttcaaggggactatgtaacagagtcagtcacttctctactaccaagactaatgattaaagtataaattgcatgaagttcacaagtcatcagagactattatatatgacagagattgatactatatctttcactggttggcctatagcacaggaataaaatgtacatatttcacagattgatactttagcaaaatcatagtaaaatggtttacattacttctaagacaattctaagaatatttgcatatactgtgtacctgtgtgtggaccgtatgtctatatattgcatatatgagcactacttaattttcttgctgtcagaaaaataaataaataaatttcccttatcagaacgtcccattcctcatcacctttccagtttgccttgtcctgtgcaattaactattgaatattgcatacaatgataaatgatttattcaaggcctgtctctccccaaatttaaatgcagcaatacccaatagtggtaaaataaatgccaagcctttttactgttaccaaaaagtttctggctatgtttgagttttatttcttctttttaaaaaattttattctaacaaaatgcataggattttaaatgttcagttcagtgtatttgacaattatatatgactatgacctgtgtaatgatcaaataaaagaagatttagcacatttctgtcaccacagaaagttcttttttgtctctttccagacaattttccctccaaaggcagccgctttctgacttctgtaaccgtctgtcagttcatccctttgattgcctggcatcatttgctccgtgtagtgtctgcaagattcctccattctgctgtgtatttcagtgatggattcccttattgctgggtagtgcttattatgtgggtttaccacaatgtgtttttctcttctcctgctgataggcatttggtttgtttccagatttagtctattacgttttagagttattgattatagattactgttccatagtgacatatgcatgtgtgcgttcatgtgtgcgtgtttatatgtgtgtatcaaacattgtaaactaattgtaaatgaccaattcatttccctcatgaggagaaattataaattttcatcttacctagttgaccatttgttttccatcataattacttctttttgtatcctgtctgaaaaatgatcttcctatcccccggtcacaggggaatagtttctatattttcttttacaaaacatggctctagaatttatgcttaaatctatgatgaagcttggaaaaaatttatttatagaattagctaggggtcgacaaaatattttaatatgaatatccacttaatttagtatcatttgtcttgacatctatgcaaatattttaataatatttacacaagctgacttttgaactctataccccttagttaaatagattagtttagaagataagtttatgtgtcttaaaagcacatcatgtcacattcatctttggacaatatttacttaatacttacttaaaggtatattgtataatatgatagttgttatggactgaattatgtgtcttcaaaattcacatgttgaatccctaactcaaagagcctcaggatgactgtatttgaaaataggacatttaaagaggtacttaagttaaatgagtctgttagggtgggcataatccttaatccaatctgactgttgtccttatatcaggagattaggatacacaaaaagagacacgagcaatatgc

SEQ ID NO: 477940 - DNA, 3353 bp, Homo sapiens
cctcttcagtgcctcttttagcaacatgaagttaaaaccaggtactgtggttgctcacctgatttgtggttctaatgacaatgctcttttgtgtgcagataatttcagaggatgtatggaaatgcttggatgctcaggcaggtttgctgcaggggtgaggctttcttggaaaatctctgctagggtagtgcagaaagaaaatgtggggtcagagcccccacacggagtccctactggagcactgcctagtggagctgtgagaagagggccactgtcctccagaccccagaatggtagatccaccaacagcttgcactgtgtacctagaaaagctgtagacactcaatgctggcccatgaaagcagccaggagggaggctgtacactgccaagccatagagtggagctgcccaaaaccatgggaactcacctcttgcatcagcatgatctggatattccaagtaatatatagtctttctccaaacactcaccattactagctgttttctttacttactctcttttcatactcttcaccaacacctccttcccaaacctgggctgcctgcacatggatcattcttttttcctttttatatggtctcctgagaaggattatctgttttcttatctgaatgtgtttcttctcaggaataattttcctcatgatctcttgaatatgtttttcgtattgttgttaaataatgtatgatgactaaatgcctacattttctaagaccaacaaatttttataattgtacacatatttttattttctcttaatgcaaattttcaaatggtcaaatgaagtaagagccttgctcaatttattgacctgcacttttactcctcatctctattccatgctgaagtagaagaaatcaaaggattttcatgaaatcctgtacatgatttaaaattgaaaacctatattttatatgtaatttgtgctttagtttatcattaaaatattaatcaatactttttcaataaaaattttgatccactttggttcagaagcaaatttagagtcatgtgatgacaatgatccatgcttacaggactgctagttatatatggattattcctaacaacttaactactggtggtcttcttattattcactatcccatacatttctaagtcatgttctccagctaataacaatgaaactttcatgttaatcttagctaaacttgttggggaagttatatcttctgggatgaagtaaaaaaaaaagttatagaatgcatttgcaagccatatagaaataatatgtagatttattagctttgggcattgtaactcacttttcctctattgattcaaataattcaaataattatctgagacagtttcattaaaaaataatgaataaactcaaaactcatggaatttctggatctaagtgtagacttatagtaaagttgtaaaatcaccttgcttttgtagtctgaccatgatatgcatggcaactggaggaaacgtttgaaccagaatgaagtgaacaagcaaagattttattgcaataagagataataagaaaaattcagtttttaagctgtttctctgagcaatagccaagggctataaaaacatgtctgttgaggggatcatggagacagaatgtggctgagagagacatgcaatagagtcgttgtattggtccattttcacaccctgagaagaaacatattcagaaggggaaacagataatccctctcagcagaccatataaaaaagaaaaaagaacgatccacgtgctggcagcccaggttttggaaggaggtgtttgatggtgaggagtataaaaagagagtaagtaaacaaaatagctagtaatagtgagtatctggagaaagaccataagttacttggaatctggggagaagccagggaagattctgaaaaatcagctttcaaaatgattgagactacagagagataaattcataaaaggtatttttttctttgtcttctatatcatgcaatgtttaactttgccatccacatttggctacaacagactatgtattttggttgtttgcatagatttcttcttattgtgattctgtgctgagatggatcacagaatcgctcaactttaatactgttgtaattaccatttatagctaatatctataaataagtaacaatcatgtaatatttaatatattcacataaatatacataaatcctgttccatgagaaatacaatgtgaaaaacatttcaaataccctaatgtacatagtttagtaataatactaaattaccagaaaattattggtttaatgacaatcacaacataaatgcacactttttttttgatagaacagttttaaatttcacacataaccactttcatttttatattaaaagtgaagatcctacagaaaatacaatggtaattgtgctacagcaacctataaaaaggataactagaaaatatgactttgcacgctgtatactgctatttcaatttcgtggcttatacattttaagaaattaaactttattatttcaagaggaaatttatttaaaaatcaatcgaagaaaactaaaaattgtataataaaatatagatattatatggacattcacctaaatgtgatattaataatacaaatagttgaaattgattacatagggaacaagtattcatcccataacctgtaaacaacatatctttaagagtctcatgctctactgactgagctagctaggcagtcacaatattttaaaattaaccaaaacaaatcaataaattaaaaagtatatttaagtatgtcatgtttttctaattatttattcatctatatattatttgtatatgatttatacatatatactgtaggtatatatattagacaggtatgttttttacataagtgtggggagagagaaaaaggaggtatttactactacctagtgatactattgctagcatccaaattgataggtttaaaccctagataaatgaaaaactttccaaggttattagggagatgaaccaccagaatatattcttattcttatgtaaactaatgcagtgttaacatatttcaaagcattgattatgttacagttttatatttcttcctcacaacagcaagaagagtaggaattatatactgtgcacagtgatgtttttgcttctctgaagagttgaagaataccatatttaatcacagaatatgaaatataataattcacatatgaaaaaatatgcaagacagttgaaagaaagaaatgaaaaattaaaaggcaggaagaaaaaagagaaggaaggaaggggaggaggggaagaggggtggagggagggagggaaggttgttagcaccacacaagcaaat

SEQ ID NO: 477941 - DNA, 782 bp, Homo sapiens
gtgagccaagaaattcaccagatgtccaggcttccctttcttcctctccccacagaaacaagcaccagtttgcgtgtgggggtgtcactgtccaaagatttgctaggagaagaatatgaatttatgcttaaaagggaagcagatcataaaagcttggcaaatttgcagcctatccatgtggtagaaaagaaaaacccactttctggggagaaattcaatccagctgcaggattttccataagtagcaagaggctgagtgttaagagccaggacaatggggaaaatgtctccagggcaagtcagagatcttcacagcagcttctcccattacaggcccagaggagaggagggaaaaatgattgcatgggccaggcccagggccctgctgctctgtgtagtcttgggacatgtggagctataacaagagggccaccatcctccagaccccagaaaggtagatccactgacagcttgctccgtgctcctggaaaagccacaggcactcaacaccagcccgtgaaagcagctgtgggggttgtatcctgcagagccacaggggtggagctacccaaggttctgggagcccacttcttgtatcagcatgccctggatctctttgagaaaccaccgtattgctttccacaatggttgcgctaatttacgttaccaccaatagtgtataagtgttcctttttcttcacatccttgccagcatctcctgaatgatataccatggaatactactcagcaattaaaaggaatgaaataatagcatttaaagt

SEQ ID NO: 477942 - DNA, 1911 bp, Homo sapiens
tcctgaagacttctgaaatggcttcaaagccttttccaattgttttggacattggcacttggctttagtcatgcaagtctctctagcaagtggcgacaagcatctaaactatatcaacttgtccaagaatggctacctgcaggaggaagaagctggcatctgcaaggctctacgaaaacagattacaactcagttacttgaggcaatcaatactgtccaatactgtcaagatttggactcagcacatcatatgtctgagcagttcagcatcctcactcacaagtccaaggctctcagcaatgtggaagaagatgtgattcctaaaattaccacccttacacacagtgacacactcaccagaaaagggcaagagaaggaaggcaaagaggacgggtccatacttgaacaacttgaaataacttgtctgcatttcaagaacaacctaccagagaccttacctgtcaccttggctctcccacccaatggagatggctctaatggtggcacaaaccaggaaggggaaatctgtggtttaaattctttatgcctcatcctctgagtgctgaaggcttgctgtaggctgtatgctgttaatgctaatcgtgataggggtttttgcctccaactgactcctacatattagcattaacagtgtatgatgcctgttactagcattcacatggaacaaattgctgccgtgggaggatgacaaagaagcatgagtcaccctgctggataaacttagacttcaggctttatcatttttcaatctgttaatcataatctggtcactgggatgttcaaccttaaactaagttttgaaagtaaggttatttaaaagatttatcagtagtatcctaaatgcaaacattttcatttaaatgtcaagcccatgtttgtttttatcattaacagaaaatatattcatgtcattcttaattgcaggttttggcttgttcattataatgttcataaacacctttgattcaactgttagaaatgtgggctaaacacaaatttctataatatttttgtagttaaaaattagaaggactactaacctccagttatatcatggattgtctggcaacgttttttaaaagatttagaaactggtactttcccccaggtaacgattttctgttcaggcaacttcagtttaaaattaatacttttatttgactcttaaagggaaactgaaaggctatgaagctgaatttttttaatgaaatatttttaacagttagcagggtaaataacatctgacagctaatgagatattttttccatacaagataaaaagatttaatcaaaaaatttcatatttgaaatgaagtcccaaatctaggttcaagttcaatagcttagccacataatacggttgtgcgagcagagaatctacctttccacttctaagcctgtttcttcctccatatggggataatactttacaaggttgttgtgaggcttagatgagatagagaattattccataagataatcaagtgctacattaatgttatagttagattaatccaagaactagtcaccctactttattagagaagagaaaagctaatgatttgatttgcagaatatttaaggtttggatttctatgcagtttttctaaataaccatcacttacaaatatgtaaccaaacgtaattgttagtatatttaatgtaaacttgttttaacaactcttctcaacattttgtccaggttattcactgtaaccaaataaatctcatgagtctttagttgatttaaaataatttttatggcccattttcttttgcaaagtacaaattataattccagaagctatctgccaaaaaaagacaatggaagaaaattatgaggacactaaagggaacattcctgactcctaggacacagtattctcatgt

SEQ ID NO: 477943 - DNA, 1311 bp, Homo sapiens
tcatcagttaaggcaggaacaagccattttcatttcttttgtggtggaatgtcatcagttaaggcaggaaccagctatctggatgtggggattcgaccatgactgccttacataagcaggatcaaagtccatcatgggactggattccagagaacaatgatggtattgacttcaatgtatgtgggaaaagattggactccagaggcaccgtgattttccttgctctcctggatggtgctgcacagcccacgggggctctggcggctgcatacatgtgcaagtactggaaaaatcggatcacatgtgggcttggaggatgggtgcaaggttttattgagtggagtgtgttcctctcaacatccagacacttgtgtgtgcgcccgctagggtctcagagattttatgggcacaggatggaggatgtgatgggccagagtggtcttggaaaatgcaacatttgggtgcagaaacaggagtgcctgtccttacttaggtccctgggcacaggcctgagagtgaagccctcaccagggaccctgcccttctctatccagcatttccctatctccctcctgtatcactgatatcttttactattgagtcttcacatccagaaacataatttggccttctgttaatttagagcttcttttattttcttctgtaaaaatttacagcattctttatattatatgtttcttattgaatttaattatgaacaggttatactttgttattatcatgggatcttttaaatacattctaattggttatgacaggtttaaaaagctactcttaatttttctgtgttgatcttgtatcccaactaaatcctgtgtttgttctaaatgcttactagtagtgcctcttaggtgttctaggtggctactcatagcgtctgataacaataatagtttgtctttttctttcctatatttacaccaatttttttctcctaacatttaaaggttttttttttttttcagtttcctgtaatgattatttattgaatttggaagatctccattgtggtgttaatttcttaaaagcttagtgtttcttgcttgctcttatttgttgctgaggacttagattaaacagtttattgcttttgaagtatattttgtcagtccagttgagggactgagtctcagtccagatgagggactgccagtttgtctagcagttgatacaaactaattacctctggtaactttgcaggagctgaaaacagaagtgtgactagtaaggtgtgaaggtggcttgatttctagatatgaggctcttggtgcttgttggctgacagacact

SEQ ID NO: 477944 - DNA, 764 bp, Homo sapiens
gcattctaacattttcgtcctaggagaagatcctgatcttacctggagctgagtcaatttagagagccaggcaagatgcaggggtacaggaagccatgggaaagccctgtaggctcggtgggtccccaaggccattcttgcctggcattaccgggattcttcaggaaggtggccagaggtgcagggaaaatgccacagggagaaggaaatctccagctgcactttgaagaagagaaatctaaaagtctggaaaacatatttgttggaataatcaaggaaaacttctccagctttgctagagacctagacatccaaatacaagaagcacagagaacacctgggaaattcattgcaaaaagatcatcatgtaggcacattgtcgtcaggttatctaaagttaagatgaaagagagaatcttaagagatgtgagacaaaagcaccaggtaacccataaaggaaaacctatcagattaacagcaaatttctcagcagaaaccctacaagctacaggacattgggacccaatcttcagcctcttcaaacaaaataattatcagccaagaattttgtatccagtgaaactgagcatcatgtatgaaggaaagatacagtctttttcaaacaaacaaatgctgagagaatttgccactaccaagctactactacatgaactgctaaaaggagctctaaatcttgaaacaaatcctggaaacacatcaaaacagaacctctttaatgcatacatctcacaggacctataaaa

SEQ ID NO: 477945 - DNA, 639 bp, Homo sapiens
gtctgagagaggagatctacagggagatgatactctagctatgatggcaaaatcggtcccagcactaatgcatcgtcagtattcggtaattctgaaaaataaaagtaccgacattaagaaatattcactgacatgtggtcgattctcggatatgaatccgatgtttgatggaaacagcattgagtctataaattacttcgggctctatggccatttttacaacattgattctacccatcccagcaacaccaatatcatcgttattgctaccattaccattatcagcactatgaatttcactgccaacaacattggattcatcggcaccactactgacaatgaaaaactcattaccaagagtaacaagtacttaattaatattaaaaatgaagatctacatgttaggtgtgctcttttctactggggtatctttgcttctggacatttaagatgcaaaggtaccagtttaccttcacattccttgatctaaaaaggtacacatatttaaaacaaagctttagtacatatatgtcaaattgtcgatttctgtttcagtttcccaactatcttcatcaactttaagcattatatatctgtgtatgggccactttttgcgataaacgcaacttgtgttagttt

SEQ ID NO: 477946 - DNA, 1088 bp, Homo sapiens
ttgccaaaattcacaccgctggtccaggtttgaagcaagcagtctgtacctgcagtccttgtctgtaaccatggcaccctggcttctcacacatctcatcgtggaattattaattctacttcaaaatgccacacagccttcatgtgataaaatgaaacaattggtgagtctaagcattgagaaaaaacgttcttttttccactcccgactccattccaacagttgggacagtgttttctctgtgcctgtagaaacctcagctcctgggctgaggagcctgttccctttggggaatgtggcagtcagtcccacagcacagggtccacttagacactgtatcctgcgtggtcccctttcctgctgggaagcagatatccaaatgagcagcagaatcctgtctctcccttcaggcccctctgctccttatgagtggtgttttcccttggttttggatgagaaacaccctttccccttccagagggattgtttctgtggaccccaccctgagttttcccctggttaggcaacgggcaggtgggggtggtggaaccaactctttagaaccagcaatgacaaacagatcccacttgggggaagttgatgttaagtgtcatgggtcctctggaattttctgaagctttcctgtttttttttttctccccctaaccagctcaactgatctcctgggatctctactaagatgttggcagcccggccagctggtctggccctggacgtgccttcatggtctggttatgcttcatgacctgcactgtggtcagtgccattttgcagactctgatcacagtgaaacgttccatgggaacttgggccatgagaaacatccttcctaaccacgtgactgcagaaacatccttatcgcgtcctcctgggcaaaggcccaacagcctgactgcagggacatccttgccatatcctgctgggcagcaagctctaccacccagatccctccctcccagtcccatgattaccccagcctgtgagtggcagttggtgctggcactaagctggtttcctcctccccagggttttgctggcaataaagatgttgctgttgaagccaccaa

SEQ ID NO: 477947 - DNA, 1106 bp, Homo sapiens
gagggtcctggctcctcatctcactcgggtttatgccaaagatgtacaatttttggttcagatgcctgagtcttaatgcttcaaggtgtagaccttttactcactgctgtagccattacaatggggccaaagggaaaaacagtgattactgagcagaactggggaagtcccaaagtaacaaaagatggtgtgactgttgcaaggtccattgacttaaaggataaatataaaaatattgcggctaaacttgttcaagatgttgccaataacacaaatgaagaggctggggatggcactaccactgctactgttgccaaggaagtcttcaagaagtttagcaaaggtgctaatccagtggaaatcaagagaagtgtgatgttagctgttgatgctgtaattgctgaacttaaaaagcagtctaaacctgtgaccacccctgaagaaattgctcaggttgctacaatttctgcaaatggagacaaagaaattggcaacctaatttccgatgcaatgaaaaagaaaatttctagtgtccagtccattgtacctgatcttgaaattgccaatgctcaccgtaagcttttggtcataattgctgaaaatgttgatggagaaactctaagtacactcattttgaataggcgaaaacttggtcttcaggttgtagcagtcaaagctccagggtttggtgacaatagaaagaaccaccttaaaggtatgacaattgctactggtggtgcagtgtttggagaagaggagttgacctcaaatcttgaagatgttcagcctcatgacttaggagaagttggagaggtcactgtgatcaaagatgatgctatgctcttaaaaggaaaagaaatcattgagcagttggatgtcacaactagtgaatatgaaaaggaaaaactgaatgaacagctggcaaaactttcagatggagtagctgtgctgaagtcacgttgaagtgaatgaaaagaaaaacagagttacagatgcccttaatgctacaagagctgctgttgaagaaggcattgttctgggagggggttgtaccctacttcgatgaattggtgccttggactcattgactccagctaatgaagatc

SEQ ID NO: 477948 - DNA, 1332 bp, Homo sapiens
tacttgtggccagcagttcctctttgccttatatctgtgagtttggaaactcttggataagcagttaagttgtccaaagcagttggaaccgttgcggagggtttggcaggctttggatgcatttcgagtgggtatgtggcaattgcatacatacccattggtctgggtgcttgggctgcagctggggctggggctgacgttggtagtttcacagacactgaagacttggcctgctgatggggagttgcagggcacagaggagtttgacgggtcacaaccagtggtactgcaggtcttgggctcacagctgggagatttgcagtatttgttgtgtgcggaagtccgaataatgcacccacccaagagggtcacattccagtactgggaaatctgtgaatgctacgtgacacggcaaaaagggactgtgcagaagctgctggtttcacagtccagagcaagatggacgacacgtgctgaacacatgggtcagaggttggcaaccactgaacagaggccccagaggtctgaggctgctggacacaacgtgaagactttgaggacgataggccaagcaactcgagggttggcatccagaagtgaggaggttttggggctggcaactcttggacaagcagaattgggggcgataggcattgggcacacagtctcctatgggctggtaactattgagcagcggcctcagtggacgacagccgctggacacatacctctgtggtctacaggatactggaaggcaggaactggagaagaaagaagcaggaagaaaactgcttccttggcaaggcctgggcacgtagtaagcagtggaagaaccgcaagaggtttcaagattgccggtctcacagtggaccggctggcagctggttggttcaccgcaggtctcttggcagttgtctgtgacccaggtttcttggcagtagttcaggagctggattctgccatagctgttcctggcttagcagaggacatctctgagggtcacatgaaaaaaggggctattagaggggatgacagccccatggcaataacccctgagggaatgacagctgtggttttcacctgagcaattattgaaagacaagatgaccttagtttagattatagatattgcatgttttacaaattaaagatttgtggcaacactgagtcaagcaaggctatcggcatcatttttccaatagtgtgtgctcatttcatgtctctgccacattttgataactcttgcggtatttcagattttttcattattattttatctgttatggtgatctgtgatcagtgatgtttaatgttattattgttaattgtttc

SEQ ID NO: 477949 - DNA, 1886 bp, Homo sapiens
tttatagaagcccattggcttctctctctctctctctctgtctctttctctctctctctctctctctctctctctgcagaaataaggtttggcactggcatgcccggagaatctccccacacactaggcctgatgacattaccgatggaaatggatgtccaaggaaaagaccccagggagcggcagctgctggatccaaagcctagagacccagaggcagtgcagaagggaactgtggggtgtgagctcccacacagagtccccactggggcactgtctggtggagccatgagaaggccaccatcctccagaccccagaaatgtagatccaccaacagcttgcattgtgtgtgtggaaaagccacagacactcaatgccagcctgtgaaagtagccatgaggactataacctgcagagccacaggagagaagctgcccaaggcattaggagcccaccccttgcatcagcgtgtcctggatgtgggacatgaattcaaaggaaattattttggagctttaatatttaatggctgtgctacatggggcctgtatcctttttgttctggccaatttctccctcttggaatgtgaacatttacccaatgcctgtacccccattgtatcttggaaggccttcaacaaatatgaggaggtatacccctattatttatgaagggctatctgctttcctcaaagtttactattttaaatgttagtcatatgtaaaaaatgcctttacaacaacatctacactggcatttgacaaactactggctaccatagccttgccaagctgacacgctaaaggtaactattgtgagtggttattcattaaggctttaatcagtgtcatcaaatcaggcattaaagtattagcaaacagttatttcatcagaaagatgattatttgtcattctagtatttactctttttgctgatttatcatgtcttcattttgtttcaataatgttaataatgtagaacttgtacattaaaatatgtagatattttaatatcattcatccaagattaagctatatttaaaatcacaagctttaatatatcgacagcactaaaaagggacaaaaataagaaactcttaattcatgtctttgaaaaggtaaaacaccatctgagaaagacattagtcttatttatatggattagaaaaaaatattagaaaatatatacaaaacagtgctattaaatgtaagctaagtcacgaaatactctatacctcatcatagtggtgaggctctgtctaaattcatttaccaaaaagtgcaaattgattttctataattttgatatatttactataatagttttgagaactctttactttggaacatgtggctataatccatgttatagaaaaccacatttgttaagatgtatttgttcacttaaagcttttgtgaatggtgctatagtatatgaatttaattcactgtacttgtgaacattaatatcttgactatgatgacactgaactaacaaaagttaactcattctagtggtgtgaaactccagaggttctttagagctagaaacatacctaaaagcattcctagttctttttttaaaaaaaaatcatgtaaaatggattagagggcctaatgcttaatttaggaacacaatgaggaatctcaattataaaaaataatagtagataacatttaaaaacattttatgcgcatttaaagcatttagccaggcattgtgctaagcattattcatggcacataagttatagtatttaactcatagtaaatctgtaataatttgtatatccttcttacagatgagctacaatagcagaaatgatgtagtgtgatagttttacttgagtctctactcttaacctttgcatgtactgcctcagt

SEQ ID NO: 477950 - DNA, 846 bp, Homo sapiens
tgcctaacttcccttttcattctatcaacatgtggcatgcaaactcagaatcttctcagtgtaactcagctgaactcacatctcccatcaacatgtcctacaactgctgctctggaaacttctcctcccgctcctgtggtggctacctgcactacccagcctcctcctgtggcttttcctaccccagcaaccaggtctacagcactgacctctgctctcccagcacgtgccagctgggttcctctctctataggggctgtcagcagacctgctgggagcccaccagctgccagacatcctatgtggagtccagcccctgccagacctcctgctaccgtcccagaacctccttgctctgcagtccctgccagacaacttactctgggtctctaggctttggatccagcagctgccgctccctgggctatggatcgaggagctgctactcagtgggctgtgggtccagtggcttcagatccctgggttatggaggctgtggcttcccttccctgggctatggcgttggattctgccgcccaacctacttggcttctaggagctgccagtcttcttgctacagaccaacttgtggatcaggcttctactattgatcatcttgttaaattgctgattttgttggctaatgccttcaatgcctctactcataacctttattgtcttcatcatgtacagaaagaattagcctcttattctataattatcaagttctcagtttgtctttgtccccaaatactggctggcaggcttcatctgaaaaactgtaattggagaactagctcaaaataaatcttgaaatacacattaaaagtagaatttatattattc

SEQ ID NO: 477951 - DNA, 672 bp, Homo sapiens
aagtttctagagcagcagttgtaggacatgctgatgagagatgggagttcagctgagtgtacctaagaagattctgagttttaatgccgttgaggaaaccctgagtcaaagctggccgtcaattgtcttccaggaattcctatatcccactgtgctcagtctttgcttgggagcagcccagagaaagcaagccttccccaaaaatgcagtgttaacttttagaacacagcagtgtgatgttgcctgtgggtctgtcatagatggctcttatcattttgagggggtgcgactgcagagaatgctggctccatgggagcagcggccaagatgggcagggccagacttggcagttctgccgacaggtcccctgatgacaggcacaagcatcagccttgagggagagttctgtcggcagacaccaaacactcagaggcgggtcaggtatggaggtgtgaaagctcctcagtcccaagatctctgcaaagattttggccctggtaatttctaaatattttcacatgtatgtttatatatcaagacctttcttagatgttgacactcataatttctgaatattttcacatgtattttccttgtctagattttctaaacaaaagacattaattataaattgttttttcatttgtaagcatttgattttaacttatttaa

SEQ ID NO: 477952 - DNA, 1404 bp, Homo sapiens
tgcctgccgccacgtaagacatccgtttgctcttccttcatcttccgccatgattttgaggtctccccagccatgtggaactgtgaatccattaaacctctttcctttgtaaataacacagtcttggttgatggactttgcaaagtcaaccatgacttaattctccaggaaattccacgtgagtcttcagggcatcagaattcctgtttgcctggacaagaaaatatagatattgagaatgttaaagatgaggaggaggaagaagacaaaggagaaggggataaagaaaagaagataaaggagaggaaagggatggaaagggaggaagaaggtttaagggacaggaagaatgacgaggaggaggagggtgaagaaataatccatgtattttacaaaatatattcacataaaagtcaacattattattctgtggttgtgaaactactgtggaacaatcaaaccatcaaacggaaacttcatgaggacaattactcccatgttggtatcctggtagtctaattatgcttaagtaaataatgagacggttcacatttaaacggtgtcgtaaaatcaaaatataaactgcatcaaaatcattagcgcagttgttaattttgagttttctttaaaaacagaaatatataaagtatatataaattatatagaaatatataaagtatatataaattatatagaaatatataaagtatatataaattatatagaaatatataaattatatagaaatatataaattatatataaattatatagaaatatataaattatatataaattatatagaaatatataaattatatataaattatatataaattatatagaaatatataaagtatatataaattatatataaattatatataaatatataaagtatatataaattatatagaaatatataaagatatataaattatatagaaatatataaagtatatataaattgtagagaaatatataaagtatatataaattatatagaaatatataaagtatatataaattatatagaaatatataaattatatatattatatactgtatatataatttatacagcatattaggaatactcatggaattatttttcctcagatcataggattaaatgttgaaattctgatgacattttgaaaatatatcaaaagttggtcctctaatacaaaatactataaaatgagcaaaccacagtagctttcgattaagtcattctcaagtttactcattcagcatatatacattgtgcatgtactgaaaagggtcgttttaagctttggggatacactaatgaaaaaaaaaatgtcaagagaaaaaagtccctttcctatggaccatacgttattccaggtgagaacaataatatcagatattaaagtacac

SEQ ID NO: 477953 - DNA, 1810 bp, Homo sapiens
gtttgagaactggggtgagagggcgcggtgatgacctcaacaaccaacaccatgtgtggcagctactacagaaactacaatggtggccatggctatgggtgctgtggctacggaggcctgggctgtggttatggcggctgtggctatgggtgctgtggctacggaggcctgggctttggctatggaggcctggactgtggctatggaggcctgggctgtggctatggctccttctgtggctgtggctacagaggcctggactgtggctatggctgtggctatggctatgtctcccactccttctgtggctgtggctatagctttgataacaactaccatggtggccagggctatgccaaaggaggcctgggctgcagctatggctgtggtcttagcggctatggctatgcctgctactgcccatggtgttatgaaagatcttggttttctggctgcttctgagaaattagagattgctgatctgtttaggccattctcttatgagctatgttttcttcccgtgtttttttctgttcaaagagtgacaactaaaatttagcccacattgccaagtcagaatttatttgatcaattagctggaatttccaacaatttaatcaaacgaaaaaagaacctttgatgttgtgttactagtatatgattaagtacaaataatgttaagcattttcatttgggaaaaagtctaaatttatttttcttcaaaggtaatttattttgcaaacctacagcattttcctacctatatttatttatctagagtacctatattatttgtgattgtgtgtgtgtgttcaggagcacatatgtaaggttgctgacccattggaaacttacagttgatgatgtggatgtgttaggtctgaccaatagtactttgataaaatgtattctcatgggcagagccaagtggtactataatttactttgatctatcaaagcctcatcttcagtgtatccaatgtttgactaaaatcattggcaaaaatagtacctcccttctcatcactttattctgttgcacatacattacatttcttgatacttagttgcatttttggctctagatagctgtaactttttctctaaatcctatattatggctgtttcttttaactctgaaaaaatatactcttgaactcatcctatgcctggtggctgcatagacagcacttccaagtgtcagacccatgtggccacagagagtccatcaaatttaagtatgtttctgtgaaccttttatcaaggtcaatatctgctacctcaggtaatactttcttcttgaagacacaagtctgacccaaaatacaagctgaaaaatatagacttcagtttgccagccgtgctcaagttaagcaaagctgttctttattcactctacttattatttatcagtcgacattgataaaaatataaagcaaaaatatcttctaatctgttagtgactaatgttaacatttggagtttctacaactaataaaatattcatacaaaattactttgttaatggctattatagtatgaagttggctaaactcttaactagcttccaaatacatgattttttaaaacatctagatgaaacaataataaagaattttttaaaattcttcatcaattaaagacagacaacatatagagccgtatcactctgacatctccaagtattgacaggcagtgaaactgaagggagactgaagaaagcatctttgtcacagccttggcttttgtcctgccatagtgggcaggaatcttaggagtcagattcccagaatgtcctattttagcatgg

SEQ ID NO: 477954 - DNA, 929 bp, Homo sapiens
tgtgggtgggaaccatacacaaccatctttctggtggcctgggctgcggcttggctgtggctgtgactatgggaaggactgtggctgtggctgagtatggcaggtgcagacatggctgccactcatcttactctgccaggttctcaataccagaggaggactcccacttcctggaggataacaaagctcatcccaatgccagcattaggaataaaagtccaaacacttttgcccactgcatcttggtaacagagttgccaagggaaacacaacagcatcaagcacaggatggagcaatgcttttactcacatcagaagagacaagcaactactatggtggtctgcgttatggctatggagtcctgggcggtggctatggctgtggctgtggttatggccatggctatggaggcctgggctgtggctatggccgtggctatggtggctatggatatggctgctgccgcccatcttgctatggaagatactggtcctgtggcttctactgagaaatatctggcaactcaacctcgtggtctcttccacatggacttcctaaatttgccttcataattcttcatatgagtaattcatttttctgttgtaaaatgtcaacatcatccttaagtatctggaagaaaaaataggtcagatgctgcaagcctcatctagagtaactgaaatcatttgacatgtttcacagatttttaaaaagctttgttttgatattgtactgtcattaaattgttgatttttgatcaacttatgtgagaagatgtaaaatttcttttaataaacatctcattgaaagtatatttatttgttgcattttaattatgtttattgtgcatgtgtgtgtttgcattttggtgtattggcaaatggaatgggaaagaagaaaatatgagaaaaagaaagaacaattcttc

SEQ ID NO: 477955 - DNA, 750 bp, Homo sapiens
gacatttgaatgttaagatgcctctgtcccagtcttagacctcttgatttctccatttctatctgcttcactgtcatcctaaaagctcatttggtctcacaacttttagtagcgagaatgctgcaagccagctgccccttaaaggctggactccggctgctcctgtctgctgcttggaagctcttcctgcaagtatcagtgaggtctactcctttttctccttctttttgctcaatgaagcttatccaaagaaagtactttaaaaggaatgtctatggattttgtgacacctgggtattaaatgaccatggaatctttggtgacctggttgtggttatgcctccaactgtagttacagtggcatccatatttcttgacaagcagttaaggagcagagtccacaaccatagtcttccaccctgagatactttgaaatcagactgcctgaaaaacctactctcaaataagtaaagttggtttttataaccccctagttgtgttagttatatcatttatgttttgttatatcttatgttatgatcctgccaaacagctgatagactttaaaggaaaaaaaaatactgagttccatgaccttactcacactgatgccgaatttaacctttgtagctatgttggatgacatcacgtggaggaggcaaatgccatcctcttccgatcactttgctaataatacccttcttcttatatgcatatttaaatcttaatcaacacagctgtgatgttatc

SEQ ID NO: 477956 - DNA, 1039 bp, Homo sapiens
cgtcacataccagggcctcaaaatggtcgacagccccagcagccagagctgtatttacagccgtagggagagccgaatccatatccagagccatatccacagccatagccagaggcagagccatatccacagccatagccacagccagttccatatccagagccatattgacagccggagccatatctacagccagagccatatccacaaccatagccacagccagttccatatccacagccatagccagagccagagccatatccacaaccatagccagagccagagccatatccacaaccatagccacagccagttccatatccacagccatagccagagccagagccatatccacagccatagccagagccagagccatatccataaccatagccacagtcagatccatatccagagccgtattgacagccagagccatatccacagccatagccagagccagagccatatccacagccatagccagagccatatccacagccatagccagagccagagccatatccatagccatagccacagccagatccatatccagagccgtattgatagccagagccatatccagagccagagccagagccatagccatagccatagccagagccatagccatagccagagccagagccatatccatagccatagccacagccagagccatatccatagccatagccacagccatagccatatccataaccatagccagagccatatccacaaccatatccagaaccacaatcatatccacagacagaaccccaggcagagccatatctgcatatgtcctcttagatctgcctttgctgcatcccaacgttttgtgagtacttcctgggatcccttcaataactgaaatagatcccacacattattgcagtaatatcttaccactctaatgagcgcttctgcaagggtattactaatctgttgtctttctttctcctgctttggaaaccattttctgcatggactcccagaaatcatttaaaacttgatctaacagtaggtt

SEQ ID NO: 477957 - DNA, 989 bp, Homo sapiens
gcggggtacatgtgcaggtttgctacaggggtatactgtgtgatgctgaggtttgggaagcatcttcttgaaacccatctcaattctctcctcttgacaacatgtgttgcaactactacggcaactcctgtggctatggctccggctgtggctgtggctatggctctggctctggctgtggctgtggctatggaactggctatggctgtgggtatggctgtgggtttggctcccattatggctgtggttatggaactggctatggctgtggatatggctctggctctggctactgtggctaccggccattttgctttagaagatgctattcttcctgctaaaacatcactgtacgatggtgttaccaagaagagctcaagggggaaacttaaatcagaatgtggaaagagaaggctcgacaagtgtcagaaattgcttccaaagaatgataggaacagagccataaaggatgaggtagatttgaaatatcctcctacacctcaactgaaatctaacctcctgaaatcatgtgttgcaactactacagaaactgctgtgggggctgtggatatggctctggctggagttccggctgtggatatggttgtggctatggctgtggatacggctctggctgtagatatggctctggctatggaactggctgtggctatggctgtggatacggctctggctgtggatatggctgtggatacagctctagctgctgtggctaccgaccactttgctacagaagatgctattcctcttgctactaatcatcactacagtctcctacaagtgctcaagatggtgagaaaggatcagggctcttttatgttcccactccccaccctttctgtgtgactttcatactcatggttttaaagtggttgctgtgtatgaccaacattctgcacaagtaaggacaaatgatgaagagcatcaggtcttttaaaactttgtcctcttatttgggaagggacact

SEQ ID NO: 477958 - DNA, 645 bp, Homo sapiens
cgtcattcacagataaatgcaggtaaagaaatttctgcataaaccactccttatttgcatgtaattaaaagtgggtataaatatgagtgcacagctgcttctgagctgctaccctgggcatgctgcctataaggtagccctgctccacaaggagcagtacctgtgcttttgtacagagacctttggcagaaagcttagttgctctaaattacatgggtacgcggctgtttcagagactgaggaaatggagaagcaactctatctggtgatccactctgctgaggatcagctgtcagcctttttctctctgtggcttgtcgtactgcccagtgacaagttgacgaagaatagagcatgtgagacacaaagaaagaataatgtctacatgccccagaatgagaagtttgtctatagcaaaagagagaccactgctgccaccaagctacagcctgaccctaggcccactgtcccccgaattcaggattcagctgcagaaaaaaacgaacaactgttaaagaaaaaaaactcttcaaaggcacttgttaaagcagaataggaagtctttattcaggatcatcacattgggcatagcggtcactgcgtgacagattcttgctatgttgctcaggctggctttgaactcct

SEQ ID NO: 477959 - DNA, 558 bp, Homo sapiens
caccactggcttaaatcacaaggcattcattaactaatgaaccagaagtctggagacaggaggttctcagctctgttgatcagcccagtgggtggaatgctatgcttgagagggaaggaaatataacgtttctagattctatcatgttattaaaagacaaattgaaaagtgcctttaagatcttgattaattcacaggcttctgttcaaaaacttcaagtggtaaatatgcctgtggtatgtgcaacccagtgcacaatgcaggactgggccttggtgagtttcatttggtcttcagtacaaataagaaccaggaattatgcagatgccaggctctggtactataatgaggtgttcagcttccagggactgagcattcttgccatcctccttactcaactagaatgctggagcatttcgtcagaccacctgctccttaaatgtcaagactaccagcagtgtttgcaattctacacaatggatattctttagtaatgccaaaacaaatttcagagcatcatgtatttagtaacagggtcctagtgctgtcatttattcc

SEQ ID NO: 477960 - DNA, 633 bp, Homo sapiens
aatccaggagcaggaggagagttaaagtgtccttgtaagaagagcccgtggatgggagatgttgtcgcggtcaccgttggacgttttttctgccacgattcttgttcgaatggaagaggttgtccaacgtgatgatgtttttgttctgacagccaatgaatgtgtgctgatgtattcttgtgttttacatttttcatggttttatgtatacaatgagaaaggtgcccccagtcccagttgtaacctggcatccctgtttaatgagagagtacaaaagtcgatattttactttatggaagagtttttaagcagagaagtaagccttcaaataggctccacgaatgtatcagctctatttgtggaggaatattcctctgggaggaaaaatgtcttcaacagaataagtagaaaacaggataaaaatgaaaataagaaaaactgttgtggggcaatgggcctgtttatgcactggtgtaacgaaaggcttggaccagaaacagcagaagtgccaagctttctatcagatttctaaggacccttgatatgtttcaaaaagattcatgtataggagctgtaagaatctcccaaagaagagtcttgatctaaacactccccactcctctcctccttttc

SEQ ID NO: 477961 - DNA, 845 bp, Homo sapiens
ccagttcattatttgtgaggacatgaatccagatggcatgctggctctattggactaccaggaagatgacaaagttccactggggaatcatgaaggactcctagggctccggagcaacgccatgccatctacagtagaaaattttacactcttcattaaagagctcctggtgtgctgctgctggaccacggtagagatgaagcagctggacatgggacaccaagtgaccatatgcacctccagagctcagtggctgctgggaagcagctgccggaggttggcctggtgtcaccatccgtacaccatcatgctgcagtgccacaaccacacaaagctcagcaactccttcctctcccacatggacagatcaagagttgagatgaagctccgcattgccattgctgcacatccgggaggacagccttcatcaggaactgaatctgctagcactttcgttctggacttctcagtctccatcatcacgtgagtcaatttctcagtctccatcatcatgtgagtcaattccttagagtaaatctctatatatgtatatctgctggaacctaaatcttggattcctcagaacaataagaaagaaatgtctggtgtttaaaccgcccagtctaggtgttttgttatggcagtctgagcagacaaagacacagagggaagagatccaacctggagattatgcttttggattcatcatttaccagggcaattgtgctggtggacctctggggcattcttgagtgacttctcttagtttatgatgatgatagtcgtattgatggaaggtgtgaaagccaaaattcaccttgtacttataatgtgccaggcactga

SEQ ID NO: 477962 - DNA, 520 bp, Homo sapiens
ccagggggtcccctgaatcatcacgttctccaggaaggaggaggacggctcctcctctgtaaagcagatggttggggagatgatcacagcctactttctggctgccagggacgatttcgccatgcctgaagacgtctttgactatcacttccagggagttggaatgctactggcatctaatagaaaagtattcacaggcctaacccatacacaggactggggcataggaaagacgcacaggttggaaatgaatattaacaaatcttcagcctgtggagttgagatgaagccaggacagcacatgacatggcctaagacaatgggttgtccttgtgtaggtaacagcaccctggaggaatcttttgaaagctttggctttctcctcagaacaataacacactcaaaaatcgtcatatggcttctggttctggaatcatgggtttcacgaagtcctggactcaaaattaagaacttttgacctagaatgaatttatgagtcaaaggaaggccaagcacaggt

SEQ ID NO: 477963 - DNA, 1930 bp, Homo sapiens
ggatttaggacccaccttacaccagccgcttgagctaagcccacttccattctggaaagttttgggctgggagctgatggcaggagacgcaggaggaggcaaagaagggcagacacgtgggctgctcagactgtgatcacaggccaccaggagaggggcttggggacagtccttgtgaaacctccctgcgaggccggcgaggccccaggggtgcattgggctccatagtccaaaggaggcatgagggtcccactgggtctctagctccccagctctggtgtccgtaggctgctcccttccaaggctccagtgtcaccctgtctgggaaactcacagctcctcaaggtccccggtccctcgcaaagggtcacatccagccctccgtgatctccttctaagacagcattatgacccgtttgtcttttctccctgccacaggacagtgggattctgcgggcttcggtgccttctccacgatgctgagggcctgagcctgctccacagccttgaatgtttaaggcatcctcgcttccagcccccgtgtggcgagaaagcagtaaaggagcagagggaaggtccggacccccacggccaaaggaggcatctgcgcagagcacacagcactggctggcacctgactcttctgtggcggccctgaggcccgcactgtgcgggaagcggcagccgaagggcccggattcaaggccggcatggactcgggagctcactgtgccagtttctcagactttctatgtttttgatgaccttgaccgttttgaggagtgctggtcagtgtatgctgcagacccccccgaccctgaacccaagatgctgcagcttgaaacactagcgctgctgtctctggaaatcagatatggctgctgctgccctagagaatattcttcactatgtctgcttcggtttgtcaccacctttcaattcaaagtctggggagggtgtttggcattggttgagcctaaatcttatgccttcgccctagctgcggggggaggctgggaatgtatctgttaatttgagcttatagagtgaagacaagttctgccttctagtgtggcagccctcaaatcaaagcagaaagtttattgtttgtagttgcattaaaaaaaagcatgaaatgatataaaaggaactgatgaaagtagttacctgtgggggagggtagtgggaggagattaggagccagacttcttaatgtgagcattttcctatcattttgagttttaaaacgtgtgcatatattatctagtcaaaaattaaaaattttaagggtgatataatcatattaacaaatgtcacaaatctaagtaacttctctcttaaataaacattctgagcaaggattaaaaacattatactactaagtgcactgctacacttccatctgtgttatttaatgccaccaaatccatcaggccaatttgctttcctctcttctctgcctattttggcatcctcccaaatggctcattttcacaacatccccatgaattggcagtgattagccttactggtagggggagaaatggtatggatttcccatacaatgcaaaataccgtgactcactttcttgtcgggagatttcagaacagttcctcacacacaaaggaggcttttcagaaccaaacactgcattaggtgctgagctaaagtgaagccagtgaagatttgctcattgtccagagatgaatccttagggcacataccccaggttcatacctgcccaaatgaggtcctccttctgtcagtcaattcctgaattatcaaagctcaccacatcttctgagctggcatttccatatgatatcagtctgctgaaaataaattccaatatacagacacaaggagatccagttaaaagagcccaggaaattctctatttattacagaatgacaagtagaggtcttgac

SEQ ID NO: 477964 - DNA, 678 bp, Homo sapiens
ctcatcatctcctcaagttggtcaagctttgcccctcacaacctcgtctacaccaagttacttttcgaatgcccacttacaaatatagtcacaacagggggttagcttcgatatataaatttggggaggagaaacagtcaataataggctattttgtccccaaaaatgccacagccactccaacaccacatggcatgaaaggaagtgtgacaaatgaaaagaaagcccttgatcgggaagataaagaaaggacccagctagaagtgatgttcaaaatatttaaccacttttatgggatggacctgaccaatcagaacctgacaggtttcaaagcttcagagaagtctagaatccctggtgaccaagagaaagtgatcaggaatagcgccgagaaagctggaaacacacctgatacgaaagtcatggttggagtctgttctggagaagagaagcttgtcttcttggatgcagttgggagcctacagcctactcccacacccaggcctctgtggctgtccaaagtccacgtgtccccaagaccatcctcacttggggaggacgtcggcatattatgggttcagtcattctaggtataactatcttctgtatgaccaggtcaagctatatatagcttagaaattttcaggtgctcgattagtaatcacaaccaatgtgatt

SEQ ID NO: 477965 - DNA, 591 bp, Homo sapiens
aagagctagtgtgtggtttgctgtgtgtcttttctctcttccacaagatggacaatggtccagaaaggggctgcttcatcagcctggatcccaaagaagataacatgaagcagggatataccttccaggccaatgaaaaattccagccaactgagaccaagcaaatgtggctgtatccacatattcagagccaggccttgggcagggcaggtgacaaggagcatgtcatttgggggaacctagcactgagtgaaatcatcacagttaattctttactagctgtgtcagaatttcggctcattttaatcttggtgttcaatgaacaccctgaggtcttcctcatgagtcccctgcattctgatgaaattgcctttagtgtcttaggaggccgtgtggttcagagcatgggtgtggagttgagagatgtccattccactccaggtttcaccctaaaaagcagtgtcacctggccctccagggcctctttgtaactcttataaaatgatctctgacactctgagcctgtttttatttggaatcttaggggaaaaaagcatttgtgaggtccaggatttaatcttgtttgtcctc

SEQ ID NO: 477966 - DNA, 482 bp, Homo sapiens
ttctctcatctacctcttctgaaagcagcagcctcccatcaacatgtcccccacttcatggtcccacttggtggctggatgtacctgttctctcacatttctcctgaaagctccaacttgtccacctacaccagtgcttcagggaaagctggttaatgacttcatctctagccctctaactctccttaactaccttcacctccccagttcctctcatcattatgtcacatgtgaaaaagtggcctgggttttgaaccaactgtggctgcctctagagtttctgcccacaccattaccatcgcagcgagctctcaaagacgaccaagtgattcttcccgcctcaaaactctccaaagcctcaccgacactgccagtgaaactttgcctgccctacgcaccctcacttcccactttcccaactgcacttcctactccaggcatgggaagcccctggccactcccctaatgggcgcgctgcgtcg

SEQ ID NO: 477967 - DNA, 728 bp, Homo sapiens
ggcgtttgtgaaactgaacgggtagagcctctggtatatggtcccaggcatcagtggtgtgatgtatcagatgggaccacatgagaggggtcatctgaattctgagtttggcctggaggacctggtgactacagtggatggggggaccactggattcccaggagctgaagggaaaacaaggagtggccagccagggaaaggcattggccagtatcaagagaattgcagggcaaatgccagactgcttgtcctgtcctggggctgcctatgggaacagaggggactccactggaacagtgagtggggtgcatctgggcacaggagtctactgagtccagaaagaggatacaagctcaattcaatcagcaccatgattgatggcatcaggacttggtgagatatcttcccttccttccaatgggttttattctactctgtctccaaacatttgtgtcacctttgtttgaaggagaaagagcatgggtaaaaggggaacagaggtgggtggcacctttagctaccagaggggttgtgcaataccattgcatgcagctagtataatcatgccacgagaagggaagcaggaaaaagaagaaaagagagagagagagacagtgagatgatgctgcagttgctgtttgcatttaggagaggaagaaggtgaaaataaagtagtggaaaaaatcaatttcactatctcatggcccttgggggctatttgaaaataa

SEQ ID NO: 477968 - DNA, 1195 bp, Homo sapiens
ccgcttcagtgtagaactggtaccagctagaaagcctctccaacctcctcaaggccatggtcagctacagcatgaaccccgtggacctatttgagaccaacgacctgtttgagagtgggaacgtgaggcaggtgcaggtgtctcttctcgccctggcaaggaaggccaagactaaggggctgcagagcgaggtggacatcggtgaggagtactcagagaagcaggaggggaacttcgacgatgccaccatgaaggctggccagtgcatcatccggctgcagattaccaataaacgcgccagccagtcaggcacgactcctccagatgggtacaagcaagtgtgccagccaggtgggcatggcggctcctgggacccggtggcacatctacgacacgaagctgggaatcacaagtatgacaactcttccacgaccctgaagatgggctacacgctgggcaccaaccagagcagccaggtcttcagcctgggccgacagatatacgaccccaagtactgcctgggagcacagtggcccacggggctccctcaggtgcaggcgactgcccggggccagtggaggcccctgaatatctcccttactaccaagaggagaccagctactgaggctcccagcacgctctctccccacatggtctccctgtctgggtgtttgggactgagccaccgggctgtgggggaagggatcaaggccatatcccgatgcgtgtcgggtgagggtccccgctggcgcgtccaggctgtgggcctagctgtgctggggagacgagacctgggcatggagggaaccggtccccgaaggtttcccgttgcctcgcctcttcccccttttgtcagccgatcagtttgtggtttctgtacccgcaaaagtttcaagaagctcctgagtggctggatttccctaggaccctcagaccaacagacctcagaccctcagacctacgctggggcccggtctactgctgtatctcccccaaccacacgccctgccaagtactgcacagggccccccacccagggaccccggatcatgagataatgtgaaataccgactgtggaccaaacacaataaaacctctgtttttaagaagaaaatgaaaagacttaaaattggcattttaggactttatatatattattaaatatatattaaatataaatgttatacaatttagc

SEQ ID NO: 477969 - DNA, 632 bp, Homo sapiens
ccgagttactgcctggtttgctgaagagttattccatcatcgcaggaggaaaaccatgtcgaaacgaaaagtccatattggtggtagttttttgagagctacaccacaacccccaaaattgacctctaaagtgacaacagtccgctgggctgctgaaggggagcagcactggtgtctgggtgtggcatctgaacctttgcttccagaacaccagcatcgtcacatttctcagagaaagcaatttgccttgagacagttccattgtgagtggaagagacaagggtgcattgttcaccagacaatgcctgaattagctatctcctggcgcatatatgtgagtgtgcaaactgagaagaactgctggctagagaagggaagaactggtttgttcagtattttcatctccgttattaacaaatttctctccaaagtcattgcatcagtttacacacccatcagcaaggtttaagatttctgttttcaagtacctcccactatgtggtattacgttttttaaagccttgccagtctaataagtgtcaacaagtgtctcttaaagttatattttctctattattaataagcatgaactttcatgggaacggtcattctgagtttttctccctgttaat

SEQ ID NO: 477970 - DNA, 573 bp, Homo sapiens
tcgtgttgatttttgatttaaaatagccccttgttttatttgctcctggagtgactgcattaggaagctcctttctgaaagctatggttaaatctgccacaaaggcagccctggccctcacaagattcatatacccaaaagaattaagaacaagtacccaaaacgatacttgtgcacaaatgttcaaggcagaattattcacaagagccaaaagtggaaacaatccaagtgtccatcaacgaatgaagaaaatgcaatattacccaaccataaaaaaggaaggaaattacgacacttgctacaacatggatgaatctggaaaacatgctaatgaaaagggagctctgaaatgttgtcccctgccatgggagcacttggaaagtccagttctcaaagcagaattcaccacacaagcagctccttccgaggaaaaccacgaatgccgtaaactccacagagacaaggaccctccgtgcaggcggcccttacctgctcgtctagttcccacctgaattgaaaacctcatcatgagcgtgcacctttctgcaaatcagcaaagaccgacagcctttt

SEQ ID NO: 477971 - DNA, 2285 bp, Homo sapiens
aagggcaacacagcagactcaccagcctctggtgaagtactttagctggttagaggatggggactgaagttccatccaagcagctcctcaatgctcgtaacaaatctgaacttgctctctccactggaatatgagcaggttctctgcattttaacaagtggacagtggttatgctgcttctgggggctcccaccctgagaaaggttcatcatagcctgatcttgaagggaatcaataatcggtgtccaactgaaactgggttgtgtcgattaaagttgtggactgtaagcaaatgcctaaaagacctctccttctggaagctgcctgcaccctttggcttgaggctctcctctatcttcaaagccagccatcccatcatctcgacgtctgttgctggtgtcattaagtatgcagcacttccagcctgtcccccagggaagctgaaacagccttcaggggaatccaacgtacctgcagcaggacctccaaggcttgtgagagcagaggggattcagggattctgtggggcacccacagcatctctgcatgcagctcacagtgcccatgagatctgaacatgcatttatcttgtgtaagataaggctatttcccttgtagttggtgcaaaagtcattgtggttcttaccattaaagcaaaaaccttttaatatttaaaaacattaaagttttcacctttaatggtaaaaactgctattacttttgtaccaaactaatatttcccggtttttgaactgaaaatcctgtcttcttgaaacactcccctcagtccgggcaaactagaatggttgttcaccctgtctggtactgactcttgcagtagacaaagatgagatgatttacaaggtggcatttaaagtttgcaactctgccagcagcactgggggctggcttgtctacactgtttcagggtgtatagattgatagtaacatctgctttaaccagttacacagcctcatctgcctctaaaagatccctctgcagagttgcaaaagctccctttcgatcaagtgttcacagctggctatttcagcatcgttaaaactattgcactttgaaattatttcagtgaaaaaatgcgtgctgtccccagggggaagaatcctggtactgaagtgtcctctgatggcattgcatgttcctcaaatcctagagaaatggaaaactccctcctggacagggcattgaatttcctccagcatgaagtcccctttttgctgatgaatcccactttgctcccaaatctaggactcagggttctgtttgccttacatcacctccaaaggaagccggctggcaccaagggccagcccctggaaacttgggaagcgtttgattccacttatctgagcacagaagcagcatgccagcctgcctgatacagtcaggtgcgtcatgaattccaaggctgacccaccaaatcagggagcttgggtcccatgatctagggcttttgccagcaagtcaaggccttaaattcctggaggctgatcacctgccaaaaaccacttcacagatgaacgtgtcctgaaagggggcttatataccttggatatatgatccgccctcctgacaagccacagcagcacttaaaaaggcttgtgaagggatgatgccagtggaagaaaacaggaactttgacctcccagagcctatggataccaagaagggatcagatgactgattttttcaaaagcttcctggtggaataaatgcatttcacagtgtttctttaagtaaatataagcagttctttttttgttattttcgcagcattgagccgccagccaactctggccagtggtgccctgtagcctttctgggaatgtgggaaaggaaagaagagaaagccttgagcaacactggctggtcgcatggtaccagtagtactcccccacatgctgtgacaaccaaaaatgtctccagacattggcacattgcccctggttgagaattgctggtggaaaaaaatcacagccccgcagttggtcaggcccttttcagacaacaccccccactccattactctttgatgttgagcccagcacaattttcaggtcctggactcccaaggactcacatgaatgaacgtctctggacacctaatcaccatttatcaatctcacttctatgagaaaaacacatttcaagtacctaccctccagcttgtcaacaaattcattaaaaaagaagggaacatcagttatataaagccatggtgtttttgccttactatcaagcttttggatgaaatggaaaagttaaa

SEQ ID NO: 477972 - DNA, 487 bp, Homo sapiens
ttattatggtgaaaagtatgtcatgtttcctatcacttctctgttgaattccagcattctctgttatgtgatctatttaaaatatgattatctacttgctattttggtcctagtttgtggagggagtgagtaccagatgcctctcatgagccatcctaaagctcctcttctatccctgaaatttatggtgaaggatgttgacctgatgaaacagatctgtggtcatgggtttgagaagtggctttcaacaaggggtgattttgccctccatggatcatctggcaatgtctgggcacatgttttagtttccatgattggaggatgctactggcgtctggtaggtagaggccaggagataggtaagttgtgaatggccaagagatgtgcaagctggccattgtgatactttacaatcttttgcttttaccattctacctgtgactacagatccatggaaaaaacgtgtagcgtatctcaaaattaagtc

SEQ ID NO: 477973 - DNA, 744 bp, Homo sapiens
gatctctggatggcctcaaagctaacgtgcttgaggggagcaggattgggaatgtggatccaaaggaccagtagatgggctcatcctccacccgggaagcacactttcacagctgccatgagtactctgtatggggccagagacttcctaaatgtctccttcaatcctcacctattgctgttgcacattgatgatatgatgctgctggtccaaggactacatttcgagaaccccaaccacgcatggattgttgtcaactatgaatcacaagatttccagggttttgtctgctgccttccctgcaagccctgccatccactgagacccaacctcagccattcttggcacatcagcccatgagaagtctgccactctttcttcctaagcaaagcagcatccttcagggcctggagctcctggacacaaaagccatttttgggagaaaaatgtggataaagtcactcctgggccacctgtctgtgaggctgtatggaagctgcctactggtttgaggagaggctgctgggttctttcctttactaaggatttgcttaagtcagccctccaggatccaaaaaagagccagaaaaaagccagcaaaacagctgaggcacagactagatggtagtccaaggaccaagacctggccagccagagggaccaggtgtccagaccccggactgttttcaatacagttatacaatgaaatcaaataaatggatgtattgattgcttggcaattaa

SEQ ID NO: 477974 - DNA, 2746 bp, Homo sapiens
cagagcccacagctgcagggagcactgggctggggtccccgtttataggcctgagctgagcatctccctctgagagctgtaaaacaggctcagagagctagtggcatggctagggtcagcagccggttagaggagaagctggaaatggagcccagccctcccaatcctggctcagagcaggcagagcaactgctgcctgcagagggccgtgagtcctgccaaggtggcctctggagccctgatgcatcacctgtaggcagcatccaagtgcccagacctctggggcctgctccgggcttcctggaggcagatgggcatcatcgtagcagtggaacccgttttgtttcgattgtccctgacctggcctgtgctctcgctgcaccatcctgtggaacacagacacctggagagtcagagctggctggatctttggaagggcacagtcacagctgcacccgccactccttcccatcccaggctcgatacttcagtaatccttgctgcctgagcttcccttatgggtcccagaaaagcaatcactaaggtagagggcaaatgcttttgtaagttttatagatgttttcaaatttccctctgcaaggctgtgataatttaggcctgcattggccctggtacacagaattggattaatcataaactttgggtcatgccaaactctcaccatggcccacttctatttagttaattatttataataatgattaaaataattagttatgttatgagatgcctgttgttaaagatgaacaaagccagatactagctaaagtggcgaggacagattttaatcaggaataactattgcaatggggagaagagttcaatgtgacttgaacttggatttgtacagagagcctatcctgtcattaagtgacacatgactgtatttatcctgcttggtgtttttagcactttttaaactgtggcttgttacctttcagtagttgtggaaacttcttggctatcgtctctttgaacactgttcctacctattctcattctcctctcctggaattttgaatacatacatagtggacctttcatcatgtaaccttacatctcttatgtttctttttgtatgtttctgtatgtaccatttataaacaaaacaaaactatttcaatctggttatttcctctgactgatcttccagttcattaattcctttttcagctttctgtcacttactattatattcattcattaatttcttaatttcagttcaagcatttttcagttgtagaatgtccactttcttctttttacaggttcaagttctctgctgagggtttccacatagccatctaatttcttggatttattaatcacatatattttaaactaaatatctgataaatcctgtgaggctgttcctttctctgttgatttctctcagttttctgttatgtgttcatgtctcctggtgtatgaagtaatttgcaattaaacacaaagcattttgtataaaaattgttgagacaatttgcagctctgtatgttttgaagtcagttggtttggaatgacttgcctatgcagatattggggtgattagagtctgagtttcagtacctgtgaggctgttctcccaagtatagctctctgagcaccccagtggaaagcctgtgctctttaccagcacctcttttctttggagagtccttcactccaattttgttcctgctccctgcaagacatgcagaagtttcttagcttctcagcatctttctgagaaacataaaatgccttgaggagaaaaataaagtaatggacatatgtcagacttatctcacttctcacttctttttaactttccttttttccccaagatattggctcctcaagtccttgctactttggtttgatgtctccaaacacacacacacacacacacacacacacacacacacacacacacacagagagagagagagaagtgatttaaaattgttaatttttctctgtgtgagtgttaatttgtaacacactattccaccaccatcgatggaggtagtaatctttcaaaacctactttccacaaaccaaataaataactccacctaactttagggcaggcaacctggtatgcttctgagaaccagttctgtgaacacacagatcatgcttatgatttcagccagtgcatcaatttaaactaaaagtttaagatgtttatttttcctcattttattatttctcttatttgttctatagtcatcttaatctgtgtaagaaatactgaagctgtccaaaagttcaaatttgaacccaatgctgaatttaaaggtgttgccccaaaaaacattaggtaaacatgcaaggatcgtcactgttaacctgttacgcaatatgacctggtccccaggctacataattttagagtcattctttacatttcaagctctgcaagcacttggagaagtggtgttctgtggactcttacttcttcctgactttttgatgttctcttttgtcaatgtgaccaaccaattttgaatcagagctactggcatctttagaatgacatgtatggtggctcagaactgtaccctttaaaactcagctccagtaaagggagattctgagcattttaagatgttggaaattgagttgcatcctgcattaaaggcatttcttctttatataaactgtaggattctgttaagacagaaatggggagagctaatgggctattctgaaagaactacccattaaattgtaaagtac

SEQ ID NO: 477975 - DNA, 1017 bp, Homo sapiens
caggattggctgagcacgtatgatttccacatcccaatgtgaactgcagactttgagtaaggcagattttcctccataatgggggtgggccttatccagtcacttgaagttcttaatagaaaaaagactgacctcacccaagcaagaaggaattctgccagcatattgcctttggatttaaactgcaatccttcttgggtttcctgcctaccaccctatcctgcagattttgcacttgctagcctctactgtcccatggaccaattccttcaaattaatctctcttttgtcctctctctacatatgcacatcctgttggttctatatctctgcagaactctgactaatacagcacttctacccactcccaagcccatggaagaccttgtttattggccaagacactctttccagatgagccttcagaatcctcctccactcagtcctccagatatccatggcctgtcaataagcaagttgaaacatccttgctatccttgcacgagagcaatggttctcaagagggagagggtgattttgcccgccaggggatgtttggcattgtccagagacatttctgttgtcacaaatgggggagagggagtgctgttggcttctagtgggaagagatcagagaagctgctaaacatcctataaggcacaggacagtctcccattaacaaagaattacccagccccaagtgtcagtagtacgaaggttgagaagcattgaattagagattcactcagactcaactattgaaagacaaacatctcttggatgagaggtatcttagtctctatcacagcaattctatatgatttagagagagctgcttctcagtaaataacctgagaaattattttgaaattctgacataatgtggatgtagcataaccttttattttaccctgtgtgtgtggagctattgcttttagccttgtcttctcttaattcctttcaaaattgagtctccttttacttttcatatacttgagcatggacactttctttct

SEQ ID NO: 477976 - DNA, 604 bp, Homo sapiens
tctgttagttgtgcattggtttaaagatgctgtactgtactggatccagctttgtgaggaacagcactgaagatactggggagaaatattttcaagccaaaaatggttggatgcatcagggttgtgttccagttcagggaccctgctccctgttgctctatttttctagagagttctttgaaaaggtcactaaaatgtcagaagaaaagcagatcaagtttaagtgccagttgctctggggagttgcaaacctgggttggagacattggctgttgagcagaggcaaggtgagagcctttgcttatgagtcacagctcaaagcctgggaaacactgttctgggagaccacagagggaggaatggccctggcttttagtggcgtcacggatggtacagtacttgatcccagacagcaggctggaggaaagctactggcaaaacgtgagaatagttacagcactgaaggtatagaccttgataattcctagaaatgatttagagtctgccttttacaagagagagggagggagggggggagagagagagagagagcgagcgagagagagaaatatctgatgatgttaaacttatctgttcctttcat

SEQ ID NO: 477977 - DNA, 724 bp, Homo sapiens
atttaatcttcacgataacccaaagatgtagggaccactactgtccccattgtatatttgaggcattcaatgccctggatggatgctcatggtttctgtcagatgccaggtctgcaaaggagccaaccctgtttcctcatctatcaaaaacagcaaataggcttaaaaacatcgactgacataataaacatgactcgtaacaaactttgccaacatgaaacttgcttaagaaggtgcttgggaaccttcacttgggcctgggaaccacgaaaggaagcacatccaaaactacttctgatccaagtaaattctagtgggcaagaggaagagaagagaaactacaacatcattatcttactgctggaggcagcagattacggacccctgactgtgatgtgtcaaatgcactgtgtgacaaccaagaccctacacatctggggggcacttcaggattcctccaggcggcagttgctggcctagactcacttcttcaggagggaggttcgccctggaaaagctgatttgcatttctgctgggatcgatgccgtggagactgaatacattggtaagtagtttagcagctagtttggtctcagctgacaatgattatggattggggtgttcagagcaagaatgcacaaatggtctggagaaaaatcagcagtgaaactacattttttgtaacgtctaaatcagcaaagaaaaacgctgcagaatagtttc

SEQ ID NO: 477978 - DNA, 556 bp, Homo sapiens
aaccacttagaacctcctgagaactgccagctctgctgctgaatgctccacaaaaatgatgagcaagtgctttcagtcattggagatgcatccgtgctcccgagaggactgtgtctcctgccatggatatgtcatgtggcaggaaagagtccaaccaatagaaggttagtttttggtcacgtaacagtactgggtgagtcagctggtcaccagtgtggccctgtccatgcagtcattcagggattcaggctgctgaaggctcagccgtgtttattgggcttccagggccaccctgaggtcagctttatgcctgccagctggaaggaaaaagtttatgtattgaagaacctgggccgtttgacccacggagtggttctcaatctggatttggctgattgggcactcatgttgcaggttaacatgctcctcggttttctgacctcctagaagttggcagctggatccagaagcttcaacagcctcaggttcagcctcctgggctggcggattgtagccaaataaaaataaacagaactagtattattttgcattgagt

SEQ ID NO: 477979 - DNA, 735 bp, Homo sapiens
cggtctgtgtccccagccaggtctttccaggcaagtcttaggatgtactcagccagttctcaagatagtcaccaacctgaaaacctcagggccaagccggcccaggcaaacacactgtgcatatggcctggtgaagctggccccgtgccatgtccgtactgtttgaaatgtggaatcaaccacactcagctctgtggaagaaggaatgcccaatactgttccccagagccgcctgcagcaactgacacctgccccacctcagctgccgctccacctgctcaggcctgcctccagagttgtcaggtgaaaggggccaactttgcaagggctgtggcaggagggacaggcctccccaggccaggaggccctcacccaggcctgctgtggggagaggctgtaaccacaaaccccctctctggttccagacctgtcctttccagcccactgattgggggggatggtgggtggcaggccaaattcaggaaccccatctgagcttggagaatataagttcttctctactactaacaaataacaatgacaaaagttgtggcaacttttaagcaagcaaaaacagaaagtaaggagcatatggagagggaagggaaagggaagggagagggaagggagagggaagggagagggaagggagagggaagggggaaagggggaagggaagggagagggagagggagagggagagggagagggaggaagtcattgtcatttaaatgc

SEQ ID NO: 477980 - DNA, 569 bp, Homo sapiens
gatttattcttttgcctctgagcaagatggattttcctaaaataatttccccacatttctgcagtgatggtgatgtgtatagccagcattccacagttgttagtgaaggtatttcagtctatacccgaaatacctttcctcgttccaggagctgccccgaacagctgcgtagttcagcaaaagcccacaaagctctctttggctcccagtcataccaccatcccccgacattagggaaatgctgtttgttttgctcagttccatgtattcatgttcttggactctatgagttgactaatatcataatcattatgtttagaaattgtaaattctggagtttgaaagatcaccaagccgggtttggtgtgacagcatctggatgtgcacctcagagaacccctgctcaggacaaagtgaatttacaacctacaagagaagatatgcctctggcattattctttaggtgacttttgtattgccgatggactctggaaatctaaatgttctttcactggtttgttgtggcttggtaggtaaaaatgctttctgcattattctggagatagaaa

SEQ ID NO: 477981 - DNA, 524 bp, Homo sapiens
gtaatgaagcagggcacagacaatgtcttgcaagtctggatgttttagaagggattgcactgcagagacctgggctctgtgcctggatctaccactgatacctcgagttaccttgagcaagccctctgcctttctgggttcctgtggtcttacctgtgaaaagaggcagctagatctagctaccaatgaaagcgacctttcaaactataattttgaagcaagcagaaacgaaagtttaagtttaaaggcagacggccacatgcaccactggtggacgtccctcttgaccttcctaccagcaggcacggccacttttgtacaaaataagtcaatccttggctgtgaatgggagacgaagagatgggttggaggatggcgaggagaaaagcaaataatggaccataaatggtgccaacacgagtggccatctcctctaaactgccaaggtcatcgaaacaaagaaactgtcatagccaacaagaacctaagggagacaggaggctgatgtcgtgtgacagggtctt

SEQ ID NO: 477982 - DNA, 903 bp, Homo sapiens
cctggattaacaaagttgtttgtcaaagatcagatggttgtagatgtgtgcttctttgcgatgggttcgaacatcttccttgagctcggagaagtttgttattactgatcgtctgaagccttcttctctcaactcatcaaagtcattctccatccagctttgttctgttgctggaccctcagctgcaggtctgttggagtttgctggaggtccactccagaccctgtttacctgggtatcagaagcagaggctgcagaacagcgaatattgctgaacagcaaatgttgctgcctgatcgttcctctggaagtttcatctcagaggggtacccggccatctaggtcctgcccccagaggtggagtctacagaggcaggcagccctccttgagctgcggtgggctccacccagctcgagcttctcggccgctttgtttacctactcaaacctcagcaaaggtgggcacccctcctccagccttgctgccaccttgcatctatggaaagctcttgctggccacggaggaagtaggcagctgacacaaagttctgcaattgcctgtgccaaactgtgtaaagcaagtacttacatcaactgggaagataacgctgtcattttcctacttgttcagtccatggtggttgatcttacggggcagtcagcctgcagatgtggatcttatgattgactgccttgtttcttgccttcgtgtaagccctcacaacaaccaagtttaagatttcaatgtggttactactatgatttaaatagattttcacagttttaagcctagaatgataaaattttgtaaaaatattgttttttcagttttttaagctgtgtgatctttcacaaactttctgtaataccaatgcttttgatgaatgaattaatcatggacac

SEQ ID NO: 477983 - DNA, 1308 bp, Homo sapiens
ccgaaaagtccaacgtaagttcttatatttgccaaactgcccagcaaagaaaggttatggtattaacactcacaatccccaaaacagatgaatggagacttcatgaaagtagttgccaggagtatggaagaagatatagtgtggctgaaagagaaaaactattcacagacttacttcttaagttatcaggagtctgggcagaggacagtcccccggggctggtagtgaatcaagcacctgtcatagtagaactactacaaggaacctacctggtgcagatctcgctgtggaaagctggctataaagtgtccaaggaaaaggcacagatctgtggccaaggagttcagtatcttggcttttacatctctcaagggcagcatgagcttgggtgggagcaaaaggagactgtctgtagcattcctcagccagacacaaggcggcaagtgcgggaattcctaggggcagctggtttctcccgtatatggatccccaactactcactcctagcaaaacctttatatgaggcgatgaaagggcagggaaaggagcccctcctttggggaaaagaacaggatatggctttcaaggaaatcaagaaagctttaattcaggcaccagcactagggctgccagacatgacaaaggccttttacctgtatgttcatgaaagaaaagaaatggctacagtagtcttagtgcaaatgctagggtcatggtattggcctgtagcatatttgtccaagcaactagactttgtggctaagggatggccaccctgtttcaaggaactggccgccactgccttgttagccgaggatgctaacaagctcacatttggacagaagctgataattcaggtgccccacacagttgtcaccctgacggaacagagaggacatcattggctctctaaccctaagatgctaagatatcaagggctcctatgtgagaatacatacatcaccttagagactgtgaataccctaaatccagccacactgttaccaatagaatatgtggaacatgggaagcccccgttatgtgccccagggtaccactgctgtgtagaaacagtggatgaagtcttttcaagccagaaagacttaaaggatcaacccttaaaagacccagatgttgaatattttactgatggaagcagcttcatatccaagggtgtcaaaaaggccagatttgccatagtcacattaagctcggtggccaaggcccgccccctagcggtaggaacctcagcacagaaggcagaatagctctcacaagagcactacttctagcaaagagaaagtcagc

SEQ ID NO: 477984 - DNA, 965 bp, Homo sapiens
aagcatgcttttatctggttgatggaccaaaaaaagtcatcttttctaatgaaaagggtcttatttatgttgctcaaatgtttacataataacttgtgccaaaaatatagtgctcatgcttttcagttctcacccagaaatgtcctgtggcttctagttgtgtgcctgagatcagataataaaagaccatgccttgaattctctcagctaagtgtaaaggattccttcagagatttatttattccgagaatagagaccattctgatgatgtatacaaggaacaacctaaactgtgctgagccactgtttgaacaaaataactcacttaatgttaatttcaacacacaaaagaaaacagtctggcttattcacggatacagaccagtaggctccatcccattatggcttcagaacttcgtaaggattttgctgaatgaagaagatatgaatgtaattgtagtagactggagccggggtgctacaacttttatttataatagagcagttaaaaacaccagaaaagttgctgtgagtttgagtgtgcacattaaaaatcttttgaagcatggtgcatctcttgacaattttcatttcataggtgtgagcttaggggctcatatcagtggatttgttggaaagatatttcatggtcaacttggaagaataacaggtcttgaccctgctgggccaaggttctccagaaaaccaccatatagcagattagattacacggatgcaaagtttgtggatgtcatccattctgactccaatgaatttgaaatcatatgttttgattccagatgatgcacttaaccagtatattattcttataaaccgaatcaggagaggatatggtgggttttaaaaagggaagggggtgtaagaacagggagtaggtacaaagatcacatgcttcaaagggcaaaaagcagaaatattgataaggttctatgttcagcagtgca

SEQ ID NO: 477985 - DNA, 1397 bp, Homo sapiens
aggaaacctctggagtcggtatttgagtaaacaatgtttggaacagtgccaatatattactttgggggcagcaataaaagtactctagacccagagtttgcagatatcaggaataaggaagtatccaggagcaactgccagtgtgatctgttatgttatttgcagaaggatcccctgggctggttttcctctgcccatctcctgtgggatcctcctgtggggagcagcaccaaggcgctagaactccaggtggatctgcaagaacaccatccccctggtgctgtttcccaactgagttctcacaggatctggtttaaaatgtgtggcacctacccgctctctctctgtttctcctgctccggcggtgtaagaagtgtctgcttccccttcgccttcctccatgattcttcagctttttctgtgtccaaacaaaatgacctcagtaacagacatcctcacagccacttttgattcttgcttcttttggacattttacagatcctctatgttaagtccaatcatttcttctgtcactactgctcccatgtttaaagcatatctaggactatggtcctagagttatgcccgattgctgtacttcacatttatggtttccagcctcagctaagccttcatctctataccttttaagacatggctctaaataatgattgtggtgtttactgcattgtgtacatacaacacgtcagggtctgtatgctgcattttacactaagtatctttttcagtactttggatgccctgtgaggtaaaaatgaggctgaggaaactgaggcaaagaaataagaggttacaaaatttgtcttgttttatacaggtagaaaatgccaaacgagttgcacactctggtttctctcacacctacgcccctgcttacaagaagccctcgatcagctccttcctctctatgctgagacagttggcaaagtgtaggggtggaggttctggcaaagaattcttaaagcacgtgttgaagaattatgtatgtgtttaaaaacacatcagcctaatggagaaatctcagttaatatttatttttgtctacttttataactaatgcatgatggctgtagaaaatttggaaaatgcataaaatatatatatatatatatatatataaagaaaaaaagaaaatcattcataatctcactacccagaggggaccaccattaacatctgattctttgcaatgttaaataatttaacatctttaaataatttgacatttttaaacaaaaggcaacttaattattatttatataattgatatataattgtgatatatatataatacaaatacacaggcatttggaagatatttataactcagggaactaatattttgaactaccaatacatgatgttacaaaattatg

SEQ ID NO: 477986 - DNA, 603 bp, Homo sapiens
ctcactgtctaagcagtcccagtgagatgagccaggttcttcagctcctatactggtctgcccaaggaccctatcactttttcaaaaagctgctttccaacatgaacatcaatagcagacaagggatcatccaggaggtagacgtcggccccactgtagacagctctggccaggcttactcgatgctgctggcccccacttatattcacagcctgaaaatggagcagaagaaaaacaagaccagaggaaatgtgtatagatctcaaagcacgtgcagttacatccaaatgctcttctatggcatggatagacagcaacccaagatgaacgctccaacctttctttatctacgactttccagtcctagccccatctcgtttcctagcattactaacttgcacaaattagaagatatatctactttctctgaagtgcttactcgactgccacccctgctaacactgctggacccagctcttgccaaaggagatatacggccattaggatttgaaaaggggcagaccagaggagattgaggtttgctgtcaagtccatgagttgctgacatcaagttaataatttccccagtggaaaacttttgtc

SEQ ID NO: 477987 - DNA, 510 bp, Homo sapiens
gaaagggtgagagggtggggtgatatgcctgctcctctgtgccttcctccaggaagcagatgctgttatgcttcctggttcaccctcatccagtatgactgctgccttcataaagcaggatctttggacacaggcatgcacagggaagatgatgtgaagacacagaaagaagagccatctccaaccaaggagaaaggcctgaaacacatccttccctcacagctctcagaaagaaacaatcctggtgggaaacaccttgtctgggccactccattgcccagtctggattatctcagaggcaagaggtacttccttctgcatggaaagggtgagaaggaagatcccagtcgccctcattattaccacagacaccagcagtgctcaccaatggatacccctgcagtcttcaccagtcctgagcccaacacagggagctgcctggagtccatgctgctacacttacccatgagaaagagccaagactgtgccttctgtcccatgagctgagct

SEQ ID NO: 477988 - DNA, 627 bp, Homo sapiens
tgagttcctggaataggaaaaggatattagaaggtggagtagatgaactataaggataagaggtggcaatccgtgccagttggagatttaaaaacaggcatgccctatacaagccagtgcaaaccaaaaataaaattccaagctccccagccaactgactggaaccccctctcaaccaaggagattccaaagaaacctgagaaactagttcaggccgtgataggaagtgaggtttataactgtaactgcccaacgggttcaccttgcccacggcctagagagagcccatttatcaagacaggggacttgcaattgagaaagagtaattcacgcagaggcggctgtgtgggagactggagttttattattactcaaattggtctccctgaaaagtcggatacggaaggttttaaggataatttggtgagtaggggctcgagaagtggggagtgctgattgggcaattaaagacgtgctcattttcttttagcagattagtgctttaaaggttaaggaaaattaacttagagatttaaaaggagataaaataattaggaaataaaaacattgaaaaacagtactacattcactgtgattttattaaaaatcagtttttacacaactttt

SEQ ID NO: 477989 - DNA, 523 bp, Homo sapiens
cgggctctgctctaaggcacaaacctgagatggagaaccagataatacagacagctggaagaaccaggcaagagtctggggcagctcacaggagggatgatgctacctcaactctgcagcatctgggatcgccagccaaagggtcggagaactgccagggagaaggtgtgagtgatgaggccctggcggccatggagctggccgtgtgtgtacaacacaggtcagagagctcccgttttgcttctgtgagtgtagatgggatggcccacttcatcctgaggcctttctccagtgttgtgctgcccagggtttttgaaaagcccatcttgggctctgagaggagaataagtaatgccatagtttgtgtgatgaatccattagggaacctgctctccatgagttttcctgggactcccagaagcaaggtggcccaaggatggtccagggcatcacctattggctgggctagaactcatacaaacagactcaaccagaactagagggtggtgagttttgtgtgata

SEQ ID NO: 477990 - DNA, 1994 bp, Homo sapiens
tgtaggtaccaatccaagctcaaagacttaagaaccagggagccagtgctgtaattcccagcataggaggcccagaaccagaaagaattttaatcaatggagacagagccagtgccagtttccacaaagacccaaggagaggcaatggaaacttggaattcaagttttcctccagggtatttccgaggtggcaagaaggtggctctctgcaagccacaaagacagccctcatcaggaaccaaattggctgacacccatgcgctgaaagaggaaataatggatgtcagtttcaggcccaggcctctaagagctggagcctcatcttctggtttctctcccacagtgaccgtggatgccttttctcccaaaaagggcagctctcgaaggcctgaggggcctcagtgtggaaggaaggtcacccgttacatccctggtccctcctcagtagtctcaagggattctatcctggttccaagcactcccaaatctgtacaaggaaactccgtggaaagttttgcctccaatggtgtgttccttgcagacctgtttcatgcagctccacagccaacaccccacttcacacggcatgctgaggatgcagcatcacctggccagggttacatctgcttggaggctgttcaggtgctgagaactctggcagtgtcagggaagcccacgacaacctcatagctgtgagccacagctcacacaaaaattgtagtaacatattcttcacatgttcctgccttttctcaaaggttcctcatggtttgggttatttattttctcaatgcttttatttttaaatagttatagatctgcaggaatttgcaaagacagtacagagagatcctgtgtatccttcaccaggtttccctgatgattacatcttacctacctacagcactatatcaaaattagaatatttataatggtgcaatgtatgcatatagttccatgccatacagaattgtcccatcaacataaagacctctcttatactatccctttctagtcatttcctccaatactctctccactatccctcaccccttggcaaacactaatatgttcatgtctataattttctcttttcaagaatgttacataaatgaaatcatatagcatatgacttgttaagattggcttttcccagcctggatactgccttcgagatctatccaaattgttacatgtatcaatacttccctccctttaattgttgggaagtattccatggtattaatcacagtttgctaaaccattcacctgttgagggacgttttgatggttttgagtttttggatattacaaataaaatttcaatgaaaattcatgtgtgggtttttgtgtggacataacttcatttctctaggataaatgcccaggcatgccattgctgggttgtatggtaagtgtatatttagtttgctaggaaactgccaaattttccagggtggctgcactattttagattcccatcagcaatgctagcatttggtggtgtcatcattttatattttagctgtttggatagatacatagtgatataaagtgatataatggttttaatttgcatttctctgattgctgatgatattgaacacctttttatgtgcttatttgccatctgcatagtctgtctggtgaagtgtcctttcacatcttttgcctatttttgaattggattgttttttactgttaaatttttagatttctttctatattcttaatataggttctttgtcagataacatggcttgcaaatatttttctcccaaactgcagcttgttttttttatcattttagcaggacttttcacagaacaaatattttaaattttaataaagtccaattcatagatttattattttattcactgtggttttacatcacgtctagaactcgttgcatagcccaggtcatgaaggtttttactctgtaatcctataaaagttttatagtttcacattttacctttaaatctatggtc

SEQ ID NO: 477991 - DNA, 597 bp, Homo sapiens
atagataaatattttcaaagttccactgtcaagcccagtttagaaatgtcaaatttgtcatgactctacccaccagtgtcttttcctctacttttgccacttttcattttcagagcaagaaatctggggaggaaaatgaagaaagttgctatccaattacagcatcatctagaggagctggcatgagcacaccgctgagctgcgaggctgcccacaagcaatgccaaggtttgctgaggactctgctgtgcagggtccccctgcagctggaagagcttgctcccttcgaagcatacctgccccagagagtcaccaaacttctttcaggtgcaaggatagctgccaccctgtctcaccactcacctccatccacaatctgcaccaagagttgcagatcctggtaccatggagcaagttattcagccaacagccctggtcctgaaagattttgcaatccaaggtggagatgaagcaatggtcttgtgcttgccgggtctaaactcaatcaggcagtgaatctttgtttagtcttggtacttgatccttgggaaaaacatcccatgtagacgtcttcatttttcaaatacgggtaagcat

SEQ ID NO: 477992 - DNA, 585 bp, Homo sapiens
agcggtcgctcggggttttcagcgggcgtcctctgtcctctcttctgccgagcccgtgatgctgactgctggtcttcctaggtgtttggctgtagaccctaagagctccctccacaactatacaaggtctaatttctacaataaaagtttttttctcataacactcacagtgactctgctcccctgctcaaggggcacctggctgacacaggccctgaggctgccacagccccatgttcccaccacctccagggctcagccaggagccctgtgtctgcagctacctcctgagctcagcagctcaatgccaaactctttcatgcttctggtgtttctgcagacaactcacgcatcaaagcttgccttgtttagaatattaaagagtggtgacaacacattccatctaagggagagctcacccttttgtaacaacgagaagtcagtttgcgattaatccgacgaataaagtgagttgtcaaagtcagtgaaattatcctaggactaaaaagccccacttccctattagttttcttgggatcatctcccaaatcagttacttgtactagaaatcttgtctcattatcc

SEQ ID NO: 477993 - DNA, 756 bp, Homo sapiens
gaaccctgctcacacctggatcccagacttctagcttccaggacggagaaaataaatgttgttgaagccgcctaccctatggtactttattatggaagccctagcacactaatacattaagggggatatgtttgccaaccatctgcaaagtgcctactgtgtttcacgcctcctccactcccatttctggaggcactgggtcctgaacatcaatgttctggagaggaggacctgcaatgtccagggtaccatgctgatgggcagtgggaagctgtgcccagtgacagccctggtcatcagagataagaggggacgaatggcagtgcagaattggaaggatgtcttgagccagcactgtgccaaggcacttaaacaggacatggaagagaagaagggacaccgacataaagggaagaggacagccacgtatgtgatgatgcagacagagactagagggatgagtctgcaagccaaggaatgcaaggatggctggcaacaccagacgctcaaaagagataagaaaggatccttccctacagtcttcagaaggagcaaggccctgctaacatgttgatcttggacttctggcttccagaaccataagggggttctggtggtttatggtgctttgttgcaccacctggtttatggtgctttgttgcagcagcccttggaaaggtaattgaatgtcccgtgaggtgtcatgagggtgtgacctggaattagctctgctgctctgcatggcatcactttttt

SEQ ID NO: 477994 - DNA, 1159 bp, Homo sapiens
gtactacgagggctggaagacggcagtcctgagggagccgacttgcttagaagtggcacacaggcactttaatcctatctgacagatgtttatcctgtgtttgtgcccaaagagagttcacattgatgcaatataatttgtgaaaccatttcttccttattctgtgaaatgacacattacatcttaatctgcccattgaagcatccgaaacataaccctacagggaaaaatttgctaaaaataatagagaccctaccctggaaacgactgtctctattggtcatttgtcttatgccgctggatttgaatgggtcaatatctgctctgacagacggcactacaagcacatcatggcaacaacagttttcaaatgaactccctgacaatatttcactggatctgtgtgatcaaccaatggataacgtattctgtagcacagcactgaggacagcttgtgtttgcttttatgtgtcctgtgagaggccgttgggaaaatttcaaatcctttataacctttcagaggttcgatatcctcacctctcatgtgtaaaaagtggcaatgtcaagctctcggaggtgttggaaaatcaggtgattaagcacgtaagaggctaagttcctgttcctttcctttatgttggaaataattttaaccttgttctcctggctcagaatccttttcaagctacaagcagatttcttgtgagttgcaggatggtttctggatttgttgcgtgagacgtgacctaccctccaatgtctgaagtcatctcttgcctgcctggaaggcctgctgtatgtttcgggcattactgtttatcctcacgtcatagttttacatcaattttaagatttaggattacattgtatatcaaccattcttacactatgtaaattaagtttatttcctacttgactcaagataaaaaatataatttccaatggttttccaactgttttctacgttggcaaaatttcaaatcatctgtaactgttgacctttattgaggcttctctaataatcactttctccaactcacggaagagacacttcatagatttgtggtgacaaaccttagctttaaagctagctgaatgttttgtatacttctcttcttgacccaatctattgataactgtccagcctttgtggtgtgcc

SEQ ID NO: 477995 - DNA, 785 bp, Homo sapiens
gagaaatgatgtatgccataggaaaggcggctgtcatgaagtcccagagaggcgatttctaccaagaagagagctgtttgcccggcacgctgatttacagaacagggagtgatctggatttatctgtgggttcactggcctcccacagggcttatggatggtctcagtttcagctgcatcacacgctgcctgatgaaattgacaatattcggccaaacaccaactgcatgtggttcaacctaagggtattttacattgaagggcaaagttacagatttcaaagcaaaagacccaagttcacatctgatcacctgctaactggctacgtaatcttgggaaagttccttggtttctctgatcattcctggtcctcatctgtaaaacagttcaattaatagccagctaggaagccatgatgggaagcacttgcggctgcttatataaagcactcagcacagtgcctggcacgaaggaagctttcagcaaatccatgtctggctctccaggcgaagggggtggggcctgtttctgtcttgcaaaagtgaaatttgctatgcgtgaaaccctaactccccattccctacagcccctggcaaacaccattctactttctgtctctatggacttcattcctccaggtgcctcatctgtactttaaatatgtgataccctgggaaggcagtaagatttcatgggaagaaaagcttcccaaagacgttatccttttttaaaaatgatgaaaggtgatggtcacagtgttgaagtttgaaaaatgctggtagcta

SEQ ID NO: 477996 - DNA, 617 bp, Homo sapiens
tccgttcaaagttgagaagctctggtctaaactgagacctcttcaggagccagtgcactactgtgatacatagccagtgcactatggcagtacatagccagtgcactactgtgatacatagccagtgcactatggcaatacatagccagtgcactactgtgatacatagccagtgcactatggcaatacaccaccagtgcactactgtgatacatagccagtgcactatggcaatacatagccagtgcactactgtgatacacagccagtgcactatggcaatacaccgccaaaagcctggaaagggagggaaaaaaagaaacacccttggacaaaacctcagcagccaagttgagactctgagccatatgcatgtctttgtgtgggttgaaatctattttctctgggttcgatggattattataacacccaaagttttccaaaaaacgtcagacaaggttaccacagcaattaagctgtctgccatctgcaagaggcttggcttaaggtttactgaagttaaacatgttttgaaaagaaaaaattaaggctgtcgatgttttgcctatcagtcaagctcagcaacattaggccttggagactcttcagggagagtc

SEQ ID NO: 477997 - DNA, 790 bp, Homo sapiens
ggctccaaacggcaatagcaatgaagccaagatattgtgccttaagttctcaatggcggaagagtgggtcctgggaagctgttccattctccagcgaacaccacttactacctaatgactgttcccccatggacctaaatgctgacccttttcacaagacagtgctgaaagcgaagaaagaagttcctgcccctcctaaagccaaagccaaagcaaaggctttaaaggccaagaaggcagtgttgaaaggtgttcacaaccacaaaaaaaagaagatccacacgtcccccaccttccggcggcccaagacactgcaactccggaggcagcccaaatatccttggaagagcacccccaggagaaacaagcttgaccactatgctatcatcaagtttccgctgaccactgagtcggccatgaagaagacaggagacaataacacacgtgtgttcatggtggatgttaaagccaacaagcaccagatcaaacaggctgtgaagaggctctatgatattgacatgatcaaggtcaacaccctgatttggcctgatggagagaagaaggcatatgttccactggctcctgattacgatgctttggatgttgccaacaaaattgggatcatctaaactgagtccagctggctaattctaaatatatgtataccttttcaccataaaaaaaaagaaatgctgaaggctcctttactgttttatatattaattcaagttgttcaaatgcaatccaactaaatttttaatttgtctcactgttctcctcttaaataatt

SEQ ID NO: 477998 - DNA, 1063 bp, Homo sapiens
tgtgagggtaatcatcacatgaatgccttgtggactggcgtggtgggtattacttggaaatgccaattggtgcttccctttttgccctctaacctttcacttgggaagggtttggttgtctcagggaagagatgggacagcagaaagagaatcaactggggtcaggtctaggctttccatttccagggctgtcagaaagaacagctgtgcacagacactgggtggggaggcagatgtgagggacccattgccagcacatgcagagacagttcaggactgtgggggccttcaatgggggagtgggggtgcctcaccaggatcgatggcaatgaggtctcctcagaggggcaggcatggatatcaaccccctcggctcacctcagcccctccccaaggcaagaatgaggcaagtcccctaaacctcagctgcagctcggccagtggactgagctttagcctctgccattgatagggtgagggcttatggtggaaattaagccatgctatggaggaatgcacagagctgaatttctcacacacctccattcactgacagagactgatacctgctacacaagtacttatggagatcagttctgaagggcctggcaaaacactgggtattgcagattgaaaaactgtggctgatgcagggatgcatgggtcggcccctcccctcccttccatcttttttctgtctagtctagtcacaagggctctaggtgaccatgctggaaggtcttgatgctacttggtcatctgaagactattggaatattatcacaaatgtagaatctgtagaactaaaagatgagtcgcctttcctggtggcaattttgaaagggggtatttttttttttttttttttttgccagcagctacccactttgcacagagtgcttggcccattgtagaaggtgcactgaatatttgctgatggaaaagaagaaactctgtgtttctttgggatttccaaataatttagcctttgtttgagaggcaagtgattgagccaacatgggtggaatttcacataatcttaggggaggtctttcatgaaatg

SEQ ID NO: 477999 - DNA, 748 bp, Homo sapiens
aggaaaaccagagacctttgttcacttgtttgtctgctgaccttccctccactaagattgaacagatggccaagttattaatatgtggcttaaacccagcactcagacatctgagaacacgcattggattcctgaggcgtcacagcaatgctcagcaggctggctgccacatggtggcccaagaagcaggtgcttgttataaacatcaaagccccacatctgacccaatggagacacccctgttcagagtacttgcaaggcaagaccaacatgtgcgagctcagagtccagcagtggcccatggcccctcagaaggccctggaggtgcccaagctccacctgcccatggaccccaccgcaggccagctctggctcagtccctggggcttgagcctaacagacagggcaggccatgctgcctgcccattctggggcccctgccaggcccagtatctcctgaagttggaggcattctggggccaaagagagaagtccaacatctccaggggtgagccgagaaaccaacctggactgccagaactgccaggcctgcctgaaggcaggggtttttcttggtacaacttgagagtagaacttagagccatgctctatgaaggctcccactcagttttgaaattgatgcagcaggaaacacgttctggacgaagacttttgaattcagacaagggcgatgagtgtccagagagccaggtacgaagttcacagaagctgtgatcagaacacatcc

SEQ ID NO: 478000 - DNA, 727 bp, Homo sapiens
cgtgcgtttgctgatggagataacttggtgggcggggggaagccagtgaactaggaatgctgattggtcagggaggaaatcacaaggcgtcggagctgtcttctggcgctgagtcagttcctgagtgggagccacaagataaggtctcacatccaggtcacactgatgcaaaaggtgaacgctgcaagctgccagtggatctaccattccagggtctggaggacggtggccctcttctcacagctccactaggcagtgccccagtagggactctgtgtgggggctctgatcccacatttctcttctgcactgctctagcagatgttctccatgagggccctgcacctgcagcaaacttttgcctgagcatccaggtccacagctggagcagtgggacatggcaccaaatccctaggctgcacacagcatggggaccctggcgccagcccacaaaaccgctttttccccctgggcctctgggcctgtgatgggaggggctgtctctcaggtatgtctttatcagcagcatgaaaataaaaaaaaaaaaaaaagtaaagttttactgtaaaagttttactagtaaagttttactagtctaataaaactcactagtttagaaggacagttggattaaattgtacctctgtaaatggaacaagttatggccaaaggccttaccaaattttagataaaatggttgcatatttgcacctcaaagcacagaaca

SEQ ID NO: 478001 - DNA, 496 bp, Homo sapiens
ccacctcccacttgggccgggatggactgcatgcccacagacacccacacagggctgacttcagcctgcttttgtcatcagtgcctgatttatggacaaggaagtccttggaaaagcactgttgccggctgggctgagggacctgtgacctttcaggttgcaggcacttcacctctatttgtggtcaccagaagggactgccgtgtgcatctgagcttcggaggcagcagggtccaaacattttggagtcagggacacactagaccctcccagctttgcaacaggaaggagctgcgagctttgggattctttggggaaactgaacattacccaagcagcatgaaaaaaatttccccaacccttgcgggagctgtcactaaccctgctcaaggagagtcagagtgcagacctgcctaaccctgccccaacctggttgtgcccctccacccactctagtagctttacacaaaggacataaattttggggagttttata

SEQ ID NO: 478002 - DNA, 2004 bp, Homo sapiens
atcctgctttgtatggagcctcctactctgggtatggacaggtatgctttttcctacagctgaggattaggaatgcatgtggaggcgcggtaccctggccgtccttgctggagcaacaaaagctacagggcaggggcaagtcacaccacactcagaaaacaccgattaaccgtagacatgtgtaatgacaagccaaacaaggttaggagctttgttgaaggggtgaaaaccccaaagtgtgggcatggactatattgggatatcaatcaacagggacttaaggagcaaaacctgcacgtttgcatcaaatgccccctgacctaccaggttcagagggctgatctggtcacactcctcgcttcttggcacattttcagtgtggcttcttgcaaggactctcacttgtttggttctttaatttccttttataacagcaacagcaattacccaacccttccaatgtcactttcagaccagatgctgtaccaagggctttatgtacactcactgtttgctccccacttgcaagtgttgagatggattccaccacggcctccagctggaggagcttggtggttcctcatcgcttccttccggatccccacagtgtctgagtatccccaatatctgctgcatttctcattcctgcccaaacccttgggcctttccactgttccttctagaaaacactctgctggacctggaggctgtggtgcggatgcactgcaatttgccgactgcaatttgctatgtgctcctcgttcatgccgatttaacagaatggggctagagaaaaacacaactgcacccaccggtcccacttacacgaatgaccgatatcatcaagtgggcacccgcactcggctgcaagtctgcagtgctgtgtattgccggcgcactggcttttccattctcctaggtgaagatgccaagaggttctcctcttcttggattcccaccatcctctccttcttcctgtctcagctgctcatggctgtggatacaaattacacgcacatgactcacacatttgcatctccacttcacttcccacctggactccagacgccttgatccagcttgcagcccgacctctctgctgggatggctgctacacacacaacgcatccaggacggaacctgtggtctccctcccgacctgctctctccacttcagtggcagctctacttctgtagctgctcaggccaaaaacactgaaagtccccctggacgcctctctttttctcacacctcatagcgaattaatcaggaaatgccgttgagtggccctccaaaatacttccagaatctgactgcctcttcctgtcttccctgctgcttctgtgggccaagcctctttgctcttcctagatattttcagtaccttctcattgctttcccatcttcccttacactctatctggaatgattttttttttttttttgacatggagtttggtatttgtgtatctttctcccctgctgcaccccaagtgaacctttcccatcctgggcaggcacagctcccctgctgcaccccaagtgtcttcaaaagcaattgcaaaaaactgaaaatagacaggtgggacttgattatactaaggagcttctgtaaaagcaaaataaactatcagcagagtaaacagccaattttcctagaaatagatcctttctaacctaggtccccagatttattagtatatgggtgttcttacactatttcaaatctcattttgcctgtagttatgtcccctttttattttatattatatttatttatatattttctctctcattctcttggtctttctcttcttcactattttgatgattcttgccaaaaatatgtcttcttaatttttgtaggtctgggaatcagattctgagcctctgagctttgcatgctggggacttattgaagaatattttcttttgaggggtgagaggaatatgattgggtggagggggaaggtaaactgtgattgagttgcccttggttgaac

SEQ ID NO: 478003 - DNA, 684 bp, Homo sapiens
tagttttggttttgtgaacaggacggcaactgctgaccacatacactcgctctctgctcatgctgcatcctcctctgctgaaactggtgatctcaccctctcctgccaatttcttccctgaacatgagacttcctgctcaagagatggggcagtccttgttcttgccaccacctggcagaaatggtggatgtatttccggaattctctattccggttttcctaaagaatgcttgctgaacacggaggtgcacccagcgcctataaataccgctgccttggtaccctgctggcgtagcagcagctctcagtacagccctgtgccaggaacacactgggttcttgttaaaatgcacactcttgggcctccgccaggcttgctggatcagaattgtgaaaactccacagacatgtatagcattgtttctaagggagggtgctctctgatttctagaagtcttcctacaactgtgcatttagaattacttgtacctcgtgtccctgctccaccggccttgctgcaaagcacagagaagagtttgagatgctcacggtggtgccatgatgaatgccaagtgaaaggtcttgacaccaaagactccactgtccacctggcatcctaccagggacactcttaattaacccttccatattttagatgggtcctaaagcacattgcattcaac

SEQ ID NO: 478004 - DNA, 671 bp, Homo sapiens
tgcaagcatgctagctgtcaagaggcaccccagcctgaacacacattgcatcctctcccacagatgggccctgggacgacatctcctcccattcatcctcgtgggacagtactaccccaataagaccagttaccagatcaagaacgccaaagactacctggacctcttcatagcatatccagggacaaggacagtcaatgagcaatctttcaaccttttcctgtgcttcaacgtgccccatcattcgacttttctcaggttagccaaacactcttacgtgaccaatggggttctgaaccagaagcttagaacttggatcctagatgtgagaaatcattttctgtatgaccttggcgaagttgttccattgctcagtgaagtgactcttccaaaaggcaccagccaacaggagagaaaggaagaatatgggagacatacagggacagcccaattaaatgcccaagcctgtcctgccgatgaggactggctgcctggcctgcagagcctgcgtgtcacctctgcagcccctctctttgatgaaaaggcatcctgaggtgactaagacctctgaccaagagctaaagttggtttctgtgctggactccatagtggaccaccccaatcccccaccctctggggactgaagtactcattgtcccacctgctgagag

SEQ ID NO: 478005 - DNA, 734 bp, Homo sapiens
gaggctgcaacaggactcatctggaaatatgaagggcagctagacccatggagcccatcacacacctggatcctgtccacagggcatccctgacatctgaggcgtcctgcagatattcggaaatgtggctggatttccagagactagtcaaagccagagacatgaagttggaaatctccagcacatgtttgtccaagatcatgaaccctgaagacattccgcgggaagtggggagactcaagggggaatttggacggcctcacgcagtccacaggccgatgggaaggggtcagcaaactgaagaagaagcccccacaccagagagctgcaaacagcgctggaccaccggcattttaactccagctggcttgcaaggtctggtcagcgggtatgagccagctggggtgatgccaggaggtccgatggtcagcaggcatgtatggagaaacatgtaggtgggggtgggctcagacctgtccctactctggctcagttggtgtatgtgggtttttagttttgtgctctggtgtttttgtggggaatgtagggagtttccaaagccatgccaccgtctgcttctttccgctagatgttttcatcagcaaacttgctaagcatcacttagtgatagaaacgagtaccacagtccatgagaaattttcccttgacccatcctggtaagcaccaaattgaaacttgcagaaaatccagggttagttgttctttgcagaact

SEQ ID NO: 478006 - DNA, 756 bp, Homo sapiens
acagctgctcttatttgtagtgtcatagaaaactagaagcaaaaggccacccaacagagcatcgttataacatgtcgtttggtgcagacgtgggtctgcaaggccaaggacaatcaaagccagaggtcttgagactcctcaacattcagagaattggcctgggagctgaggctggcactggagagaacaacaggttccccaaacacttaggccaagtcttgcataaaggcatgattaggaatccaaatgcctacaagaggagtgaaggtgttcttcactccttcaggagttcaggtacttgtcccgctcttctaagcattccatcaccaggtcactggtcctggcaacaggtctttcaagagctccttgagtactctcccatggcaggaccttgtgcattcctgcatcctggcatggagtccggagcccggcatatgttaagtgttcagtacacatttcccattccagactccttggggagcctggacaagcccttcctgctctttctttaaatttttgctttaatttctagatgacggtttccagtctttctattgaatttttcaattctgctatcatgtttttaatttctaagaactttacttttgatctttgaatgttccttttagaaaaataacatgtattctattattacagatgtaatattttttatcttctctctctgagggtaatggttgatttaatgacattgtcttcttgccaaagagtctttttcttttatgtcactattttttc

SEQ ID NO: 478007 - DNA, 448 bp, Homo sapiens
tcttctcggcttagcggctgaagatgacactgcccaatcaccttggaagccccctagaccatcacggacgccgagcttcagcctacccctcgtgtctgcgtgcagcggctgccgctgctttaatacttttagaggccctcaaaatcacaaactatgctcaactcactctctacagttctcataacttccaaaatctattttcttcctcatacctgacgcatatactttctgcttcccggctccttcagctatactcactctttgttgagtctcccacaattaccattgttcctggcgtggacttcaatctggcctctcacattattcctgataccacacatgacccccatgactgtatctctctgatccacctgatattcaccccgtttccccatatttccttctttcctgttcctcaccctgatcacgcttgatttattgatggcag

SEQ ID NO: 478008 - DNA, 1559 bp, Homo sapiens
gtaaaacctagcactggatggcccccgcagccccacactccaagcagcaccaggtcagcactcctggactcaggcaccaggccaccatctgcaaacatcagttccaggcctgccaagtgccaggccagtccctgcaggcccatgctccagcagacccaggatccaagtatgacccagtagagcccagcgctggactagccctcatggactcaagctccaggactgcccctgtgtctccaagcaccaagttcagctcagtgcctggctggcccctgcagactcaggctgaaggtctaccccagagccaggtcagcccagtggacccaggctccagactggtccctgcaaacaacagctccaggcccatcatcttggattcaatcaactggtctaccacagcagatctaggttccaggcgcgactccagagccccaggcaccaggcctccttaactgctgacccagtagagcccagagctggactagccctcatggcctgcctgtctgaagactccagcagcaagtctgccactgatcacggcagatagcctgccccaaacctctgggtggtctgactggtgaagggctttcccagacaaagccagtctgaaaagactagaataactctcctccgcttcttcaaatccacagactgacatcaacataaggcaagaaacatgaaaaatcaaagagagatgacaccaccaaattttcctttcttgaaatgcccatgacagttttttttaaatcaaaattataaattgatctgggaaatgtttcctgatcttctattttctgaaacttttcataaagattgctgttatttatttcttaaatattctgaagaattcaccagtaaagccatcttggtttggatggtggaaacaattttactgcaatcaacttgtttagaaaatactaaacatcttcaggttttccatttttttttttttgtcagttgtagtaatgtgtgtttttcacatcttatttaattttttaaataattgtcataaaatattaaataataccctcagtcctttaacaattacaggattcttagtaatgtttttaaaaatatgttgatatttgtaatttttagattccctcatttttctgaagtactctgcaagtggtttataaatatcattagtgtaaagcatctacttttggctttgttgatattctctgtaagatcattacttgtcttccagattttttcaagatctattttttgtctctggttttctgcagcttgaatttggtatgcctagatatcctttttgtggggctgttggttgagggactgtgttttttctagcctttctgtatgccttgtaattttttgttgaaagctgaacataatgtacctgatagtaggactggagctttctcttgatttaagtaaaggatgagaacttctagtctctttacctgtcagagctgaaaccagaagcctctattttttttttaacatgttctgacttatggatcccactgtctgactaataatttttaaaattatatttcaggtattgcatataaataaatctcaggtgctct

SEQ ID NO: 478009 - DNA, 663 bp, Homo sapiens
tccctgaagaaactaattttcttctgaaaagagctcgattgggaaagtcctacagtttctgttttcctagaggaaatgaccaacagtatgacgatgctttgtcttctctgccttcaggccttcatcagtagaaagaaacctttccttagaagagcctgtgccttgcagcagtctcagctccaagccagtcctgatgccctggaaccctgttgccatggagctactgggtctgagatgctgtttctgctgtttgaagcttactgtctccatgttacagacaacagcctgcagccccagggatgccaagggaggagtcatcaccgcttctctgttgatgaacatgtcttccggttcagactacttaaaaattcattctcagttgctaatgaatatccattggcaaaatatgaagaatcctatgacaacattctttctgtacagaagaaaagcttggggagtctgtatacactttcattaaagcaacaattgaggtgtcaagtcacaggtctttgcttcattaactttcatattcagcagctagtgagactggaagaacggatattcctttggaggtaaacagtggcggacaaattagataggactcctccctcacagaggcagagacagacactgaataattacacaaaatgacatattttcata

SEQ ID NO: 478010 - DNA, 625 bp, Homo sapiens
gcacgcactcagctggatgctgagcagagatcagcaaggaaatttacctttgctggcttggtcaagagatcctgagatctcagctgcagccttcagagttaaattcagtgacaaaagtgttgtttctcatttatattctctgtatttgaattcaggtatctgtgaacctcgggaaatctttgctttttttctcccaccttccttctggtcttacagtcagagaggaaagggatataatgtttattgtctaagtgataaacataaattgaatcatttaatgggctcagacctaaagaaaagaaacagacttcccaaaagaaaggagtcatattgtttctctccaagaacaaaatggcttgtactctattcattgggtattctactccatttgaaaaggcagtcagcagttgagatttgccttgtgattgtcttaaagggcaaacttcataaagaaagaccaatgcacaagtaaaggcttgagctctataataataatagcaagccctcagatggaacttgctgtctgtcaggcactttacatatagcaatttatttaatcttcataacacccctaagagataaatattctttctatttcattttactgttatggaaattgacacat

SEQ ID NO: 478011 - DNA, 799 bp, Homo sapiens
acacataattacctttgccctgaaagcaatgcagtcggatgctttggcagcacactcaggacagccagggctgcagacatggcctccaaattcagtctcagttaccccaggcagaacacgggaattgacccttccaactcctccacctgcctctcgatcccagaatcttgccacctgctccagtgatggttatttgatgagcctgaaggatactgtgattcctatgtttgtctttcttgatgttatcttgtgttctcatcactccttacacatggcaccattggccaattgctgtcttttcaactacgtttattcgttcactgagggccctgcaaaccctcctattgggacagcttgtttgggtgaaaatgattttcgcttcccttggctgtggagacttgctctgtaccagtagtcatgaatagattacaacgcttttgggaagtaaaggattatttgctgtttttaacattatatttcttatttatctgactatgtatttgtagtacaacagaaaaataatttctttcctcgaagtcctagaataagcggtgaatatttccttgatccattcccagcctggtggtcttcggtactgtcagtttgttgcaaatagactgtgtagaagacattgcatgacccagttcttttcatttattccaggtcattggtaactagatgaattctagttctgtagaaagtttagtatttgtgtagacatgggttatgcttcaggtctatagctttgtttgaaagtattaagtttctcagcaaagtaggtgaaggcttgagggttata

SEQ ID NO: 478012 - DNA, 860 bp, Homo sapiens
acagcagccgtacatgatcccatttttatcaacagctttatcttatattatgagctatatttccacgtgcagatgacttctcaatctaatgtcatatccttggaatcatatagtacgtggccttttcgactggcttctttcacttaatgccatgcatctatactgcaatagagaagggaaggatgaatacccagaaatgaagaagaatgagcatggagaaactcctaccagctgggagaggcagtggaaagatcccctggctccagaagataaaggggagggtgagagccagagaaagagaagctgtcttttgagggctactttcaacaagacaccaagcagtaggttagaaaaagccaagaaagatgaccttcaaaaaagcttccctgagctctgtgcacttcaggctgcggcagtgaagactacaatgactgctgttacagtccggtgccgctacctccattcatacgaaggtaacagcgtgattgcttttccaccgtcagttccaatgtcaacacagtagaaagacaaatggcttcataatattattatgaaaacagtgtttagtttgtggatccttgggaaagtcttggaaatccctccaagtctgcaactccagcgtggagaactgctactttaaaaatacaaaacaattttgttgttttcaaaaacactttaaagagcaggtagataaaataaaaaatatcaatatttctatgtatgtaataactaatggactagatctaaaaatgttcttaaatgtttatcacccagctgttttctccttttcacaagattcccttatttagcacctctttgggttgtggtgtcaccttctcatttgctcttctcttgcacat

SEQ ID NO: 478013 - DNA, 548 bp, Homo sapiens
ctgagtgcagcctgctaggggtttcagctgagatatctgctgttagcctgatgaagttcccttttgcaagggtggcaagggcagtagcagagaggctttcagttgcccctgaaggctctgtccagggagttggtgagtttgctgctggctcaatagctctggcagggggcggctggaggcctaggcctggaggacctgcgtgggaggtgcaaagctgctaccagtggctggctagaattgcacgccagtgggtcttatcctgtgaggtactgtcaaagtggggcctgccaggtgttcctactcaggcccctggattcagtctctttcctagggattattctaaaatttatatggaaattcgagggaccctgaatagtcaaaacaattttgaaaacaaaaaagaaagttgggagaatcccacatctcactttcaaatcttactacaaggctacattcattaagacagtgaggtagtggcataatgacacactcacagacccatgggatagaactgagagtccaaaactaaatccgtatgtccatagtca

SEQ ID NO: 478014 - DNA, 591 bp, Homo sapiens
acttccttgcaactcagtcagctcctgccagtacatcctgtggcaaaatatcagctctccatcaggtcatgtatgctcctctccatgatggttagtactgagtgtcaacttgattggattgaaggatgcaaagtattgatcctgggtgtgtctgcaccaggcagcggcagtgatggtgaccacacccccgcccccaaccctggggagctcagtagtcttaggcagcaggcagccgaagtgatggcgaccgcctatgcccctgggagctcagtcatcttagttccaaatgttatcatgttttctttgatggatcattcaactaacaggttgtttggtcctgttgaaataaggttgtttggtccacttcctgtaatcagctggcaaactatacccacatccattaaccccctccccactcaggacctactgctgactccagaccactggattatgccaccccttttctttgatgagttccttctcattgttccctttcctttgtcctctgagatcactctctgccacctccaaaacatcagatatggctgaacctttctggtgagtgggttgaagtctttcctttcttctctt

SEQ ID NO: 478015 - DNA, 765 bp, Homo sapiens
ctggctcttttccaggatgagggcatggttgggagcttcttccttttcttctggaaacatttgttgctttctttggactggcttattaaattacagtgtcttagtcggcttcttgctgctacaacagactactacagacagagtaacttacaaaagctagaagcttatttgactcacagttctggaggctggaaagtccaagatccaggggccacatctggaaaaacaagctatcaagttgtgaatagccctatggaggaaccacataacatggcagtaaaatctggagataaccttgagcatttgagggctgccaaagtgacacaaaactatagcaagtggcacactgtggaaaagggaggcatgcacaaaactggaccaggtgtgtatggtctgtttgagtggacaatggttcaggccctggattctcttacacagatgccaacaagaacaaaggtagtgcctgagaacactgatagaatatttgatgtgtccaaaaagacacatccttggaacaaaaatgatcttcgctggtgtgcagtaaagaattaattttgtccaaagaaagatttggccttttccctgggctcctgggagaacttaagaccatattcaatccttctatgtagcactgagaagggggggtctttaaggaaattggttacaaggaaagtagagctttggtgtttttcacatttttatttatttgcaaagatgcacatgccttaaagctttataaagatgccatataaagtaatacatata

SEQ ID NO: 478016 - DNA, 1081 bp, Homo sapiens
tgaagacttctgacatgcccttccactgacaccacagggcaggagtggaagtggcctcacccttctgcgggcagcggggagagtttggactctccactaggcctcctctgacgccactaaagggtggaggggaagatgctttagtgccacagcatgagggtagaatctgatgattatgtgtcttgggaacgattctggtgcctggctggaattccaagccaatgggtcttaccctgtgaggtcccatggaagtgggccctgcaggctgttgctactcagccccctggattcagcctctatcttgagagcatgtatgggggtctaccatcctgctttggtgaagttgccactagtttagctgggaagcatggaaaaccagagtatctaaagctcctgggtctcttcacatgcctgagtggctgctctgttgagactccatgtagctctgcgtgctttgtgaggttggaggtaactgctattgaagaaatgcttcaggccctggtcaacacaacgaaagacaatgaacagaaatcgccatttgatgtgaagagtgactttaagtccatagtgagtaaacaagaaagcaggggatacagagagccaagtggacggtgattatcattcatagaattgatctgtctgtaggcgtcgtatctctattagtgatctctctccacaacaacagaacatggggttcctggcttagcaaggactgaaggaaacactttaccgtgacacttgagtgaggacagacaggtgagttggaaaggggcaaaagggcagttataggacacgatggagaaaatcaatcttcaaagcttcatgataaaatttcaatatttagtttgaattatttccagaataatagacgtgctcaaaataacgacactaaaaatagtctttaaagacatgtaattcttggattgtctgcaagttgggttaataagaactgttgtgtcctttgataagcactgataattttattccattgtttaatctaattctcatgttggtgtcccatcattaagattttgtaacatcaccttgaatcttaaaagcaaaagtattcaagatgggtctt

SEQ ID NO: 478017 - DNA, 868 bp, Homo sapiens
gaaacaatttgatgggctcagcagaagacaggaagatgtgggaaagtttggaacttcctagagacttgttgaatgcttttgaccaaaatgctgatagtgacatggacaatgaagtccaggctggggtggtctcagatggagatgaggaacttattgggaactggagtaaatgtcactgttgctgtgctttagcaaagagactggtggcattttgcccctgtcctggagatctgtggagctttgaacttgagagaactgaattagggtatctggtggaagaaatttctaaacatccaggcattcaagatgtggcctggctgctcctaacatcatacagtcatatgtatttacaaagagattatcagaaattggaacttatgtttaaaagagaagcagagtataaaagtttggaaaatttgcagcctgatcatgcagtagaaaagaaaatccaggccttgaggcctaggatgaaaaaatggtttcatgtgcacggcccagggccctgctgttctgtgcagcctcaggacatggcaccctgtgtcccagctgctccagctccaaccatggctaaaagaggccaaggtacagctcaggccattgcttcagagggtaaaagctccaagccttggcagcttccacatggtgttgttcttgcaagtgtgcagaagacaagaactgagctccagtgtcagatttctgtacttgtgacagactatggccctcaaagcatcaactatgtcctatctgtcccttcgcagaaacaaattggcctcccgttgtaaagtctaaaatctgcaaattatttaaactgtctaacctaaaccctttattctatacatgcatcagctaagttataatagcagcagcc

SEQ ID NO: 478018 - DNA, 631 bp, Homo sapiens
acctacggacaaataaactgtgaatgaatgttggagtggagtggctgcctggagctgatggaaaggtggaaccagcacacctgtggccaccaccactaggactgcattgtgggagaactgaagctagcacaataatgggtcttgctcacagcctacaggaaccactccctggctactggttatgtttagtcaaggcccgagggttctgcaatctgcaggtggcaaagccaatcaggcttgtgggcttcccttcaaggtggcgagttacccccagttccagcagaggagtctctcaccatggccaccactgccccagggccatggacaagtactgcttggctactggtaatgttcactcaaggcccaagggctcttctgtcagctttggtgaatgcttccaggactgggactctcccttcaggacaccaggctcccctttggccccaggcaggtctagaaatgccatctaagagccaaggcctgcaatcaaatatcccaagagcctgcttggtgctctacttccttgtagccaaaccatacttaagcttcaagacagaattccctttactctcccctctcctttactcaagcagaaggagtctcttcccagagccaccacagctgggaatgt

SEQ ID NO: 478019 - DNA, 558 bp, Homo sapiens
tcgtacattgccaaataagtaatttgaaaactctaggcccatatgggccctctatctttgttaaactcggtggataaagaattgagaatcacattcctgtattgtatgaggaatttcactttatcaacatctgacataacttcagaaaatgctgatggttttgaaacagtttgttgctcaatctaccttctgagagctcaggctttctggctggaacctgagccagaccaagcttcttctgttctggaatgcaactgctgtgctcctaaaacacaaaccagttttataatttttagtgatttccatgacagtgagattgttaagtttcctgaagccttcccagccacgtggaactgtgagtcaattaaatctctttcctttataaataacccagtctcaggacaccgatggatatactaaacgtattcagaatatatttagtcaaattattttctcattcaatatttgaaaactcactgtcatcattattctttttgatatttacattagccaaaaattaactagtgagcctctttcaaactggttcctgcatctttt

SEQ ID NO: 478020 - DNA, 858 bp, Homo sapiens
gcatgttgctgcctccttctcccagctgcccgacgtaactagaaaaaactattttaaaatttatatgaaattgagggcccagggcccagatgggccagaagtggccagatgcaggcagggtgggcacctggacacctgccttgggtgccttgctgcccagatggtggcagtggtggccacacatgcggcccagcttctgtcctcacgttcctccagctcccagcccccacaccatgtcaccgcctgtgctgcccaccgagttggtgccttcagagtgcattgtggtgctgctgtcctgtgcattctttgtgctcagctcaggcctgctggtggccatgtgcaccctgtggcccgacctgtgaagccaggcacagtgcctgctgctcttcctgtcactggccaacctgctctcagctgcctcctacttctatgggatgctgcaggacttcgcaggctgtcatggaactgcatgctgcaaggtgtgctgtccaccctcaccaacaccagctcattcttctggactgtggccatcatactatacctgtacctcaggatcactagcaccgtgcaggccctgcaccaaccatctgctctgagccttccatgtcatcaggtgatcttgactttccagagttcagctgttctgagattgaagtcaggggtggagggctggtctgggggtctgggagtccacctggagtctctctgagagtgaggaaaaaccaagaccttacccagcagttcaagcatctttcaagtaagcctcactgaagagggtcagcccttccctggggaatgtcaggttttgagaatctcatggcattatgtgctgaactgtgggcaagaatcctagggctg

SEQ ID NO: 478021 - DNA, 1218 bp, Homo sapiens
aggtttgagatgaacggtaggctgatgagaggattaaaccctccaagttcctctgtgactcagtggccctcatttgttccacccaaagtgtggctgtcccagactgtcacaacaacaaatctatctgcttccttctggaagctgcttctgcttggtcatgggagtggctacggttacggctactttgacttgttgggttgccaatcctacttctttgttatctctgtaaagctgtcctggaccgtcctcatcttgggaatggtaaaaggctggagctacacagtctgtatgtcagtggggagaagaatacatttcaaattaaccaccatcgaggaaagttataattttctagtattcaataaacatgaacgaaatcattggcttatagagatgaaatatgtgaggagtaatataacatttaagaataaagtaactcgcacatacagtgaagaatggaaataccagcttatggatacagtaatatgtgaaggcagagaaacaaaacctttccatattacattaaaaaaagctcaatgaagcataacattttctcaaagcagattgcatcagcgccatgcaagcaacttaaaaacataaggtggcccttatttagtgaattacattgactgtaatgcagcatcttccaactttcttgtccatctcataaacaaatatttaaaacacaaacagtgcaaaacactgcactgtgaggaggggttgaagagaggcaaggaggctttcagaaaagtgaaccagtgtggtgtggttcagagaataatgatgggggttggggattaggatgctgtgggaaccttcacaaagcctcttacttgatcccaagggaacaggtaaggcctccaggaggaagaagcatatcaaggttgggctgtagagctgaactggtaaagttgctttgctgtcttaatttatcctagcttcctaaaatgaacgctctaataaactgtcgcttggactaaaaataaattgctgtaacaaaaggataacgaccatgctttgcaaatttgctaattactatttgttcttgtagtaaggattctctttttgtctcagaggactgtgacattattgcctctcaaaacaatgaatcatttttcactaagaagatttctccaagtgttcacttcaccttgtctttgaaattgccagccatctattctccaaggctgattagtaatgaatagaggaggacctttttaa

SEQ ID NO: 478022 - DNA, 634 bp, Homo sapiens
ccctgtaaaaccacaggggcagggatgcccaaggctttgggaggccaccccttacaccagtataacctgaatctgacaccagtgacgaaacagggacctcagtcctgcagactgaaggcactggattctaccaacacaggaaacagccaagacagttcagacctccaaactacagaacttctctggatggaagatcaaaccagccacaacattcccttatgccaaagcctaatccagagcaagcccctaactctcttcaattctaccaaggctgagagagatgccattagaaacattcgcaattcacaggagaaaggtaaaatatcaacattaatagaagtttggaagaagccgattccaactatcatgaatgactttgagggattcaagaattcagtggaggaagtaactgcagatggggtagaaatagcaagagaattagaattagaagtggaccctgaagatgtggctgaattgcttgaagatgctacgaacattgttgaaatgacaacatagaatttagaatattacataaacttagtgataaagcagcagcagggtttgagaagatggacttgcattttgaaagaagttctacggatgctataacagaatactatagactgtgtggctt

SEQ ID NO: 478023 - DNA, 756 bp, Homo sapiens
aaaatcacaaagttttccagcgcttatataccttgtaagctatatgtctacattcagtaccgaagcaggtgttatggaagactgcattagtgagacctggcctgccacaggaccaatacctggaaatagtggggtatttttgtgctcctcagaatattcacaaataggccctctggtctttgcctacaatgctgtctaccgttcttcacctctaccatatctacaaggtgctatgaagataggagacaagtacatttgcttggaaaactggtcacctaattcccaaaaggacagagctaacattatatgtctcagcatccagtccatcctagatggatttcgattctatctagggaatctcatcaaacaaccagggaggatcaaccaccagagaaaagaagagactgggagtcatcaccatgtccccaacagaattttcatctatccttctgaggacagctccaagtgattacctagaggactttgcttcataataagtcaaccttcattcctgtgcagccccacctctcaccttcccaaaatgtctgcctcccatcttctgggtccattcattctctcaaatgatttgctgcccctcaaaagaattttccacgttcctcatctctcccctcccctgggaaaaagcatatataagcttctataccaccctgggttattgggtaatcattctccagcaattctcccatcctgtgcacatcaaataaattctgtatgcgttttcttttattaatgtgc

SEQ ID NO: 478024 - DNA, 1550 bp, Homo sapiens
gagggccttgcacagggacacgcctcgagtggtgagggggtgtccccaccacagacaccaggtgagggggtgtccccactagagagacagcaggtgagggtgtgtccccaccacagacatcaggtgagggggtgtccccaccacagacaccaggtgagggggtgtccccaccacagacatcaggtgagggggtgtccccaccacagacaccaggtgagggggtgtccccaccacagacaccaggtgagggggtgtccccaccagagagacagcaggtgagggggtgtccccaccacagagacaccaggtgagggtgtgtccccaccagagagacagcaggtgagggggtgtccccagcacacagacaccaggtgaggggtgtccccagcacagagacagcaggtgagggggtgtccccaccacagagacatcagatgagggggtgtccccaccacagagacagcaggtgagtgggtgtccccaccacagagacagcaggtgagggggtgtccccaccatagagacagcaggtgaggggtgtccccagcacagagacagcaggtgaggaggtgtccccaccacagagacagcaggtgaggggtgtccccagcacagagacagcaggtgaggaggtgtccccagcacagtgacagcaggtgaggggtgtccccagcacagagacagcaggtgaggaggtgtccccactacagacaccagggcccaccaagtagcccgaagtccttagcttagaactcaagcctctgtgatcccgcccagttttgtttaacccgcatggcaggcacacggggagagaggggaactggccatctgtgggccctcgcagctggtgtggcagaggcaggcagcgaagacgctctgtgtccgtgcagtgaacccgctgggtccgttctggcggccatcacacgtgctcataggctgggggctcataagcaacagaaacctgtttctcactgttctggttcactgttgtggagctggacacccgcggtcaaggcgcccccagattcagtgtctgtctgctttctggttcatcgatggcaccttctggctgtatccacgtgcggcagaaggagcaaaggaactctctggggtccctttcataagggcgctaatcccattcgcaagggctccacctccccagagccccacctcctcacgccagcacactgggggagagacttcaatatctgaatttagcgggatacactgagaccacagcaaaaccccagagacccaggctctgccctcccagtacttcctgacagcggctgcagtgtgtgctgcactggaccgcccgagggccggaggggaggcagagctcagggaaggggcgggcaccatctaacacaggagggggcccaagggctgccttgcagcagccttggctgccagcctctgctgttggtaaggacccagctccccactcctggactcccccacttggcatggggtgcatcctgggacttctgcagctccggccgctccctgcagcgggggctgataagctcctcctctccccaccacacccc

SEQ ID NO: 478025 - DNA, 1544 bp, Homo sapiens
cagccccagggcccagtcccacagggcttacttaagcgcgtgtccactccatggccgcacccgtgcatctgctgcggaacctggcgggcacaatgctaggggactctgtggacctggaggccagccaggcaggcaaggacagctcgcctctgcacagtgatttctgcgaagagttgaaggctgggcgtgacctgaagcctggggccatgggcattggcaaggcagccgctgtggctttactctgccggggccctgggcagccttgtgcagttcgacgccggccctccttctaccgcctgggggcctggctgccttcgcacgagggctccgaggcatgctcatcctacgtgactgcccgagtgtgcacacgcctggccgtgtgtgggcgtgtgcctggggcccgagctcaggagcaaggcctgcgggctgaacaggagctgggggaggagcaaggggccgttcccctgccccacagcacagcacacgaccccgccttggaacctggggcccggggtgaatcgagggtcctggagcaagaggggctgctccacaggagagcctgtcccgccacccctcagccaccagattcggggctgctggacttgttctcaaacctgcacagcagagcccggcccggcctggagagctcaggacagcgcggcttcgggccggccctgcaggagtgccgggggctgctgacggtaactcacgtggccgtggctatccctgagctgctctgggacttcctgggtttccgtcagccccctcttgaccccggagctgcccaaggacacgagcctggagacacgtgtctgatgttccgcagtgactgctgcatgctggagtctgatgtggcgggacaggcccggcgtatgcttggcgccacggtgtcctttctcagccactcggcactggcaggcagggtgtttggaacagcattgcagatgggtgtcaatgataagtcctcaatctggtccggagtcaagtcccacctcctacctccatggtttctacctgaaaaagcactgagaagactccgcagcatggctggtgtccttataaagagaggacaggtggacagagacaggcacagaggggcgcccatgaggacgcggggagaagacggtcacctgaaagccaaggggaggagctcagaggaactggccctgccacgccttgaccttggatttcggcctccagaacaagagaagatccgcgtctgctgctggagcctccggctggggtcctttgtggtggccaccccggtgaactcacacaggacgtgtgaactcacacaggacacgcaaaagtttccccagtgtctcctctggaacttcctggtgttttgaagaaggcactccatttctgaagggcactggcagcatatttctgtgtttagaacttttcccatgcatatttttgaacaagtattttaggaagataaatatcagcacgttttgctgctgttgagagggtctgtggggtctgtttagaaaatacgtgatggttctgaccacagagccccgggcatcaccggccacacc

SEQ ID NO: 478026 - DNA, 1557 bp, Homo sapiens
caccaccaccatcaccaccaccaccatcaccaccaccatcaccaccaccaacaccaccaccatcaccatcaccatcaccatcatgaccatcaccatcaccatcaccatcaccaccatcaccatcaccaccaccaacaccaccaccaaccccaccaccaccaccatcaccatcaccaccaccaccaccatcaccatcaccaccatcatcaccaccactatcaccaccatcagcatcaccaccatcaccatcaccaccatcaccaccatcaccaccaccaacaccaccaccatcaccaccatcaccaccaccaccatcaccaccaccaccaccaccaccatcaccaccaccatcaccaccaccaacaccgccaccatcaccatcaccaccatcaccatcatgaccatcaccatcaccaccaccatcaccatcaccaccaccaacaccaccacgacaatcaccaccaccaccaccaccatcaccaccaccaccaccatcaccatcaccaccaccatcaccatcaccaccatcatcaccaccaccatcaccaccatcatcaccaccatcatcaccaccatcaccaccaccatcaccaccaccaccaccaccatcaccatcatcaccatcaccatcaccaccatcaccaccaccatcaccaccaccaccatcaccaccaccatcaccaacaccaacaccaccatcaccaccaccatcaccatcaccatcagcagcatcatcaccaccatcatcaccaccatcaacatcaccaccatcaccatcagcatcatcatcaccaccaccaccatcaccaccaccaccaacaccaccaccatcaccatcaccaccatcaccatcatgaccatcaccatcaccaccaccatcaccatcaccaccaccaacaccaccacaacaatcaccaccaccaacaccaccaccaccaccatcaccatcaccaccaccaccactaccaccaccatcaccatcaccatcatcatcaccaccaccatcaccaccatcatcaccaccatcaccaccaccaccaccatcaccaccaacaccaccatcaccaccaccatcaccatcaccatcagcagcatcatcaccaccatcatcaccaccatcaccatcaccaccatcaccatcagcagcatcatcaccaccatcatcaccaccatcaccatcaccaccatcaccaccaccaccatcaccatcaccaccaccaccatcaacatcaccaccaccatcaccaccaccaccatcaccatcactaccaccacctagctactactctcgggggtctggatccttggcacgacagcagcctcagtcactcttccttcctgccgcctctgcagctgcctcctgctgcctcctacctctttctctcctgttcttctccgtagtaacactggtagctgccacccccagcccctgctggacacggctaacttcccagggcaggggagcagccccttcccacaggcatctctccctgcagagaagacgccccagaaacccacactgcagcgagggccagcgtggccccctgcctccctggc

SEQ ID NO: 478027 - DNA, 489 bp, Homo sapiens
cacccacttttccacatctgtggatgcttctgcactttgagggcagagaccgcaaggccccttccggagacggggtgccgaccagaggcccctccaagagacgggtgtttctcattcagccggctcaggctgactacgaattcagcctctgccaaaaatgccagaatccttcgtcgtggcaggcggtggtcacactcctgacccgggacttggaattcctggatggtgtgtgccgtgggggcacccgcacagacgaggccctccagggacagtggctgcccctccccaagcagccaggccaggcgggcctgccgtccacagacgctcacttcaagctgcctctgcccttgggagccctctggaatgaggggatgcagggggaggcctggcaggaggctgcctggtccttggggcaggtgaaaaacatgtcttctgcaggaggagggggtggtggagcctcagcaggcccttgagcggggcctccctgac

SEQ ID NO: 478028 - DNA, 864 bp, Homo sapiens
ggtgtctgccctgtcagaggggctcgtgctctgagagatggagcgaaaagtaaactttgcccaccaagaaaacctggtatcccaacagttgtggagctgctgtgacaccgactgctggctgccctggctccagctctgggctgacagtgacgtcatcctccagcactcctctccccagcactcctcccagtcatcccccagctgtgcttccggccctgagatcggtgccagttccccacagctgctgcaacagacggccacaaatggggtcatttacaacagcagaaacgtgtcccggctccggctggaggccagacgcctgcgatcaagggacctcacacttgggcactgcttggtcttcaggtccggaggtgaggcccagctgggctctcctggccagcagccaggagcaggagactttgctgcctgtcgggacttctgggcgccaaagccgcaggctaatgccgcctggcttcgtcagcacggggtaccttctcgagccacactaataggaaactcaccacaggactcacgcgttggccctgagaacaatggcttgtgccgccgtaaaaggttgtaatggacaaaaaaataagaagagtgtgtgacaaaggctgcaggaggcccttaaagtccaagggcagtataaccccccagggccggtgtggggctcaaacacaaccatggagctgtccactcctaaacggggcctgacaatcacaggatggcagatgcacgtgtgcttcgcctctttctgctgtaaaaatgcccctttgagtcagtttctagccggttacactgtagtatcagacacaggatctcatgtcccaccttccccagggtttcctgctcgagcggcatgtc

SEQ ID NO: 478029 - DNA, 712 bp, Homo sapiens
agcctcctgtccctgacgccgggcagggcgtgggagagctttcagtgcctgcgtcaccgtcaccgtagggacttaatgacgtttagcagctcccgggcgggtggcttctcgcgctctgcaggggtgacggctcgggggagggggggcggggccacggtcactgaatggggctcccacctgccagaggcgctgggccctggacaggaagtgttctggcagctggtgggaacagagctgcctccacccccaaattcctggtgggatttcctgtggagtctccaaggacctctgaagtggaaagctgtggagagcgaggcgtctcttcctctggggaaaaaggccttcagcgagcagaggcaggccatgggtccagggggcaagtctgtgtgtccgtgccagccgtgcacctctccctctggccaggccataggtccagggggcagacagggcctcgaaaggcagaaatcggcacagaaggagggagacaggaggatggcccaggaagagcggatggtgttggagaagctgctctgtggacgggaagagccctgtgggcccaggcctgaggacgacggagccccagggtcctggcatctcacgggcatcagtccttggatacatctcacaggaacttcggatcttcactgaaagcccctcctcccccaaccacttccgtccccagcaaacaccaccatttgtcaaggctcttaaa

SEQ ID NO: 478030 - DNA, 904 bp, Homo sapiens
attacccctgcccccagctccgcatgtcaggtttgctgccctgtcctgcctagaacgctccgcaggctgctgtctctgtaccccctcctgccgaataacgactgttggcggctctgtgggttcatgtgcttcggaattaaaccacagggcctgcttctcattgccactgatgctcggcttccaagcccccatcgccacccaccaatggctattcagtgtccgcaatgacaagaacaccctggatactcccagatcggctggctgtgatggtgctcacaggcccaggcaagagccagccccagatgggcccatagtgctgctctgcttagagccaatgcctgcaccaggcagctaccctggaggtgcccctgtgagtgggcataggcaggtacacccccagcagtggcaggtgcagcatctcgggcagtcggggggcatccgcacaggcctgggtgcaaactgcggcaaatcccatgattctgcatacaagaagggtggggacgtgtgttttccaggggaaatggtccctgtcgtgcatcagattctcaaaggggtccagcacccaaacaagtgcaggggtcactgggggacactggtgcaacagaagcagccctggactgggagtcggggccccactgccgaccagctccaccctaaaaactcatcactcaccctcgtgtttcctagcagatagtgggaagagatgcaggcccatcgtgtgcacagaggttcagagtgagcgcacttgagggcctgactagaacaaaaaaggcagaggaagggagagctggctctgagagctgagacttcatctcctcctgggatcagacagcagcgctcagctctcaggcctgctgccgtggatggaattacaccccaggcagaggaagggagagctggctct

SEQ ID NO: 478031 - DNA, 924 bp, Homo sapiens
tgaggcagacgcgggctcctgggcagcctgtggtgcatacggtcagtatgcgcagggcagccagcttatccaggacgaggcagcttcggcttttgctggataatgaaccacccctcaactcagaggtttcaaacaacacgtgtctgggtgggtctggctctcagctggtctctgcggatgggcatttggccagaagactcaatgcctcactcaactgtcctttgcttcactttcattttttccacatattccctcgagatcctaacagacacgcaggccccccagttggacctggtctcactctagatcctaacagacacgcaggccccccagctggacctggtctcactctagatcccaacggacacgcaggccacccagctagatctggtctcactctagatcccaacagacacacgggccccccagctggacctggtcttactctagatcctaacggacacgggccccccagctggacctggtctcactctagatcctaacagacacacagaccacccagctggaccggtctcactctagatcctaacagacactcaggcccccagctggacctggtctcactctagatcccaacggacacgcaggccacccagctagatctggtctcactctagatcccaacagacacacgggccccccagctggacctggtcttactctagatcctaacggacacgggccccccagctggacctggtctcactctagatcctaacagacacacagaccacccagctggaccggtctcactctagatcctaacagacacgcaggcccccagctggacctggtctcactctagatcctaacggacatgcaggccctgcagctggacctggtgtcttcttctccaacatcccatagaaagtggtcttgggctggtgccgagggaatctgtgc

SEQ ID NO: 478032 - DNA, 2542 bp, Homo sapiens
ggtgaagcgcttccggtccccgtgctggtgggactgaggagagcgccgtgctgccgttccggccacgccgtgaagcgcttccggtctccgtgctggtgggactgagaagaacgccgtgctgccgttccggccacgccggtgaagtgcttccggtccccgtgctggtgggactgagaagaacgccgtgctgccgttctggccacgccgtgaagcgcttccggtctccgtgctggtgggactgagaagaacgccgtgctgccgttccggccacaccagagaagtgcttccggtctccgtgctggtgggactgaggagaacgccgtgctgccgttccggccacgccgtgaagcgcttccggtccccgtgctggtgggactgagaagaacgccgtgctgccgttccggccacgccggtgaagtgcttccggtccccgtgctggtgggactgaggagaacgccgtgctgccgttctggccacgccgtgaagcgcttccggtctccgtgctggtgggactgagaagaacgccgtgctgccgttccggccacaccagagaagtgcttccggtctccgtgctggtgggactgaggagaacgccgtgctgccgttccggccacgccgtgaagcgcttccggtctccgtgctggtgggactgagaagaacgccgtgctgccgttccggccacgccggtgaagcgcttccggtctccctgctggtgggactgaggagagcgccgtgctgccgttccggccacgccgtgaagcgcttccggtctccgtgctggtgggactgagaagaacgccgtgctgccgttccggccacgccggtgaagtgcttccggtccccgtgctggtgggactgagaagaacgccgtgctgccgttctggccacgccgtgaagcgcttccggtctccgtgctggtgggactgagaagaacgccgtgctgccgttccggccacaccagagaagtgcttccggtctccgtgctggtgggactgaggagaacgccgtgctgccgttccggccacgccgtgaagcgcttccggtctccgtgctggtgggactgagaagaacgccgtgctgccgttccggccacgccggtgaagcgcttccggtctccctgctggtgggactgaggagagcgccgtgctgccgttccggccacgccgtgaagcgcttccggtccccgtgctggtgggactgagaagaacgccgtgaaaaaaaaaagcttggcccccagcagccagcagggactgctctcctctgggcccccacacacacgcagtggcgccccagctccacacctctttcctgcattcacgctgccccctcgcagccctcccaaagggccgccaggcacagggccatgggcatgctggtgaccgggcacagcttctccagcctggagccttcccgtccttggtgccgtcctgcacccgcagtctgtgccggggagctcagcgccctgccactccgtgtgtccagtagcccccggaccgcggtgctggcatgctgctgctccaccgtggttgtggtttggacaggactgctcacaggatcagcacagcatgctctgcctgccgcagagggatagcgacccgagagagaaggaacagcagtagcatcgtgcgtgggtgcagcagtggagcctgctggggtggagttgaagctgctctctggcaggccctctttgagcagctgacaagcaccctccgtgtagtgtccataccagcagagtgagtgccaccagctcctttgggggcctttaggccagaggtgtgcaagggtagacctgctgagctccaggagagagcctgtgtgggccagggctgctgacacggcagccacagagctggcggttagtggggcagctgtggcatgcggtggggccgaccccacagagcctccctagctggagcggcctggagcacccctggctctccacgatggccggccccgggactcgggagtggacaagctggagcgcccctggctctccacgatggccggccccgggactcgggagtggacaagctggagcgcccctggctctccacgatggccggccccgggactcgggagtggacaagctggagcgcccctggctctccacgatggccggccccgggactcgggagtggacaagctggagcgcccctggctctccacgatggccggccccgggactcgggagtggacaagctggagcgcccctggctctccacgatggccggccccgggactcgggagtggacaagctggagcgcccctggctctccacgatggccggccccgggactcgggagtggacaagcagactcctccacctccacctgtcctttcagtatttaagtggggacccgcaacgggcgggaaaggagagaccagtgctgacggagctagggacgccaacagatgtgagagccacgtctgtgcatttccaggaggccccatcatctggatgtcaggcagggaggaagggaacctgccgtggcaacccacctgctgggtgcatcctgttctctgggtgtgggacttctgactc

SEQ ID NO: 478033 - DNA, 899 bp, Homo sapiens
ccatgaggggaagtccaggcctctccacccaggagtctcttctgagtcattgctgcctccagggttatcactgggcagagagcaggtgtgatgtgtctgaggaccagcagctctgcacagagtgtggaagaccccagcaaagccacccggctgcagaatcgcagaatcaccctcgtggcaggcttggtgcggacaagtggctgtactcccgtgctggatggaacggcggcctttccgccctttggccaagtgcatgcagagactcgagcagggtgggagctgagggctgctgccagctacccctcactgcacagaaagggaagtggaggtgaggccaggagacgtgttcttcctggagtacagggccaagtcctcctttcttctcagatccactggcacataaccgcaccctggctcaatgtggccctggatgccttcagaacaatatggccaatgcagtcctcctacttttctctgtccccttttcttatctcgtatttttactctagaattatgctgggaaaataaggcttgaagttctctcatttgtgtagcactttgcaaattacagagtacttttcacaaccttgaaaggtgggtatttcatcgttcttttttagaatgaggagctgagtcatggggaccagccagggcctctctagtgaagagtcctccacaaagcagaccccaaagggccagggacccaggccgcagagtccccacaccccacggaacatctctttggggccaaggagcagcctgcattcagaattccacttctggtcccctcacccagagcactgaggcactgggctctgccctctccagatgccggcctccctgccttgctcttgttctttctcatcagatgctccgagctccttgtcattggctcctgt

SEQ ID NO: 478034 - DNA, 3621 bp, Homo sapiens
tcctcttgagagtgagtgggacctgctgtggtgagtgagtggtgagtggtgactgagtgatgagtggtgagtggtgagtggtgagtgatgagtggtgagtgagtgatgagtggtgagtgagtggtgagtggtgagtgatgagtggtgagtgagtgatgagtggtgagtgagtggtgagtgatgagtgatgagtggtgagtggtgagtgatgagtggtgagtgagtgatgagtggtgagtggtgagtgatgagtggtgagtggtgagtgagtggtgagtgagtggtgagtgatgagtggtgagtggtgagtgagtggtgagtgatgagtggtgagtgatgagtgagtggtgagtggtgagtgagtggtgagtgatgagtgagtggtgagtggtgagtggtgagtgatgagtggtgagtgagtggtgagtggtgagtgagtggtgagtggtgagtgagtggtgaatgatgagtgagtggtgagtgatgagtggtgactggtgagtgagtggtgagtgatgagtggtgagtgagtggtgagtgatgagtgagtggtgagtagtgagtgatgagtggtgagtgagtggtgagtggtgagtgatgagtgagtggtgagtgagtggtgagtgagtggtgagtgatgagtgagtggtgagtgagtgatgagtggtgagtggtgagtgttgagtgagtgatgagtgatgggtgagtggtgagtgatgagtgagtggtgagtggtgagtgagtggtgagtggtgagtgagtggtgagtggtgagtgagtggtgagtagtgagtggtgagtggtgagtgagtggtgagtggtgagtgagtgatgagtgagtggtgagtgatgagtggtgagtgatgagtgagtggtgagtgagtggtgagtgagtggtgagtagtgagtgatgagtggtgagtggtgagtgagtggtgagtggtgagtgagtgatgagtgagtggtgagtgatgagtggtgagtggtgagtgatgagtgagtggtgagtgagtggtgagtggtgagtgagtggtgagtgatgagtgagtggtgagtggtgagtcagtggtgagtggtgagtggtgagtgagtgatgagtgatgggtgagtggtgagtgatgagtgagtggtgagtgagtggtgagtgatgagtgagtggtgagtagtgagtgatgagtggtgagtggtgagtgagtggtgagtggtgagtgagtggtgagtgatgagtgagtggtgagtagtgagtgatgagtggtgagtggtgagtgagtggtgagtggtgagtggtgagtgatgagtgagtggtgagtgagtggtgagtgagtggtgagtagtgagtgatgagtggtgagtggtgagtgagtggtgagtggtgagtgagtgatgagtgagtggtgagtgatgagtggtgagtggtgagtgatgagtgagtggtgagtgagtggtgagtggtgagtgagtggtgagtgatgagtgagtggtgagtggtgagtcagtggtgagtggtgagtgagtgatgagtgatgggtgagtggtgagtgatgagtgagtggtgagtgagtggtgagtgatgagtgagtggtgagtagtgagtgatgagtggtgagtggtgagtgagtggtgagtggtgagtgagtggtgagtagtgagtggtgagtggtgagtgagtggtgagtggtgagtgagtgatgagtgagtggtgagtgatgagtggtgagtggtgagtgagtggtgagtggtgagtgagtggtgagtggtggatggactcgggccaagctccgtctgtcatgttaattgtgggtccatgatggtgtctgagtcccctggagtgggcaggagctcaggccccagacccagccattgtctgaaggtccagggcctggccactcactctgcccatcatgctgtcactccaggcagttactcaggcccgctggggaagccactggctctgacccatggaccagctcagacctcatctcctctgaagggagtggcgctggccttttcctggctctcggctatgtgtgggatgatgctggccttctcccggctgtcaggtgtttttggtgtgtccatgtcaagtgtatccgtcctgggaacacccagtccggctgccatggcagtgggcaccacgggccagcacacctttgctgcctgtgaggataggacaggtggcttgggttctgcgggccacacggtctgcagtgtgcgtggccttgacctggtgctggaaggcagctgcagaccacgagtcaaggagggggtgagactgtgctccggggaaacgtggattgtggatatgggcagccagcggggcctgcagacccctgggttagagccaagccccagaggcaccttggtttctgagaagccagaggagggagttcctgggacctgggggatgaccatggacctctgctgccacctcgtggcagggctgacgtatctgagccacgtccttttctcccggtttagaaatatcctggtgggaggcgctttttcatccttgcagcagacaggcagctctgttggccacacgatctgggctgtgtgccccgccttcagcagaggccctcaggaccctgcgggatacagcctcgagaggacagagcctcagactctgaaggccacagcagtgatagcacacctgtgtctgaggagtgcgttctgagaggagacccggcccctcgtccttgtccatccatgtggcttctgcaaagcacccttgtcttgcagagccagcgagcctggcgttgtgacctgggctaacttggtaccttttctctttttagaggcagaatcctttcttgagaacagcatctttcaactcttgacctgctcccccttcccggttcccactttttgcctggcaggctgggagggaccccctctcctgtgcagcctctccctaatcctggattccgcaggggctccaagaccctcagggtcgccagtgactcctgggtcacactggcccagcacacactgagctccagcctgatgtccagcccaggaggtcctcaactgaggtccagtacccccctgcaccacgctgtgggccccgcaccctcccccaactcttttctacaacactcttccccctgcaccgtgctgtgggccccgcaccttcccccaactcttttctagaacactcttccccctgcaccacgctgtgggccctgtgccttcccctaactcatttctagaatactcttccctgcctgcaccctgctgtgggccccgccccctcccctaactcatttctagaactctcttcctcacctgtctccctggttcttgttctggcttctccacgggaccctcctgtcctcccgtgtgatgctgactgctcgtgacatgttgcagcctgtctctgctcccttccctgctcttgtcacttcttgctggtgctctgtggctgtcatgcagactggggttggggttctgttccctctactgtactggagctccaggatctccttcccatttgggcatcagctgagggacaaggagcccttcccatctgggcatcagctgaggccaggggcggaacctagatgcctcttctaacctggcggcaatgaggcagcacacctctgcccccgctgcgatggtgtc

SEQ ID NO: 478035 - DNA, 1852 bp, Homo sapiens
acagagcttctcctgttacgtacatcttgcctcaagtgtggtgtttttggtgtgtccatgtcaagtgtatccgtcctgggaacacccagtccggctgccatggcagtgggcaccacgggccagcacacctttgctgcctgtcaggataggacaggtggcttgggttctgcgggccacacggtctgcagtgtgcgtggccttgacctggtgctggaaggcagctgcagaccacgagtcaaggagggggtgagactgtgctccggggaaacgtggattgtggatatgggcagccagcggggcctgcagacccctgggctgggagggaccccctctcctgtgcagcctctccctaatcctggattccgcaggggctccaagaccctcagggtcgccagtgactcctgggtcacactggcccagcacacactgagctccagcctgatgtccagcccaggaggcacaggcaccggcaccgtcatcctgggagccatcggggtcctcagcccccactgcagcctgagcctttcctctggccgcactgtccatttctttagctcctcttttgccttttctggggccttctccggtgttctgcgttcttttaaatgtttcatggactaatcaggcatttttcaggctatccctctgctgggatctgtctgatgcttttctcatgggtacaggaaggggctatgagtttgaggaggaagcccccagaggacatcggtctgtgcaacctaagggtgagataagattgtagttttattcaactcttacttttaaaattttacaaggactcacattgacgtagtgggtgagattagaattagactttttaactttctggcctaaaactgattgtactggcaccttttgtgaaatgacctctgcagtccccatgacccctcagggctctggatgggccccacgtggtgggggccttcagattctctgagattcaaagctctttggagagaggacactttgctggggagaaggccgctcctctgagcccctccatgggaggatcgtgaacacatagcctttcagaggcctctataatgcgccgagcagttgtgtcactgaacgtgaagaggagacctgccagactatggacagcaggctcgctgggagagcagggtggagtgaggccactgacgcgggagccctgctgtggggggtgtgtgcgcatgctcagcacagcctagggcagggcttctagtgcaggcagcgcagcacctggctctggaggccagtgaagggagggaagaaagcctggaccaggaggacaccaaggactgcccctgggacagcagccgcccctttccaccccttccccactgcctgggttggtgaaatggtagaagctcttctctaattaaatgctcatccttacgtaaatcatagctttaataaattaatcaatggtttgggaattgggtatacgaacatttataagccagtattatgatgccgaaaatgtttcatgatgaggccttcccagaaaggcggggaatcgagagtgacgtagtcaccctccacctttgtccctgctgtctatgaagaaggagtgctgtgccctctgccctcctctcccgggctcttggcagcttcccggccggcagcagtccccacgctgcccaggcggagcagcccctctgccccccactctggagctgaagccagttttctcaacgagtgtctctggagtctgtcctgccctcctgctggcttgttcttctctcctggcctcaaggaaaggcctcctgacttgcctccctgcagctggctctgctccgagggccctgatcacaggctcactgaggtgtctgtccaggccatgaggctggct

SEQ ID NO: 478036 - DNA, 858 bp, Homo sapiens
tgagaaagctatgctccgcagctcacgttacatgcacagggacttgcagaggggctccttaaggtgctccaggtcagtgccggctgcggccaggagctgacggccggcagggaggtgtagagacccggggccagtgttaaagcacgaggacctctttggcgggcacggggacaagctatgctgggcagtggcgaggaggcagctggcccctcccaaagcacaagctgcatggggacgccacccctagacagtcacagcacatgctgtgccttggaaatggacatcctagctaatcacaaatttcggacacgacactgccaggaaaagaagctgccagccgggctccaggcactgtgcggcatcttcctgagaggcctgcttggcctggccttgcttggagtctgggcccttgacaacttccacgtagacccagactcctgggccccgtggactcataacatccacgccatcctcagaggtggtgacaagcacagcacctcggcagttggctggaaccagacagtctttgtgaataagctgccaggggccaacgtgggaaagttctgagcctggcatgcacaagtagcatgctggattttttaggttctaaggttgtgctgttgtgaggcctgggaagcaaccctcagcttggcattgccttctttacagagatgcctggggggccacaggctttctctcagctttccatctgatggcattaagtaacccgcaagcaaagtccaaaactgtgaacataaaaatgctacatattgatgaatgaaagccctactgccccacagttactatgtaacatagttatttaataaccgcgaggtgggggtatctcctgcctgccca

SEQ ID NO: 478037 - DNA, 1334 bp, Homo sapiens
ctttccatccttccttccctttttctcccaagctgagggacaaggagcccttcccatctgggcatcagctgaggccaggggcggaacctagatgcctcttctaacctggcggcaatgaggcagcacacctctgcccccgctgcgatggtgtcggaggaggccggtgaaaatgagataaaagaagatctggacatgatcatcacgtcacatcacatggccaggtttcaactgcaggtcctcacacacgccaagaaccaggaagactccagttcagctgacaaaaggcaatcgacagacaccaacaccaacacccagatgacatgggcaccgaagttacccaacagggcttttaaaaaagacatcataaagatgcttcaggctctggatgggccccacgtggtgggggccttcagattctctgagattcaaagctctttggagagaggacactttgctggggagaagaccccacctgaagagcaaagttctgaaggacaagtggctgttaatgccgtgcagctggctacacccgaggcctctataatgcgccgagcagttgtgtcactgaacgtgaagaggagacctgccagactatggacagcaggctcgctgggagagcagggtggagtgaggccactgacgcgggagccctgctgtggggggtgtgtgcgcatgctcagcacagcctagggcagggcttctagtgcaggcagcgcagcacctggctctggaggccagtgaagggagggaagaaagcctggaccaggaggacaccaaggactgcccctgggacagcagccgcccctttccaccccttccccactgcctgggttggtgaaatggtagaagctcttctctaattaaatgctcatccttacgtaaatcatagctttaataaattaatcaatggtttgggaattgggtatacgaacatttataagccagtattatgatgccgaaaatgtttcatgatgaggccttcccagaaaggcggggaatcgagagtgacgtagtcaccctccacctttgtccctgctgtctatgaagaaggagtgctgtgccctctgccctcctctcccgggctcttggcagcttcccggccggcagcagtccccacgctgcccaggcggagcagcccctctgccccccactctggagctgaagccagttttctcaacgagtgtctctggagtctgtcctgccctcctgctggcttgttcttctctcctggcctcaaggaaaggcctcctgacttgcctccctgcagctggctctgctccgagggccctgatcacaggctcactgaggtgtctgtccaggccatgaggctggct

SEQ ID NO: 478038 - DNA, 1293 bp, Homo sapiens
tggagacactcatgaccaccgcctgcagccttgtgcggccagacccggttgggagcagctctggttggctggaagctcctggggtctgaagtgatgaggcctggccctgcaccccgggctcttcctgtgcacagcagggttgactgggaggaccagaggagggttgggagagcgtccgttcgtgctggcggcagctgtgtgctgatgctccaacatgctccgcctgggcatccagcacgccttaagtgagctggagaggggtgtggacgaggatgagggctctcctgggcttctacagtggagcagcctgctcagtgtccaggccccggagcccgcgttggggctgcggtcccagtgcccctgccactgtgtggctgtcggcatggtccagctggcctgtggcttcggtgcttggagggctgtggcaagggctgtctgtgcctggcgcgtggtagaagctggaattgctgggtcacagcatgcgcccaccatcaaccttcctgggtggcaccgagtggctttcctcggtgatacgggcgagcggggcgggtcatctggtgtcatgtgctctcccacgcttcctggagcaatttttgttgggctgtgtctttacctctgggggctgtggggtgtgtgctgcgactttctcctgcctctacctcctggctgatgcgctcactccactgccctttggatcacggattggccatgagggtgtccctctgggatgtgccttttcaagacctctgcccactcctctgtgagcaacccagaaatattctctgcataggaaccccttgtcattaaacaactgcatgtaccttgtctcacttgtggcctgtatttctgtcccctcacagtgtcagttgacccaaacaaaatcttaattctaacgtggtttatcatttcagcctttttcttaacagtcagagctttctggtgtctgaaaactctgcccttctcccccgcctcccagctctgtgtaaatctcccctgcctcccagctctgtgtaaatggtgtcctgtgctgtctttcagacgctgtgtcgtttatgcttccccttgagacgcacagcacccaagtccccgtgagggtggattgatgagggggttcaggtttcattttattcacctgcccgtgcaggggaccacgcgctgggtactgaaaggccttccgctctgcccatgtctgtgcgcacctgtttttcatgaccttctgttgaattattccatggtctacatgtctggtttttgttgttgttgtcgttgggttttcttgtttgtttgtttttt

SEQ ID NO: 478039 - DNA, 992 bp, Homo sapiens
gcctcctgctgtgattaggagacacagagattgttctctctctgcaagtggacagagaagaggccatgtgaagaaatgagaaggcagctgtacgcaagccagggagggaggcctcaccagaaaccaaccctgacagcaccttgaccttgaacttctagcttccggaactatgaaaaaattagtttctgttatggaagcctcccacgggcccccagcactactgtggaattccggccggaacacacagcctggacctggtcatgagaaacggccccacaagcccaacttgagatgcattttacagaataagtggcttaaacgtctcaaaaacgtcaaggtcaggaaaggtcaaattaaaggagacaaagaggtctctgctgaaaacaacgaccacggaggccctgatgcctcctacctgggctgtgaccctggcctagggctcctcgcacctcctgcaccccacagcctccgggccaggctccggctcccacccagtccctgcagccaagggaagccgctgcctgcaggcctggagggctccctgttccagctgctccctcactggcctccggcagggtcaggacagagagggggtggcaaatccactgaccccagcggaagcctcgccagagtctcccaggcaccggtggacccaggcatctggggccagcggggaggccacggaaaggggacagtgctggctctgggcccctcgggggaccgtcctgcactggtgcccatgggcagcagagggcgcccctgaccatccctccatggcgtccgcaggagcctcaccagcctcagggtccaggggcacccacccagctgtcaacctagctgtctggagtgagcttcagtgggaggggaggagggggcctgcgattgtgcagggacgaggctgggggagcagagactccagaaaccgtgtcccacaccccgcactgcccctcactgtgcagccccagcctccctcctagagccccccagctgct

SEQ ID NO: 478040 - DNA, 573 bp, Homo sapiens
tgtcacttccccaggagacctatgggaagggatggtcgacgtgcaaaccagccatcaaaggagctgcccccactccgcagctgcaccaacgtgccatctcgccggctctgtggtcagacgcctggtcacggctcagctggggcctgtgctggggtctcagcggcaccaacgtgccatctcgccggctctgtggtcagacgcctggtcacggctcagctggggcctgtgctggggtctcagcggcaccaacgtgccatctcgcctgctctgtggtcagacgcctggtcacggctcagctggggcctgtgctggggtctcagcggcaccaacgtgccatctcgccggctctgtggtcagacgcctggtcacggctcagctggggcctgtgctggggtctcagcggcaccaacgtgccatctcgccggctctgtgcataaaaaatgcgttgaaaaggccaaatatcatttgtctgaaatatgaatgtgtttaacttttccataaagagcaaagatgattggattgggtttggaaactgtgcagcccaggggtgacccggagaggtccgtgaaggac

SEQ ID NO: 478041 - DNA, 1177 bp, Homo sapiens
cctcactgcctcatctgcgacacatgggaaggcagaggatccacttcagaaggtggctgaaccaggacattgaggcgtgtgaggtaacagcctgcaacaccgtccacacgggtgtgggtgatgccatcacccccgattccccagaggagggggcagacgcagacgactccaagctgggaccaaccacctgctcagtggagtcatcaacaccgccggctgtggacccggtgctgcgtttggatcccggccctgtgcctcagttaccccatgggtccagtgagagcaggcacagcctgtctggccagccgctggggactacacagccccagctgtgcaaaccgccaccagcgggcccaggaccccaggggaacaagcgtggaagcgggagcccaggctccgagggcggggtttctggggacgccgaggctactgagttcaccgctggctggagcagaacggacggcagcagccagaaccccacccttgagggccttcgagctctggggcctgttgcaggttttgaaagctcctcctgctccagggtgaatgccgaagtgcttttcattttccgggaagctggtttgggagacattgttacattgcaagtattgccaatccgagtcctccagaaaggccgcgaggaagctcatctccctcacggaaggaatgttcgtgcgcagctgcgagtggccctcatcctccgccatgtggtgtttgaacaaagtgttttgtttggtttttgtagcttccagatcacagatgagcaaatggaggccctgacggctgagatctgagtctatgcaggaccagggtctgtatgctgtaggcagtcctgccctatattcacctgggtgcagaactctacaatgtggcactcctcaaaagctttctgctacatggggtgctggcggagggtattcatgttgtgaaacactaagatgtacctggacttctgaagtccactttgctatcccccagacttaacccctccacagcctcagcattttctcttccctcccacatttcccctagtgactgtaaactcttcagttcatttaatttagggaccatagcacctactctgtacttgtgaagaattgtcagtgatttctggtttagggagctgggtgaagccccctgtctcactaccctcacacccaaggatatgaaccacaac

SEQ ID NO: 478042 - DNA, 1305 bp, Homo sapiens
gacacgcactggggcctgtcagggtgtggggttgggggagggagagcattaggaaaagagctaatgtgtgctgggcttcatacctaggtgatgggttgcttctgtgtgtgtttctgtgtgtctgtatcgtctcctcttcttacatggacaccagccattagattagggccacctaatcccatagagctacaggacacaggacgtcctggttcctggagcattgactgttctgccctcgtggccaccagcctcccagcagatgaccaggaagtcgctgtgagcatctcacggggatggagaagcacattcagtgagtgtcaggaggatgtcagcctagactggcaactgcagcctggtcccgggcccggggggacggccgtctccaagctcactcggctgacagccaacctgttcccggttcccggcagctttgggactgtgtcttctggggactgtggccaggctcagccctcacccttggcaacagtcccccagcccctcacaggagtccccaggtgcttccaaccctacaacttctcttctggccccactcgaggacctcctcccgagctcagacacagaaggcctgctctgcagaaaacatgggtgtctgaccattaccagtcactcactaatagcccaaattccttcctgataaatgtgccgtgacacattcacctggacctagccaccttcggaacattttctccgagtgacaaatatgactgcacggcccgggctctggaaagtgtgtcatgtacaggaacggccgaggtcgtttagctggcgtgggggtgggcacggccctgcatccccccagcagtgaggcagggacagactgtgaagcctcccccaggccccactgaagaccccccggtccccaaccctagggactgaggggtgggcccagagcagggacaggggagcctcagggtctctgcagctggggcctcccagcgctccccctggcaggtggcctgggccagggcagctgactcagagccccggatggcagggaggcccgaaccagctgtggcacccacggccgcacccgacagccatggaaacttcccgacagcagtcgctgtttcacagctgaggaggagaggggagcagcccaggggccctgcagcaggtgccatgtggactcggcccagccgtccaggaccggaagagcaggcgcagccactggagggctacggattccagggcttagaaggaggtgccggcggctcccagggagcaggccatttgcttgttctcagcagcccctaccacgggacagtgagaaccttcacaccacac

SEQ ID NO: 478043 - DNA, 782 bp, Homo sapiens
cccgccccgccgccaggaagcgctgcggccccgcggatgggaggagggggccgggggcacgggagggggatgggagggaagcggggaccctcgagggcgggaggctggaggaggtggagagggtggggacccccctgcagcccgggccgagctcccccgccagcccctgcccgctgctgctcggacttcgcgtcccgggcccggccgcccgtcgcccccgccccatttcccggacgacctggctggggctgtgtccgcctccggggccctgggtgttggggaccgcgccccgcacgcagggccgacgggggccctgggactcgccccttggtagcagctgccctggggggtgcagggttccccccatcagccccccgacccctcccctaccccgtgtcctgtgtccggcttgctcaggcctcccgcgagaggccccgggtcaggagctcctgcagaaactgccgctcctggggcctgagggtggggagccgggagggcagggacagcagagcctgggcgcggaggttggggcagagcctgggcatgcggcgagccacccctgccacccctttcccgctggaaaccacagagcttgcagaggggcccctcctgcccttggaagccagcacttcctctgtgctggaagatgctccaggggcctcccctaccagagcagcaggtgccctcactgggggctgctccaccttgtctcttggctgccagcagtgactagggagaaagtccagggtaacctggatggggacctgctaggcctgaccagg

SEQ ID NO: 478044 - DNA, 1894 bp, Homo sapiens
atcccacctccgcttcacccagaagctcagtacgtaggagtcagtccctgccacctgacattctgggacatggctaaggaacttgatgaagaaaccaaacagtcccgtgacgtcttagcaagctagcaacgtggcctgagctttgctttgctgttggatgtgagctcttccactgcaggcggcctgcacctgggctgggcaggaacaagtccaaccgcaggtaccctggacgtgagccttgatcgtcccacgtgtggccagggggcctgtgagggtgcacgtgcacacacatgcacacacagacacacacgtgcacgtacaccagcaggtgcatgccctgccgctgaacccctgggggagggacaggcccagtcacaggggcaggcaccagaggacaaggccacggagggctccgcatggcttcggctgctgccctgcagtcggtcccagcctcatagcacttgccaggtggagccgctccgaagtcttaggatccagggatgggaaatgccagcaagaccagtgggaggtcattagacccgcaggagcgcacgtgactccgggaagtgggatgggaccgtgttgccggaaaagccggatgagcaaaggcgggcaagcccaaggtgttcagacccggccggagaggtgggagacggggaacacggcagctgcacagctctcccggggagagtccgcgtgtggtgggagggacccagcccgactccctaggagctggttttcatgtttggggcccacgaagaccttgagctgccttcaggaaggattgtcacgcggggcaggaacaaacaggaaggtggctgccacttccagcggcttcacggcagagcttgtgcaatcgcaggacacagcctggatggccgaagacagcagggcagctgtgaacggggccctgccacaccctgcctccgagtgtgtggggtctgtacctgctttgcccccactggccgctttctccaggacagccatgaacatctccagtgtcctcggagcaaggaaggaatgcttcctggagcagaagtggccacaatgacgctaggtcagcagatggccgcagaggcctgggcagccggtttccacgggagtcttggcagtgacccgtgcacggaggagacgcgtgccttcctggccccccagtttggattcctggtgcctctaaggtctgctgatggcagagctgcacccggggtgggcctgtccacacccgcccccgaggtggctcttccgtctctcccgcaggtgcaggacttggtacaaaattgcgagggatctttgaaactcccaacagcagcccacatgctacccgatgaggaagccggggaccagaccaaggacactgaccatgcccaagccggggaccagaccaaggacactgaccatgcccaagccagggaccagaccaaggacactgaccatgcccaagccgtccagctagttcagagtcaagtggaaataaccagggcgggagcacagagagccacatcccagtggctccagatcctggtgtcggacagctgggtgcttggggaactgccgttcattcacagggctttgcggctgagctcagaacttgatcttgactttgatgggtggaaggaatgggtcatgctaatcttctctatcatttccactttaggatattgccacggtttctacaggactgaacaaagggggaccaacgcagaaatgaaaacttaaaacaaaagtaagtattttaaaggaaggggccaggggaagaagaagagcactcgcagcttccggttttgctgaatttcttgatctgtaaatcagtatttttcaccacgtgtttggatttggagccatcattttgcaaaaatgtttccttcctagactcatactctccttctggagctcc

SEQ ID NO: 478045 - DNA, 783 bp, Homo sapiens
tgaggtctcgtgctatctgcttgtgtaaagcatgtgacacctccccctctctcttgctcccactgtcaccatgggaagtgcctgttcccactttgccatccaccgtgatcgctcaccctgggcaggaagagcccccgaccctgggcaggaagagccccccacaccgaggagaagcctgtgctcagaggggccccaggagccttctacgctggcagccgcccatggcccttggcaccagaaaggaaggcaccgcacccttggtcccctcctggcccagcccagcacctgctcttcctccagaccccagcgcagcttgacttcccagcccctcattgctggccttttgccgggcagccagtccctgttccctgccatggaggaaccctccctctgcccagcaggcctgccttctggcctcacccctgtatctctgcagggtcccctggctatcccaggttcccaaagaacccgccctagcccacttggcctcggggccgcagccctgcctggtgggtccacttttcccagagacttggctggctttctcccagcgtctgcccagggcctgccctggagcaggtctggacacacccactgcatggacaagagaaacaacatggctccctcagcctctccacccggccagagacaaggggagcaggccccagatgtgctgatgggttagtgctggggaaaggtgccaacccttgagtgatagtaacgtgtgcagaaaacacacagggagtctccaggtcagagggcctctgcaggcacccccattcc

SEQ ID NO: 478046 - DNA, 536 bp, Homo sapiens
tcaaggtaatgtcatcagttaaggccattttcacttcttttgtgattcttcagttacttccgaccatctggatgtatacgtgcagtttgccgacacctggtctagagcagggcttcaggctgagggaacagacatgtttcttttcatctctggagtccacagagtcatctgcattctggaaatatacagcagaactgttcttaaaatgtgaaaggacagcgatggatgccacgccagggcctggctctgacctgccacaggaatctgaaccatctgcagcaccagccggtggggaggtcctcggagttccaaagtttgcctcagggatgtggtgtggagcccagagcctccagggtggaccaggttctgcccctgagtcgtaccaggaggctgagcccagccatgcagctcagctgctccagatgcctgagcctcagaaaccgggagacagcgatgtctattgccctcccaatcctgacgagattaactgagagtctagcaccttttaaaggtgtgaataggaaacattcgtcatc

SEQ ID NO: 478047 - DNA, 1134 bp, Homo sapiens
tctgcagcaggaggtggtgcagcaagccggctgacagctagactgctggcagcatgaagtggaagccccagagcagacgggcacacagcagatgggtttgcagcagacaggcttgcaacagacaggcacgtagcaggactgctggcagggggaggaggtgcagcaagtcggctggcagctagaatgctggcagcatgaagaggaatcctcagaacaggtgggcacacagcacacgggcttgcagcagacaggcacacagcaggactgctggcaggaggaagaggcacagcaagttggctggcagctagactgctggcagcatgaagaggaatccttagagcaggtgggcaggcagcacacaggcttgcagcagacgggcacgcagcaggcctgctggcagggggaggaggcgcagcaagccggctggcagcacgagggcgtgcaggagctggtgcagcctgattggcaggggctgggctcacaggccgcctggcagcaggggctggacacacagctcactggggtgcagaccagggtcaggcagggggcggtgccgcaggggggctcacagcagctctctgggcagtcgtccactcgccaggagtcagagcaagcgctggagcagacggacatggtgcacgcggccatgctggggtggggaagacgtgagctgggagctgggggaggtgtgagaaatgacaggaaagccaggaaggctaggatgacgtcatatcagcgggtgtgctacagacatgcacggcgcagcaaaatcaacatacaagggacatacctcaatgtaataaaagccatctatgacaaacccacagccaacataacactgaatggggagaagttgaaagcactccctctgagaactgcaaaaatacaagagaaagaaataaaaggcatccaaatcggtacagaggaagtcaaactgtcgctgtttgctgatgatatgatcgtacacctagaaaaccccaaagattcctacaaaaagctcctagaactgataaaagaattcagcaaagtttccagatgcaaaattaatgtacacaaatcagtagctctcctatacaccaacagcgactaagctgagaatcaaatcaagaactcaatcccttttacaatagctgc

SEQ ID NO: 478048 - DNA, 2194 bp, Homo sapiens
tttattagaactagagggggtgctgcccagggtggaaccaggcctgctggggacaaagagcctgccccatcttctgagggtgtcaaagccagagagggcagagcttgctggggcagctgggaggtcagcccctggtgggaagggactccggatcacatccagggctgtcagcagctggacttctggccagagcagaggctgtagcaggcagggcgggagcacatggggcggcagaggagggaaacacaggaggccgtgcggcagcagctgggctggcaggaggaggcagaggcaccacaggaggggacgggcacgcagcaggtggacttgcacacagggtggcagaggagggacacggaggaggaggatctgcagcaggaggcggtgcagcaagccggctggcagctagactgctggcagcatgatgtggaagccccagagcagacgggcacacagcaggcgtgctggcagggggaggaggtgcagcaagctggctggcagctagactgctggcagcatgaagaggaatcctcagagcaggtgggcacacagcacacaggcacgcagcagacgggcacgcagcaggcctgctggcagggggaggaggtgcagcaagttggctggcagctagactgctggcagcatgagggtgtgcaggagctggtgcagcctgattggcaggggctgggctcacagaccgcctggcagcaggggctggacacacagctcacacagctagactgctggcagcacgaagaggaaatcccagagcagacaggcttgcagcagacgggcacacagcaggcctgctggcagggggaggaggtgcagcaagctgactggcagctagactgctggcagcatgaagaatccccacagcagacggacacacagcacacaggcttgcagcagacagtcttgcagcagacgggcacgcagcaggcctgctggcagggggaggaggcacagcaagccagctggcagctagactgctggcagcacgagggcgtgcaggagctggtgcagcctgattggcaggggctgggctcacaggtcactgggcagcaggggctggacacacggctcactggggtgcagaccaggctcaggcagggggccggggcgcagcaggggggctcacagcagctctctgggcagtcgtccacctgccaggagtcggagcaagagtcacaggaaccaggaaggcagacgcggctgccgtagctcaggtcgctggagcagacggacatggtggacgcggccatgctggggttgaactggtggagggtgagggagtgagcctgtgaggtgctgaggctctcgggcttttattccacctggccttgttgtccccgggcccacagcttccccttccgtgttgccgagagctggagtctgccgggattaggggtgtttgttcgcccgtgatgtgggccagctcataaatctcccatcacatctgggctgtgtcccatcccatgtggatccctggcggcaggaattgggcggggcctggtcccagctgggttcggggagctgggagagccacaggtcgcggcatcgtccacccctggccccagcagccccgggacacagagtccctctgcaggaagccggcctcaggaagtgtccttgtggtgaaaacccctcatccagcgtggtccttcccccatcaccggacacaggactgtggccatcttctgagggacaacctggggcccatgagccttcattgacctgccctgggccatggcatggtgggggtggggggcagctgtaactgtgcccagacctcttggctttgagctctggacgacttctcatccccacagcctcttcacctccggccctgtttcgtgtccacctcgtctttgtgttttggaggcagcaggacctgtgtgttccagggcaaggacggtgggcttggcccctccctgcttggacagcatgacagccttctgggctgtggttttgggttctgaacctgcagagtaaccgtgctgagcagcgggcggtcagcagccctcgtccccgcctggggtggctcctctgtgtgctctgcttctccgaggctgcccgtcagcccccacccagcctcctgctgggcccatttcccagccctgtcttccaagccctgtgccaggcctcttagtgtcaccaccttaaaattaagggacatctgtccaaagaaccc

SEQ ID NO: 478049 - DNA, 1368 bp, Homo sapiens
cccagttggtacctgtctaccctcatttctccccacaccgggctatggcctgggagcacccgctggccttgctggggtcactgcccacctgttgctggggaagcagggctggggtaaagaatccaggggtgcaggtggcagtgagcactcaggctttggatgatcttaaggagatcactcagcagctggacttctgggttgaggtggggccacagcaggccgggcgggagcatgcggggcggcaaaggagagacacacaggaggctgggcggcagcagctggcctggcaggaggaggtgggggcgcagcaggaggggacgggcacgcagcaggcgggcctgcacacggggcggcagaggagggacacggaggaggagggtctgcagcaggaggtggtgcagcaagccggctggcagctagactgctggcagcatgaagtggaagccccagagcagacgggcacacagcacacaggcttacagcagacgggcacgcagcagccctgctggctttgggaggaggtgcagcaagctggctggcagcatgaaccggaatcatcagagcaggtgggcacacagcagacgggcttgcagcagacaggcacacagcaggcctgctggcaaggggaggaggtgcagcaagccggcttgcagctagactgctggcagcacgagggcgtgcaggagctgatgcagcctgattggcaggggctgggctcacagaccgcctggcagcagggactggacacacagctcacacagctagactgctggcagcacgaagaggaaatcccagagcagacaggcttgcagcagatgggcacacagcaggcctgctggcagggggaggaggtgcagcaagctgactggcagctagactgctggcagcatgaagaatccccactgcagacaggcacacagtacacaggcttgcagcagacagtcttgcagcagacgggcacgcagcaggcctgctggcagggggaggaggcacagcaagccagctggcagctagactgctggcagcacgagggcgtgcaggagctggtgcagcctgattggcaggggctgggctcacagctcaggtcgctggagcagacagacatagtggacgcagccatgctggggattgaactggaggagatgggaaacacctcctccgcaaaaagcacagccactctcaacagcactgccgtgtgaaaagcagcaagcactgctttcgcttgcagtgtgttttcttgattgccagctaagtccttggtcaccccagctagacatctgatctaagtctccatttcttctgcaaataatatccaattggccaccacatctttttggttgtttctgctaaatgtttccaattgtatcc

SEQ ID NO: 478050 - DNA, 1252 bp, Homo sapiens
ctgagccttcctgggagtgaccgtgagtcccacctggtgaccccctggaggagttaggccactgtcccttgtgacttctaggttaagtaactcactcctagaaacggtcatggctggaggagaccaatgtcagctcaaaaccgtgtgtcctcccaggagaacaacaggaaaagagaatcaggtgaccaaggagagtttattggggagaccggagccggctggccctgggggacgtgcccatcagcagctggactcctggcctgagcagaggcctcagcaggccaggcgggagcacgcggggcggcagaggaaggacaggcaggaggccgggtggcagcagctgggctggcaggaggaggcagggacacaacaggaggggacaggcacacagcaggcaggccggcacacagggcggcagaggagggacacggaggaggagggtctgcagcaggaggtggtgcagcaagccggctggcagctagacttctggcagcacagagaggaagccccagagcagacaggcacacagcagatgggcttgcagcagatgggcacacagcaggcctgttggcatggggagaaggtgcagcaagctgactggcagctagactgctggcagcatggggaggaagctccagagcagatggacacgcagcacacgggcttgcagcagttggacttgcagcacacaggcacacagcaggcctgttggcagggggaggaggtgcagcaagccggctggcagctagactgctggcagcatgaaggtgtgcaggagtcggtgcagcctgattggcaggggctgggctcacagctcactggggcacagaccagggccaggcagggggctggggcacagcagctaggggtacagcagctggaggcacaggagcggggctcgcagcagctttcctggcaattgtccacctgccaggaggagccagtgcaggtgctgggggaggagactcggctgacacggcccacgtcactggagcagacagacatggtggatgcagcaatcacatacgtcctggtgcagcaggcgtcagccatggtgggtgctggactgggtggtgtgagtgctggtgtgaggtgtgtggactattttggggaagatgtggaacattaccagagtcctaaatgatcccttatgctatctctttgttagtccctcctccctaagtattagttgctgttctaccttctctcctcattggttagctttgcgtgttctatggaactcttttgtttt

SEQ ID NO: 478051 - DNA, 1170 bp, Homo sapiens
gtccttgcctccagaacccagctgggatcaggcccaccccaactcctgcccctgaggttccacatgcaacagactatagcccaggtgtgacaggagatttgtgagctgggcaatgtcaccagcaaacaaacatccctaatcatggcagacgccgcctctcagcaacaaggaaggggaagctgtgggccctggaacaacaaggccaggagggctcacctcctccccaccccagcatggccgcgtccaccatgtccatccgctccagcgcttactccgactcctggcaggtggacgactgcccagagagctgctgtgagcccccctgctgcgccaccagctgctgcgccccggccccctgcctgaccctggtctgcaccccagtgagccgtgtatccagcccctgctgccaggtgacctgtgagcccagcccctgccaatcaggctgcaccagctcctgcacgccctcgtgctgccagcagtctagctgccagccggcttactgcacctcctccccctgccagcaggcctgctgcgtgcccgtctgctgcaagcctgtgtgctgcgtgcccgtctgctgtggggcttcttcgtgctgccaacagtctagctaccagccagcttgctgtgcctcttcctcctgccagccggcctgctgtgtgcccgtctgctgcaaacctgtgtgctgtgcgcccacctgctctgaggattcctattcatgctgccaacagtctagctgccagccagcttgctgcacttcctccccctgccagcagtcctactgtgtgcctgtctgctgtaagcctgtctgctgcaaacccatctgctgtgtgcctgtctgctctggggcttcctctttgtgctgccagcagtctggctgccagccggcttgctgcaccacctcctgctgcagaccctcctcctctgtgtccctcctctgccgccctgtgtgcaggcccgcctgctgcgtgcccgtctcctcctgctgtgcccccacctcctcccgccagcccagctattgccgccaggcctcctgtgtgtcccttctctgccgccctgtgtgctcccgcccggcctgctacagcttctcctcaggccagaagtccagctgctgacggtcatgtcccccagggccagccgggctcaggccccacctccctgccagtccttgga

SEQ ID NO: 478052 - DNA, 613 bp, Homo sapiens
gcagtcatggaatatgtggtctttgtgtctagctttgttcactcagcatgttttcaagagcctgcagttcagccagaggatgcccctgcccacagaatgtgactggaaagcccctcatcaaggtctccaagaactcccattcctaaatcctgagttggtttctatcactgtgagtgtgtgtaccacggcccctgaagccctaggtcactctccataccactcaggaagcctgtgcaagatgctcctgacccccgcgacagccctgtggcccccactttccctgcacccatccctgtgtggcctgtctcttccagcacagctgcctggcctgcgctccatccccaccttccccttctggaagcgagccgtgcctcctgcggtgggaccagtgtgggggtcctttgtgcccacagggtatggccgaggcccccaaacccgactatgctctcctaaggcgagaagagtgggcggcatcgcagccccgggtcaccagtgtggggggtgtggaaactacccccaggaggcctccttcctgctgtctggtctggacacattcccacactgtcctgggactcctctgtcatcgccgccctgagaccttcctgttcccacc

SEQ ID NO: 478053 - DNA, 997 bp, Homo sapiens
tcacatttgctttcaaagcctgctgtcttccaagtgtttgatctcggaatgagagacactgtcctgtctgcctttaacaagacagccaggcgggagcttgcggggcggcagaggagggacacgcaggaggccgggcagcagcagctggactggcaggaggaggtgggggcacagcaggaggagacgggcacacagcaggtggacctgcacacggggtggcagaggagggacacagaggaggagggtctgcagcaggaggaggaggaggtgcagcaagctggctggcagctagactgctggcagcatgaagaggaatcctcagagcaggtggacacacagcacacaggcttgcagcagacgggcacacagcaggccggctggcaggaggaagaggcacagcaagctggctggcagctagactgccggcagcacgaagaagcagccccacagcagacaggcacacagcacacaggcttgcagcagacagtcttgcagcagacaggcacacagcaggcctgctggcagggggaggaggtgcagcaagccggctggcagctagactgctggcagcatgacggcgtgcaggagctggtgcagcctgattggcaggcgctgggctcacaggccgcctggcagcaggggctggacacacagctcactggggtgcagaccaggctcagggagggggccggggcgcagcagctgggggcgctgcaggggggctcacagcagctctctgggcagtcgtccacctgccaggagtcggagtaagcgctggagcagacagacatggtggacgcggccatgctggggtggggaggaggtgagctgggggaggtcaccctgttcttgtttcatggagtgacagcctctttgtttcctcacatctgcatcatcgcttgttcagactttgcttctctgtcatgctgtgatttcctcacatgtctgaggacccttagttgtcattcacatttttaagtgagggtctagattgttt

SEQ ID NO: 478054 - DNA, 691 bp, Homo sapiens
gttaccactgtgccaaattatactagggcttgaaggttcaataagtgactcatcctgaagtcctgaaccagctcggacagagaagatggacgaaaacatcagccacaagaaactaacctcaaggccgaagctatttatggtggagcatgacgcgggaaagtacacgcgggaaaataagatgttgggaaacacagtggaaacaaccacaaggaagacaacagttgtgtttttgtgttacccagatgacaggacccagctgctccccagcctgccagccaacctgctgcatacacagcccctgccaggcatcctgctatgtgcccgtgagctgccagtcctccgtgtgcatgcccgtgagctgcacgcgcattgtgtgcgtggctccctcctgccagccctccgtgtgcgtgcccgtgagctgcaggcccatcatatatgtgactccctcttgccaatcttcggggtgctgccagcccccctgcaccactgccctctgcagacccatctcctgcagcaccccttcctgctgctgaccagctgctcctggtacacgggggtacacacctgtatccctccgtgaataagcatctggtggacccccagattgcacacatagggcagatgaaaagcatgcccaaggaaacctctgaactctggggtgagaacgtggaaaaatgattcagaccttcca

SEQ ID NO: 478055 - DNA, 1032 bp, Homo sapiens
gaagagctagaagatacgccattccacccggagtgtcctcagcaggtttattcgatcttcatgctgcaccggctcacgggaagctcttcctccgtccactgtgaccatgccgccgatactctacttcaggcagctctgtggttgactactggcaacattgctggagctggccttttgttttttggtggaggtattggtggcactatcctatatgccaaatgggcttcccatttccgagaaagagtagagaaaaccataccttactcagacaaactcttcgaggtggttcttggttctgcaccttataatgttccattgccaaagaaatcaactcagtctggtccactaaaaatctctagtgtatcagaagtaacaaaagaatttaaacagcctgcctcacaactccaaaaacaaaagggagatactccagcttcagcaaccgcaggtgatacagtgttggtccctggggttcagcatgaggaatctttaaaaactgatcaccctgcaattgatgaaggaaaacccacacctgcactttcagaagaagcatcctcatcttctataagggaacgaccatgtgaagaaattgcagcttgccttgcacaagaggaaaaacaagaacaagttaaaactgagtctctagccaagagctttgaagatgctctgaggcaaactgcaaatgtcactctgcaggcgattgcagctcagaacactgtggtccaggctgtcaatgcacactccaacatattgaaagccgccatggacaattctgagattgagggcaagaagaagtctgctaagtgccacacagtgcaagaaacgaaacagataatggaaatcctgacagcatatgccagcgccgtaggcacaagaaccactcaagtacagccagaggactccaattacatccataaatgaggatttgatgttttgctcttgtctccctccacccttctctttctctttctctttgtgttttaatttggtcaatttacatttacacgttttcaaattcaaagcttccacacctgg
